United States Patent Application Publication US 2007/0054278 A1 - sequence listing, part 74

SEQ ID NO: 96026 - DNA, 42366 bp, Homo sapiens
gctgggattacaggagtgagccactgcacccagccttatagatgtatttctcctctcttttcctcatttctgcttgcccttttaccttctcccttctctaaggtgataatataaggaaggaagtatggtgtcacagaataagcacaggactaagggccaacggacctgagctctggtctcagctttatgacttaaccatggtgtgatcttgttttttcccatgttaaatgggaataacctctgccctaccaagccttagggttgctgagtgactcaaagaagataaaaacagcgaacagatctattgaacttactgcctcccaggcactattctaagagcttcacatgcattaagtccacctacgaggcttaggaagaagctgaggtgtacagaggatgacactcatccaaagtctcagaattgctacgtggcagagctgggattcacacccaaccagtctggctccaaagtctgtgcttttaaccccctacgctatattatgcctcacatacactttgaatacgaaaatgtttgggaaaaatagaggtataaaaatataaagtatcactgtagtacaaagtgcttagtttagttatgcaaacaccccaaagaaaaatcaatctacccattgtaaacagagaaaatatttctcctgggttctaatctgtggttctcttaggtaataaaaccgatgctggcatgaagtttaggcttctggataataaagagctccctgagatgtgttgcaaataaaaatccaactactacccttatcctttatctgacgtcactgaaagcatttgtcttcttttttaatcctgtatacaatcattcccaaacactgaaagcatttctaatataaaattaggccaggacagtggttcatgcctggtaatctcagcactttggcaggctgaggcaggaggattgcttgagagcaggagtccaagatcagcctggacaacatagcgagaccccatttctacaaaaattttaaaagttgttaacaaggagccgggcatagtggcgcatccctgtagtcctaactacgcaggaggctgaggtgggagaatcacttgagcccaggagttcaaggttgctgtgggctataatcgtgccactgcactccagcctgggtgacagagaaggatcttgtctaaataataataataataataataatataaaattaaaaggttctgttgttgatgattctttgctgtgctagagtcacatattatcaggctgattgggaaagaaatcaattgagaagcgtgcacagataggttaacatgtcgccaccttgggctttaggaagaggcttggtggagtagagggtgtttgcacaggagggccagtgtctgggttctggtctaggctgctcttgcctcagtctcagtttcagattcctgtacattggaaaggggctgtgagcctctccattgttggcttttttgatggactttctttcctgtagtagatgctcattatttgctcaccttgtgggaaaacaacaatttcaattttacccagcatctttgaaacagaaagaatgattaattttccttaaagtaaaatggagcacttgtccttcaagttgcctgcttaggtctctcccaagcatactctactttctttcctgttctaaagttttttgttgttgttttttgagatgcagtcctgctctgtcgcccaggctggagtgcagtggtgcaatctcaactcactgcaacctccgcctcccgggttcaagcgattctcctgcctcagcctcctgagtagctgggactacaggcatgcgccaccatgcccagctaatttttgtattttagtagagatggggtttcagcatgttggccaggatggtctccatctcttaacctcgtgatccggctgccttggcttcccaaagtgttgagattacaggtgtgagccactgcacccggcctaaagttttttaaaataaacttccactcctgctctgaagcttgcctcggtcactttttctgccttatgcccccagttgaattttcttctgaggagacaagattgaggttgctgcaggtgtctactgatttgccactggtaacatatttggtgccacgtgactcagatggtaagggatctctatgcctcgctttcttctgctggaggcatctgatccctgtgcagtttttcttctcctccctctctcctgcttactaaacaacccccagaacaattcctcttggccatacgtgactctgctctctgccagttgatttcttagctcactctggtgggtggctcatgggagtgggaaggaccctagggtctgcatcaagcagatcagaggcactatatggccctccttgataggaggcttgagactggtgaggctagggcctaaaaaccgtgcagtgtctggggtttcctctgcctttttttccaatgaaaataacgaaacctgttatttcccattgagggggaaaaaggcgggagaagccccagcagaaatgaagctgctcctgaagcttccaacatgaaactcacctcggcactggtaaaaagagggctcaacctgtctctagatttacagtctaatgcttgctctgccattttaccctcatacttatgttcatcaatcattgatgaaaaagaaaagaaaaaaaaaatgactggaataagggcaccttactggtaagaaagaaccaaacctcaaacccgtaccttctatgtcatggtgttctgggtatcagcaataacaacagtcacccttttactgagcatttactcatgttaattactgggtgtattagagttcttcagagaaacagaaccaatggcatatatttacatctagaaagggatttgttataaggtattagctcatgcagttatggaggctgagaagtcccatgatctgctgtctgcaagctggagacttgttagcaggaaggctggtgttgtagcctgaaggcctgagagccaagggtgtaggttccagcctgagtgtgaaggcctcagcaccaggagcaccaagggcagaagatatcccagatcaagcatgcaggaggagacaggacacattcttccttctttggctttttgttctatttaggccctcaacagactggatgctgcccacctactttggggagggcaatccactttactcagtctatccattcaaatgctcatcttttctgaaaacaacttcacagacacaccaagaaataatgtttaaccagatatctgggcatccgtgatccagtcaagatgacatgtaaaagtaactatcacactgggctaagcattttacatgcaagactgcaatcctcacttaaacctgcaaggtaggtggtgttagccttatttgcaggaggtgaaaccaagtccctgggaggtttgagtaacttgtcccaggtcacacagcacagtaagtgggagagatggaatttggatcctggtctgaagcccatgctcagtctcctaaccacttgctaccatccctctgcctcattaagataaattctgagctaaagatgaacactgaacgagtggtaagcaatctactacctgctgagttcagttccctagggtcagtactgtatttactttcacattcactattctaattcacactttgaccatgagctcaacactgggaactaatctgagggcataaagtaaggctttttcccctacttgtcttacaaaagtgatcctgtttactgtgaaagatttgcaaactacaaaaaagtatagttcctcaaaaaaataaacatagaattaccatatgatctagcaattcccctgctacatatataccccaaagaattgaaagcagggactcgaacagatatttgatactcatgttcatagcaacattatttacaacagctaaaatgtagaagtaaccaaaatgtttaccgacagataagtagataaacaaaatgtggtctatacatgcaatggagtattattcagccttaacaaggaaggaaatcctaatgcatgctacagcatgggataaactttgaagacatcatgctgaatgaaatagtcacaaaaggaagaatattgtgttactccacttacatgaggtttctagaatagtcaaattaataaagatggaaagtagaaaggtcatggagggaaaataagggagttgtttaactacagtttcaattttgctagatgaaaagagttctgccaatggatagtggtggtgatggttgcacaatgtgaatgcacttcatgccactgaactgtatctttaaaaatagttaagatggtaaaatgtatgttatgtatcttttaccaccataaaaaaagtataaagaaacaggaaaaaaaattggctatggtatctcagtgcaactctgttgatatgttcacatggtctttctgagtcttttttctaatcttagccttttgatgggtcttttttgacagcttcctctcttctccattacaggaacatgtttttgcagttgtgcgacccaaagaggccatttcaagctgccccatcagatgtggagcgctgatgtgtaagtattactttaatatccatgacatggctgggtagacaagagactcccaggaaagaccgaaatcacagaacacgattatgggcaatctgggctcctggggacctttagggcacgccatctcgtactgatgaaggatcactgatttatcagatgttaccctgcttaaacagaagcagcctattagcgcagctcacaccattcctagaatcaaacatatccaacccacccccctcattttacagagaaaaatcaattgagaaccgcagatcttattcctagaaagctgatgaaccctgtttctctcgcaatgggaagacctggctgccccaggctgcatccccacctgccacaggggctggcgctcgctctgcagttggccgcagtcccctccactcttctctccaaataggctcgggtctttaacctagactaccccactggccccgaagcatttttttttttttttagatagggtctacctctgtcgcccaggctggagtgtggagtgcggtggcgcgatctcggctcactgcaacctccgtctcctgggggcatgcgattctcctgccttagcctcctgagtagctgggactacaggcgcgcaccaccacacctggctagtttttgtatttttagtagagatgggatttcgccatgttgggcaggctggtctcgaactcctgacctcaagtgatccacccatctcggcctcccaaagtgctgggattacaggtgtccgccaccacgcccggctaatttttgtacttttagcagagatgaggttttgccatgttggccaggctggtctcgaactcctgacctctggtgatccacccgctttgacctccctaagtgctgggattacaggcgcgagacaccgggcccggccccccgccgaagcatttttaactgcggtgccggctttaaaaaaacttttaggtcaagaaatgcgctccagaagctcggcgagggtaggctgggcaggcgccttccgtcaccggcgcagcggtagcggcagcggacatccccgcctgggcaggcccaggtccgcggaagcctcggggccctggccccactgtgtcacacaccgcccggggccgggcccctgcacgcccgcgggcttcggcgtccgtaccggtacagcgggcggcgacacctacctcgcgggaccgtgcccagcacccggcctggcacacagcgggcacccggtcggggggcggtgtcgcgcagtcccagcgaaaaggctgcaggagcaatgacaacaggggcggaagccccctccccacgcagcccgaggggccgcggcggccacccgcgccgggccccaggaccccgcacctcagactggggtcgcgtgggtggctgcgcgcagctaggcgctcgcgcatgcgcaccgccatccaggccacggaatgaggccagaggttagatgggttgaaccactacgggaaggggaggggaagctttgggaggagtgatggagggtggaaagcggaagaaaaaagcaagatgggaccgcaagctggacgtgactgtaaggggtcatggctgcggaatccagcaggggcattggggttgacgtgcactcagcgccgagcttcttcgtagttcctcacccccttggctactatgggctggtccggaaggtcaggcawggggaagctgcgcaggcgcastgtgagcggcaacatggcgtccaggtctaagcggcgtgccgtggaaagtggggttccgcagccgccggatcccccagtccagcgcgacgaggaagaggaaaaagaagtcgaaaatgaggatgaagacgatgatgacagtgacaaggaaaaggatgaagaggacgaggtcattgacgaggtgagaaggacacgctcccctagttggtttatacctgagaaaaactttttggcaagcccaggctgtgtaaaaatagtgtagggtcttccctgaccctgagggtctgtgaggagaaactggagataagttctttctcaggtttctcctcggtctttaacacactgcagccatagtagttattttttaaaggtctagtccggtccagttaatctcccaacccgcgtcctccccgaaaaagcccgccacaacaggtgtgttcttctcgtcctctttagttctcaggctgaagcctcagatcctgaatcggccaccccgggctcgcagagggggccctctcccctcggggcagcagctgtcctcctcttcactctgcgggcggcactcacttgggccctcagtttcttgaaggctcttgccgcgttctaccgtagaagccttttcaaatgctcttctttatcctgcagttttcccttccttcttcagatctcagctaggctgtattttctggctcctggggcagctgaccaagtcgtgggtaaatctttggtttcatagtctcatagaactgtgttcctttcttcagactaggtcctaccgtagtgcctggcaatataggtacttattatttgtttagtaaacaattaggactgaatgatccttcagcctactgaatgtttaaatagatacctcagccttaacttgtccaaagcagaatttgtataataattcatgcccctctcttaatcgtcaccatttctataaatggcccctaaagtcaccagctgctctaacccaaaacctggggcttaactttaattcctccctttcctcatcctatatccagcccatcagtaaatcctgttatccagacatttctcagcactaattctgagaccatcgtagtccacacctctatcatctcttgcctggactactatttaatgtaacagcttttaaccggcgttcttttctccatttttgttcccctacaatcagtctatactccacttacagtcagagagatcttataggtctgatctcaggcctctgcttagattgctgcattggctttctagttcatttacaagaaaatcaagagtcttcacaattgagggacggaaaggcagcctagatggctggatcagaataaggaagagagagtgataggaaataaaatcagagaggtaatcatgagtcatgatgagcatggaggggagcatggagagaagcatggatgcaggattagaggtgacaccatggtgtgggtatgtgatcaatcttccttcccttacaaattttactttggctytatgccttgaatgccatctcaccatttttcacttagaactttgactggctcttttattacttttgggttatagaaatcaatgctgcttgtgttaacatgggaaatctatcacaccaccacagtyttaattctaaatcacctgggaatgagggacagggctcttttctacaaacgtgactgttcctgctgaagccatgtggagatgagcccatacccaggaaaagggtgctggacagataatccatttgccgcccatttccctggtggtgccataatagtctgggacagaggtccgagatgtctgtctagacaaagaaaaaaacactagatgagcattatttacagaatgtatttatatctaaggaataagtttaagtcctgaataatgayagtttgttatttggtttagtttgatcctgtttggaacactcccacccgaccccttgtgttttgctgctcacataatctggctaagttagcatttgaagtctgcaaagctggacttaaagagttcaaattggagctggaattgctctaagcaattccagggccttgcaattttacaattaaggaagacttaaatatatacatagtcagggtggcaaggtaaaaggaggtctgatttcctctgcgatgttcttcagctaagacctaaattctgaaaccgttaaaacctgaagtgcctttaaatatattatttcatcagagccccaggttcattgtgtcacttatcaaggtctgatttagggtcctcaaggactaatcttgttagtgtttaaaagcaactaggttttgtttttggcattttagttccatcttctagattytgttgtcttgcagatagagatcagggagcccagctacacattcattcttctagtcccttgtactcattgtatttccttctgccttagggccttagtttgtgctgttccctgtaccaggaactctctttgctgtttctcggtttcttgctcaaatgtcacttcaaggaaggctttcctgactgacttcttattttttaagttgttacaacattgtgtacctttgttttatagcacttacatttatttctatgaatatttccttaatgcctatattccttcctaaatcgtaagctgcacgagagcaggatcatttgtgtctgccttactaaccttttcatcttgagtgcctggcacagtgcttggtacctggattgatacttaataaatatttgctaagcaaatgtagtgtaacctcaaatccatgggctaagtcaagctctaggcaattccagggacttttgaagtgattttgatttttgcccacccttgtaatcaggaaaataatttatcctttgtggctgccgtgtctggtttatttgaactggactttctcaacatttaaactaggttactctgagtgttttgttttctcaggcttttgtgtcacctgaagaaatagtgtgaaggtgctttgtattcttyacagatggcaatcttggcaatgtttgcctgttttaaagtctagatgtttgtagtttttctggtaacaactattttgtgtgttatttacaggaagtgaatattgaatttgaagcttattccctatcagataatgattatgacggaattaagaaattactgcagcaggtattgtcttttatttattatgcataaatttcctcttctaagaaaaatcaggggccgggtgcagtggttcatgcctataatctcagcattttggaaggccgaggtgagaggattgcttgagcccaggagtttgagaccagcctgggcaacataatgagaacctgtctctacaaaaaaattaaaaattagccaactgtggtagcacacaccgttagtcctaactcctcaggaggctgaggctggaggattacttgagtctaagagctcaaggctgcagctatgaatgtgccattgagctccagtctgggcaacagagtgagcctctgtctctaaaaaaaaaraaaattcaggtcattcaatacaggctctcccaagttcatctttttagaatttccatttctatcctctccaccttgcctggaaggaagaattatttcctttcatctgctaattagagttattttgtttttttttttaattcacaattcttatgtaacagtcatataactgtgctgtttggtgctataaaattgatgcttgctgcttctccttattcttttactcatataatatgactttggttctttagcctttatagctctaccgtctttttcaccaaattctttggccttaagtttatcctctctcgtttctcccttttttctccccctcccccattacttctatattactactgacttcttcttttctgaaatttcctaatctttagcttctttgactctcctgggcttttctttccctcttggggttgcttttstagatcatcatcttaagtcacagaaatttcattgtttgtatttgaatataggatttgaagttattagaaatcatgctttgatcttaatttaaaataattttttcctccttttagctttttctaaaggctcctgtgaacactgcagaactaacagatctcttaattcaacagaaccatattgggagtgtgattaaggtaagtaggataattgtgtttattctgattaaatgagttctttattctgttcatgctgggcctcaccatgcttgtaatcccagcactttgggaagcaaaggtgggaggattgcttgaggccaggagttcaagaccatcctgggcaatatagcaatactctgtctctacaaaaaataacaaaaaattagccgggcatagtagcacatgcctgtagtctttttacccaggtggctgaggtaggaggatctcttgagccaagaagttgaaggccatggtgagctttgtgccgctgcactctagccgggcaacacagcaagaccctatatctgaaaaaaaaaaaaaaaaaaaaaaaaagttctttattctgtttagctcaaattggaagcagtattactggaggaatggagactgatcagaagtcattgcagaaatccaagcttattaaatgcagtagtccaggtgggggcaatggagagggagagaagtgggctcatttagaaaatatttgggagatgaaatatgatgaggtttagtccctgattgggtctgaaagtgagaggaaaaggagtcaaggatgacttccaggtttctagcttgagcaaacaggataacaaacatggaggaaggtcaaattaggagggggaatgtgaatttggatttgtacattttgagtttgagttacctgtgagataccgggtagcaggtggagccctggagacttgggagttggtcgtaaatgttactgaggtcgtagaagtgattgagattgcgcagggagggaagggacagacaccttagtaataccaagaatacttcgatgagtaatataagtggcagagccagcaaaggagattaaaagggatgacaggagaagtagaagaaacaatagtgcagtgatgtcatacacagcaagaaagataacatttgaaggaggaggggatggtcatctttatcagatagatgttgtagagagctcaacaaaataaggactggtttagaccctgggtctgctgcttatcatctggtggttctttgggttatctgttgtttgtataacaaaccaccccatagcttagtgtcgtaaaatagcagtagtcatttatttggctaatggatctacagtttggacagagctcagtgggcacaactcatctgtgctcctgctccatcatgttagctggggtggcttgactaggggctggaggattccctttcaagatggctcactcacatgactggcaagttagccctagctgtctgtcgggagcttagctgggactctggaccaggggccttagttcttctccatgtgggcctcgtcacacattggtttgcttccaagagcaagctgcccaaaagaagcaggcagaagtgatatagtgccatttccaccatttgcttagtctttacagatagaaatttctatctagggggagggcacattgatcccaccactccatgagaaaagtacctaggtcactttgtcagaagagcatgtccaaggagagatccattggggccatctgtgaaagatacagtctgccacagtaccttaatctgtttccatttctgtctctgaaaatgaggatggtactagcaccgatcttgtagagtgcatgggtaaacaaaatgaattgctgactgcttaaaacagtgtctggcagctgacatgtgctacatatgtgtagctgtcactgttgatgtctttttcctgttcctagcacctgttccctagcctgttgtgaaaaacacaacaaacaaaagctccattcagtctaatgttccactcttaagtacatcaccttcagagccaaaattcttgaaaagtaatcttaagtcatggtttctacttcctgtcctcctattcattcttcagacactcttatctgacttttacaccactaaaattcggacactgagtgatagggtcaccaacatacttgttactaaatacagtgtacacttttcaaggcttctgacaatattagtaactttatggcactcaatgtaaagaaaatgagaaattaaacctatggggcattccttttattagggcaatgggaaaaagcagaccacctgccctttcatcaaataaatgtgatctctagctgattcgtgtcttagaagacctaatggatatggaggagaagcagttatttttatccttgaaagaggttattatctaatggcaggattcactctttaaatggataatcacatcaatagctctgcagttgtaactgtggcttcttgggattctccagagacacttgaggtgtcctgaggatagagacttcttgttcttagtaaagggactacccatagtgttcggtggagccagtccctaggatcatagaacaaagggcagggggttctcttttttccccttctctcttgctaatgtgataggtgtaagtggccctcaagcattgcctagcttcactaatggtcaagactgacaagtgttctggaaactcatgagttttagatgaaacaatgctgtgggccagcagagaagcaaggcttggctccagcctaattgtgtagaaaacaaatgaaaatgctttatttcatgaggtttatctcttctggatttgtattatattgagaatctgataaaagaaaatgacttaatctggtacaaagaaatttcaatctgttcagaatctgaaaagaggaacagagtcgaggtaaagcgaaatgaacaaggtcacacagtatttaagatacaatgctttccaagatgatggtggtaaaactgtgacagtatttaaaatacaatgctttctaagatggcggtggtaaaacaaagttttgcttttgaaaagtgaaaagataaatgaggcctacatcccaagacttggttttatactcttggtattatactaaatataacatttaaatattttttcttttaaaatagcaaacggatgtttcagaagacagcaatgatgatatggatgaagatgaggtttttggtttcataagccttttaaatttaactgaaagaaaggttggtttcactggatggcatctgaatggttatttcttaggccaaaaccacttttatttaatgcatggtgaaaatgtcttttatgttaaacagtgatattaactatagggataagtgctcttgtgaaatcttattgtaatcctttttcaatatgaaggtggtggtgttgggtctgtacccagttaaagttgtttactccctgtggtttagggaatcatctggctttgcagtcctgatgttggtactgatgcaggagctgtttgtgctgtctctctgcagctgttatctttgctacttgtgtagtggggatattctcaggctttgctgcctcaatgttgagggcatttactgacattttattttgtttcgattcatctctttttattgattctctgatgagttgtaataaaaagtaaaccagctgcttacccacctcagaataagatgcaggctacacttagtctttaattttgaaataaactgtccagttacttccatctatctttatgagatggactagagttgccattccagtgtgtctgaatgttaattatgactctcttaccactcatcatgggatggtaaataaccagtgtatttacttttgagaaatgcttaagcagtcaacactgaagacatacaagacgttaaggctatggcaggaaactgcccttagctgtaagatgaaaagtgatagcttttactctcaggttttgtcctctatgtgatggcttgtaataggaaacaagctttctctttgctttctagggtacccagtgtgttgaacaaattcaagagttggttctacgcttctgtgagaagaactgtgaaaagagcatggttgaacagctggacaagtttttaaatgacaccaccaagcctgtgggccttctcctaagtgaaagattcattaatgtccctccacagatcgctctgcccatgtaccagcagcttcagtaagagattctgggaaaatatctttgaacagtaatttttttttcaaatagattcctaaatgtcatttaagtagaatatgtagatatagaaagagttctgtccttggtttaagtgggtttagtgtgaggggagtggragaaacatcctgtgaagtacatacattattaacaactggctttttgaagagtttgtgacaataatcatgaaattttaacktaagatttaagtgatatataagtagataatttcatrtagactttgcatccccatttgattgaagtttttcaccttcacagatagctttctgcaacatgaataaaataatgaacaattacaacaataacaaaactggtaaagttcccaaattctattggtatgtttcataacaaatgaaaccatagtcctgatactgtggctagcttttcagggtttttgttattctattttttaatccagaagttttaagtttacaaaaatatttcaaatgtagctgtgaaatctagcaaactgagtgtactaagaattgtattgtctgtgctttgcaatagaggacaaaatataggcagattctcttatttatttctatctaatttaaatttttttttttttttggtagagacagggtcttgctacattgcccaggctggtcttgaactcctaggctaaagtgatcttcctgcctcggcctcccagtgttgggattacaggtgtcagtcacagcacttgacctagacaggttctttatagaatattctttctcagaggtcatagcccttgcgttgtggttttcctttaaatagctgtaggaatgcaactctactctggaaacctttacgtttgctgttttttcctagggattcgatgcttcttatctcctgctccctgctctctcagctgtagctcagattgtgcttctggtgccttaagtggtttttgtttttttttggttttctttttttctgatcagctggagctcacatttatttggttttataggagggtgatttgctttctcctagtcctgttaaagctgaagtgagccaagcgcagtggtgcacgcctgtagtcgcagctactcaggaggctgaggcagggggaatgcttgaggccaggagttccaggctgcaatatactatgattgtgcctgtgaatagccactgcacgccagcctgggcaaaattacaagaccctatctttttttttttctttttttttttttgaaaaggccaggtgtggtggctgacacttgtaattccaacactttgggaggccgaagctggcagatcacttgaggctaggagtttgagaccagcctggccaacatggcgaaaccccaattctactaaaaatacacccacaaaaaattagccgggtatggtggtgcagacctgtaatcccagctactcaggaggcttaggcacgaaaatcgtgtgaacctggcaggcagaggttgcagtgagccgagattgtgccattgtactctacagcctgggcaacagagtgagattttgtctccaaacgaaaaaaagaaaaaaaaaaaaaaggaaagctgaagaggacggttgttctgagtttcttcttttgttcaagggcatccagatgcacaaggctatgtttaattttcagaaagaagaaacattaaggctttgttgcgattccattgctagaatttaggttgtgtgtttatgcagtttctgcagtatgtcagaaattagttccagactctagcaattagagactgtggtagtagtcacaggctgtagtgacattggttgtggctgtatacctttgtgtgtttcagttaaatgttcattgctttaaaaaattcaaaaattcagattcgtatatatttttaacttatgcacaggcagagcagtgatacattgagtgaatttgagactcatctgatctgttagttgctatatatccacaaatcagcataatctgagatatatcatagtattataaaaagtaatacataatctaaaatgcaactgattatgtaaataaaaatcattcctgtagactaagtgttcagattgaatgcctgcgtcacagcagaacccactgaagatgcctcaccgggttttctgtgctctggtttgttgatggatttcacttgacccagcaggtaaacaaatgttgtgtgtgtgccttgcaggaaagaactggcgggggcacacagaaccaataagccatgtgggaagtgctacttttaccttctgattagtaagacatttgtggaagcaggaaaaaacawttccaaaaagaaacctagcaacaaaaagaaagctgcgttaatgtttgcaaatgcagaggaagaatttttctatgaggtaagactatcctgcttatttgtttagatgtaaataaggattttcttgaaaatgatktatcaagatttattgttctcccactttaggtccaagtctttcaagtgtggctactctgtttttctgtttccccacaggacctagcagctaacatagtgccaggtgcatagtaggtactcaggaggctaggcaccagcctccttgcctgcactgtggttatgagcatgaggaggaggaggagaaaagtgattaacctgttaagaatgattaggcatttataatatgcttcctgtgaaatctttcattctaaaaccatgcggagaggtagacattagcctggggtttacagatgtggactttaaggcatagggaaatgagggaaattacctgcgatcacacagctggtcagtgtggaagctggggcacccctgctgctctgtgtccttagtcgtggatgtcatcctgctggtgggatwtctccagcatttttttcctataaaggtagcttgtactgtgatggacagccatataccagagaatattcttaccctctcttcctctgaaaaatcttgaagtgggccaggtgcggtggtgcacacctgtaatcccagcaccttgggaagctgaggcgggcagatcacctgaggccagaaattcaagaccagcctggccaacagggagaaaccccatctctactaaaaatacaaaaaaaaaaaaattagccgggcatggtggcagatgcctgtaatcccagctactcggaaggctaaggcaggaaaattgcttgaacctgggaggcagaggctgcagtgagccgagatcgcgccactgcactccagcctgagcaacaaggaagaaactccgtctcaaaaacaaacaaacaaacaaaaaaaaaacacaaaaacatcttgagccaggcacggtggctcacgcctgtaatcccagcactttgggaggccraggcgggtggatcacgaggtcaggagatcgagaccatcctggctaacatggtgaaaccccgtctctactaaaaaatacaaaaaattagccgggcgtggtggcacgtgcctgtagtcccagctactcgggaggctgaggcaggagaatggcataaacccgggaggcggagcttgcagtgagccgagattgcgccactgcactccagcctgggcgacagagcgagactctgtctcagaaaaaaaaaaatcttgaagtgtatctctgaggggaacatattttcctgaattggatgatatcacatcactttgaagacttctgcagaagactaaagcgctacaaatttagctgtgcccttcttttccaggaagtaaatagtaaacataatttttaaaaaacataggccgggtgcggtggctcaygcctgtaatcccagcactttgggaggccaaggcgggcggatcacgaggtcaggagatcagaccatcctggcyaacacgatgaaacgctgtctttactaaaaatacaaaaaattagccaggcacaatggtgggcaccggtagtcccagctacttgggaggctgaggcaggagaatggtgtgaacccgggaggcagagcttgcggtgagccgagatcacgccactgcactccagcctgggtgacagagtgagactctgtctcaaaaaaaaaaacaaacaaamaaaaaaaacaaaaccatatgcttcaacacctcaggttgaccatttggggggagtgtgtatgggtgttttaagatggcggggtatgcagatttactctgtcttcacacaaaagcctgatgctaaggaagcagctgagaaagtgagaaaagagtgtttgaagacaagttcttgttaaatatcaaattttacaagtcttaatttcattatgtttcacaagattattttgacaattaaatgaaaataccacttagctgcttgttcacctcttagaaattgcacacctctatccctgttcctcatgtgggtttaaaatctacttggtttgtgttttataacttctgcctgaatgtcccatttgaactttttcaattctgagttttgcttttttttagctctcattcttatttaagcatatgccaaacgtaatattctttgccrtagatyaaatgggttttgtctttgggttgtcccgatttttaattcatggttacttatttggtttagaaggcaattctcaagttcaactactcagtgcaggaggagagcgacacttgtctgggaggcaaatggtcttttgatgacgtaccaatgacgcccttgcgaactgtgatgttaattccaggcgacaagatgaacgaaatcatggataaactgaaagaatatctatctgtctaacccatttccaatggacagtgatgggcttgtttttgtaaaattaccagaaaactcagtggagatttactgaaaaactcagactttattcagattaagttcctctacaaaaagtagggttctgtcccatgtgtctctgacacatttacaaaataccagttttttaaaattttggtcaaattatgagtggttgatttaaaaacttttccaagaagaagaaaagcatggagtmgtaatttaaagaactcaataaaaacttctattttttattttaaaataatatacacagtgttattttcttcaagaccgtcctgtggatgtgaaatccgtcttcgcgtcatgtatctcccatatccagcagttcagccatccagctacctttgggaccctgctgcaccttgtgtttgytggggagtcactggagagtgcatmtctgttcagtttcagggcacgtctcacacatttgctgttccttattcattgttgacacaggggataggtgatccactacttgctgtagaatgtccttactttcactaggaggcagattactraaatagtattgtggtaccagctgcataaatctgtttatttaagacaaaaagatgagattatgagtggggaaggtggtgagagacaccaaacattatgtctgggcacttcccatccctggagaatctacctgtagaaccggtatttaatttgaactcagatagtatctcagtccgactttgtaaaataaatactttctgttttttatgcagccaatcctgttgcatttctagaataagttggcctctctagtgttatgccacacagtggaagtgctgtctaccactaacctttagtggaaactagtatttcccctaaggcccatcaccatataagaggcaccaatcgtatgcttaagagagctttgggtaggggagagagggggtatctttgcttcttattttaactagtaccactccacatccagctgcgtaagccagacatctatgagtcactcttggttgctgccttgaacactacttgctggaatagtagtggaaccttcaaaatggatccagactctgtactggcctctcaaagactagtggagtagtctcactcttgccattgcccctcctttccattcatgtagcagccacagttatttttccttttttctttttagacagcgtcttggtctgtctcccaggctggtgtgcggtggtgtgacagtacctcactgcagccttgacctcctgggctcaagcgatcctctgtcgcagaatctcaagtagctgggactataggcgcatgccaccacacccggctaatttttttattttgtagagacggggtcttgctatgttgccagggctggtcttgaactcttgggctcaagccatcttcctcctgccttggcctcccaaggtgcctggccagctacagtgatccttaaaactatatcgagaagatgctactcttgcttaaaatgctccaattgctgtgtactgcacttagataaaatataaactatgtggcccataaagccttacaccttctggtgcctgcctctctcttcagccttccctccttcctcttccccgacagctccaactgcagtggctcttgaaagatggctaagctcattcctctcaaggtcaatgcacctgtatacagtgcatttctctagcattctgtccttcttaaagacacatggtctttgtttttatttctacactgtcttttctatgctgtaatctaacaggcagggacatttcttaggtatcatccacagaggcctgcccttagtaggtactgtcaacgtaaattaagattgcatcagtataaactttagaactaagaataaaagccaaatttgtcatttactcctacaggtatgaattaaaaaaaaaatacaaccctttcttctccattaaacttacagttcaggagagatttctgaggtaatcctgatgtagttgttctcagaaatgctgaatttatggaagaggacccactctggcatcttcttggtgattgagtaaccagacaggggatgcagctgagcaacctgcttatgtgtcagcattaagtagttacctgatccatcaacatcccgagcaatctgaaaggcagaattttaaagaaaaaagattttgtattaatatggagatcattatacaaagatgtttgttgaaaaaaataccaaagtattttatacgggatagttaaaactaacgtttgccactcatgtttcctactttcacatgtagaaaataagccataagcatgttttgcctaaaactttgagacagtgatgttaactaacttcagcaacagcagggcactgctaaaacagtgcagctgtgaggttaatgttttggccatgagatgaaacttagcacgctacccaccatactatgggcgacatacactccaatgccaagtgctttacacttggtgtgtagcacgcaatgaccctgtgatgtaggaaccttactttacagatgaggaaatccataatgatatgtcatttttctccattaagactacatattctgccttggccctttattcccttgaggggaaggatacttaagtaccaaatctttaataataacatggatttttagttttacttaatgtcaaaatcatcatcctaagccattgttggcagcatatcctgagtatgtgcaattcagcagagcctatgctgaggtgaccccaccccttctcacctgcataaagtaaccggacagaagagctttctttatgtttagagtgttttccttggagccaaaagcaggttctgcatagggaagctcgattcgcttgataatttctaagagttcagctcgaataacatctgccattctgagtgctgaacagttgaggaagtaatcacgacaccacttttccacacagtctaggagggaaagaacacaaggctatttagaaatgatttgtcagaagctctgaagagcccaggccaggcagttgccatctttaagccctgtgctctcctctcctacaaaggaggccacgtaggtgagtggcaggaaggcagcaaggacaaggatttctggtggctgcaaggtcagctgtcagggcactaccaggaagggagacggtgccaccgacagcacccatgccacctgctggggttctgtgatcccagccaactgtggaaactgttcctagtggtgactgaagatgtatttcactaacccgtggctcataaaggccagagaggattttgtaagatctatgttgtgtctctatgcatacagcatgtatgtatgtggtcccatttaatcaaactaggcaggaaaaagcccacagtataaattcctctgatctatgaaaatatctcatattttatttaatgataagaacaggattactaccaggttgatttgggaattaattatgttayagttaagctcatctatctaccctagctgtaacttttatcttaaaattcaggcatgtgggtgagtttgaagttagtctttctggccacctgtaattacttaagatggacctgggaatgtacatggccatggcaccatggacagaagaccctcatttaccctgtcctgtccactcatgctgctcggagcaaccacagcatgtacttagtgtcacccattcagcatgccctcaaaaggtgccaccagattcctgtgtacctgctggctccactgacaactttttcttctcagctttgaaacactaactccctgttctttatacaattctgtctttcaaattgctgtcatatttttcacactacttcacatattttcacaccatctttcagaacaaaggaggtaaaagatgcttcatggaaaatgtcagggagggaccttactggctgccctttatgggtggctctagcctctgctatgctgctttgccctgtttgccccctcctcttgtttctgtctgcatagcagcttccagttgacttctgagtaccttcctgtgacaggtaagctacccactgcccttcaggcatacaaaggactttgtggctttgctttgacatgcgccattctcttctctggacaccctctgctctcctctatcaagctccgtcagcaactctgcagcctccsctcagcaccccagcctacctattctgcactagtatctggagctctgcagcctctctgcatgcacgtggtgaatgtgccaggatacggaaggtgcacagcacaactctgacagtgggcacgtagaggtggctgttcttgtcttcctccaaagacccatgtacgagtctgtgtcccccgtcaccrtgccccaagcaagcttgctctgaaggctggctgagtggagtcctggagctctggaagtacaggcccgccatggtggcacaccagagctccgtgggagcagggggactgagcatctcccactctgcagatgcctgtgggtgcgtttagggcctcaagtgccattgmattcaagtggccagtagggctggcgaagaatgtttgatgaataactaataaggactcagacttatctagggaaaggaaggtggaattaataggtagtttctgagcattcacttacactcactgctagaattcagagtkgtgtcttggtaagccttgtaaatgctgatgagggtaaagtgatctccttcgggatgtaaaaatgtcttccaacaagtcaaggcagcctcttcagctccatgtggcacatgtgaaaagcaatttggagcttcaaaatgaaaaaggtcacatggttagcaataatgaagacattttatcttagcctaacatgcagaggggaggggtcacgactgttagtggcatggctcctgtcttggtactctgaataaatatgttattcttgtttacttagaaatcccagaaatttagagtgagtcatcctaattctccctctccttttgtgtgtgtgtgtttgcttttctaaggtcaactgaatatggttaatatcctgcttctattccggcaggagcagggaaaacctgaggtgcttggaggtccagacacaagaagaggattggaaccagttccgatacagcacaatggttggtctgttcccccagtattagaataaattaaaacatacaagccaggatgaatgaagccaataggaaataaaaaacaggcacacaacattatttggggaaaaacacctctagtgacacattttcttcatctgcactgattatttcagcaaaagaaatctagtatgttttcatacatctgatgtataaatttgctgaactttgagttagttttcttaagataatttttcatattaagaaaattttccttttctaacctattaaaatacctcactatcatttcaaaaggttaaatgagttgatcactatctctgctctgtgctcctcaaaatataatttcaaatggatccgatctaaatctatacctagtgcagatttgcaaaaaaagaaaaggaatagtcattaaggatacctgttaccatggcygcgattgttagcacttcatctacacagtcaaattcacaggacgctaagatagacttcgagagttgtggatcaagaggaaactctgacatgatgattccaaattcagaaagatttccatcattatccagtgctgccagataatctaagtcttccaatgcctgcatcaaactttctggtgctaggaaaggaaaaaaataataatttaagagtctcatatggctaagatggagaaacaggtactggacttttccctcctgcatgaaacaagcaaacaatggacaaaatatgtgaaacaacggtttgcaagccaccaaataccagggagtgaaggatagtgattcttgagagggcaaactcaggaggggagccctgtgattgtccagctcatgctccgaggagggtcccagctgcagtgtgcatgcggggggaacccaggtggagcctgccagcctccctgcagtaggaaaacaatgccagggatccagggagactaaggtggccggaactcgcggtcacagtactggagagagacacacagatctaagtcgggggccagagggagctccctcaactaggcagcacagccctactgatcagcgcatgtgtgtaaggaaccacctcaggccagagaaagagccatgtgagaagattagaaggaacagtggtgctgacacaggacctagggtagggcctgttcccaccaccctagctggaaaacctcatgatttatggggcactgggtagaaaacacaagtgagaaaccctagatgggcactgccacctgacacagctatacagcaggacctgaaaggatcacactgcatcctaggacaaagctcaaaagtacctctgggactacaaaaatattcagtgcccaagaaggtaaaatgtacaatgtctagcatccagtagagaggcatgaaaagcaggaaaatacattgcataatacagagaaaaattaatcacaactgacctggatctcagatgctagaaatagtagacaaagatgttatttcccagtgcaaataaagaaataaagatagcaagctgattctctccatctctttatttcttttaagtttatgtaacatcgataatgatgtggtattatatatgctcagtctttaccaaagtttttaaaaatccatttatttaaagaaatatattctctttgtggaataaggctatatatagattggtgcaaaagtaattgcggtttttgccattactttcaatggcaaaaaccacaattatttttgcaccaacctaatatttattaaataaatacatgtgttttgtccacccttctggttcctggtatagcaatacaggtcacacaatgaagcaaatcccataatagaaagctgctgtattgttataccccaaaactgcaggatttatgagccactaggttggttttgttttagttccagtaagtgcaaggtgggcaggggctgaagactctggggccctaagaagcgcttgaacctgtctgctcctgggagttcaaagtaacatatggtaaaaattttcttatgtgctgtctaaactttgatcattaagctctatgtctaaatttcaggcaaactgagtagctcaaaaacctcactttggkaggccgaggcgggaggatcaccaggtcaggagattgagaccatcctggctaacacggtgaaaccccgtctcaactaaaaaaatacaaaaaattagccgggcgtggtggcaggcgcctgtggtcccagctactcgggaggttgaggcaggagaatggcgtgaacccaggaagtggagcttgcagtgagccgagatggcaccactgcactccagcctgggcgacagagcgagactccgtctcaaaaaaaaaaaaacctactcacaaacttcgatttgataaaattcctccattcctgtcaggacaactggaaggcattagaagccactactgtaggctgggaaatgactcagggaagctgcgatgcagcctaccacacctccagtcctgctggaggacagcggagccagcaccagatataacttcagcctgacgcgcccaccacaggcaaaagatctgctactaggagtgagggggcagtgccaaaccacccaagggaaatctgcagggaacccagacatccgctggagtactgaagcaaggctttcatccttaccttggggcaaatatgttgaatttccctattctgaatgttttcccatcaagatttaaaactgagcagaagcttatggcttctcagagatattcctgtcctgcctgggtcctgacatacagcattaccgtcttacttgttcattcttggggacctttggactaaccatgaccttgagaaatcacaatcatgggaaataaacagatgggctattcagaaaaaaagttcaagagttctatcagtgaggcatgacatgaaaagtaacagccgatctgctggagaaggtacaagaagcagcatcagaaataagcatcttaaacagagcaggaaggggctggagtacaaacttaactactgaaagcttttcagaaaccagtttctataaatcagcaaagctgctgcattataagttacaggatctttggcaatggtccctttaagcatctggcttgacagccaggctctgtccccaaagggcacctactattcatttttacaccctggagttgagttggccgcacacagggttagtaacataaatgacttcatgattctgctcctggtcctacaacagaaaaggagaggatgttcttggggttttattatattagaaagaatgagttaatgaatgcagattacacaggtgaagaacattaataaataactaaataggatttgctaatattatattctgcattttatctccccagtgtggcccataaacttgcttagctaaaaagcagaagagtttatatgggggttctttagggcagtgctgcttaagtataatccatagtaagtaacgctaacaaatggaatggaagtgttttagtgtcaggcctctttgttctggcagtgcaaaatcagactgctttattctgaaggcaattttgagatgaaccaaacatcatctttattaagctcgcttgccagcggcagctgtactccctgtggaatagctcactgcaaggtcacactcctcctccactaccatcactcaaagtaatgtgaagggctatcattacagtatttcttcactgttctgtgtgcctgttttctgtggaaccccaaatgccaagctccaatatgtgcctgcattttccttccttggcatcagtagaaaacctagttacaaagaggtcattaaactgcaaccagcagaggaggagccgatgcagcgctaactccaagctgagcacaggccaagtggagtccaaggccacggcagttccagagctgacagccccacgcggcatgtttcccatgttcttatagtgttcttatagatgtcagatggtaggaagcctcggttggctcccaaaccctcacaggaagtctgtctactcaggtgctcaggaggcttcctccagccaggtctcttttgttataacaatctttggcctactttctgcctaatctggcaaaaatggctcagaaacactgaatttcctctcaaggtagctgacattatgcaaatgtatgccaacatatttatatgtactttcctacaggtaaaagttttagtctgcaattattcctgggaatatgcataggagagagaacatcatgccttctcttgtctaaagtggacatgtattttcacgaggatagggcagggggtctcctggtaaccagtccccaaagccagggccattccctctccttccaccacactccttaaccccctttcttcccaataagagcagagaagtaaggctggatttgagtcattagagttggaaaggatgttagagatagagtggcctccatggtaaactgaagaaaagcattttcaactccctgcccactggcgggagccaagatccttctgtccagccttgccctgggcagggctctcgggtaatggcagtatccccactgccctcccagtgccacccgcaccgtgaggcaggcggaggccagctcctccgagcttagctgtgcctgaagacctctcacacgccagctctgctcctgcccgtgacatggaaggaaacacacgcagacctttgacagccacaggcacctcctgatcctctcgactctccctgcatgtcacatcactcccaccgcccaggcctcagaaaggactaagtggggaaggaagctgaatttgtctcccacacgtgactgcctttgctcatgttctggggaagactatcggccttctagagggcacctgtctagtcagtattcctcaagcgtaagggcattgggaaagttctgccacttcacaaattaccaacggtctccactcccagtaactgttcttacagccaggaagctggccccaggtttttgtagtggtgactagctgaagactctccccaccctcataccattatagagaactatctttaaacaagagttggcactgtagttagatagtatggaactggcagccccagaacaacctagaaaaatcaggaaaaaaaatgcatgggttttaaaatgaccatacagtgggtgttttctatatgagtagttaaaggactttatgtttggtgttggttcatgatttcctcataagggtgaggctcaaattattatttgctctcagtctgttttgagtatcttgtgctattggcactggcaaggctctggggcaggcacacatytgggacagcctcactcttggcccttctagcatggatggtctcatttatatatggagatgcacacgtaaatcaagaatcctgctctactggaaatgcacttttacctccaaattgtccccttttataggaactgtaccttcacttccatacttataggacaggattttgtgccacgtgacaacaccacattatcactactaaccccagtcacaggggactggttcagggtgggcagcttctcaaatagaatcaatggctccctttcttgggcgttttcgactttagaccaagggagtttccaggagctgacatagtaaatcataaagcttagggcagagagcagctaagactctgcccagttcctaacgggtcattaactagtacccatcgcggcctgggggttggagacccctgcattaatgtatatacacatttatatcaatggacagagagaaatgcagttatcacttaggagggctgaaggagcaaatgaagtttctgtttctgatttattttagggttgggacttgggcattgtgtaaaagagtccacagggggagactctacacatttgcataatgccagctaactactcatatagaaaacacccattgtatggtcattttaaaacccatgcatttttcttcctgatttttctaggttgttctgggactgccagttccataccatggaagggagggagggaggggaacctakagatacagggatgagaaactaaaaaacttgttttggatttcttaagatacctcagttcccttatcataattcactttttccttatgctagtttgagctggattactagtgcttgcattcagaagaatttaatatatccactgcaacataatgcattctataacagagtgcwtccagagtgccactggaacttccaaatggtagggacgtagcatagggaagaacaaaaagagctatactcacatagtacctactgtgtgccaggtacatgcattaatgcagaggtccccaaactttttggcaccagggaccgacttcatggaagacaatttttccacagaccagagggtggagaggatggttgtgagatgattcaagctcgttacatgtgcactttatttttattattattacattgtaatatataatgaaataattatacractcatcatagtgtagaatcagtgggagccctgagcttgttttcctgtaactagacggtcccatctgggggtgatgggagacagtgacagatcatcaggcattagattctcataaggagcgggcagcctagatccctggcatgtgcagttcataatagggttcgagctcctacgagaatccagtgctgccactgatctgacaggaggtggagctcaggcagtaatgctcgcttgccccccactcacctcctgctgtccggcccagttcctaacaggccacgaactggtacccatyactgcctaggggttggggacccctgcattaatgtatatacacatttacataaatggacagagaaaaatgcagttatcacttaggagggctgaaggagcaaatgaagcttctgtttctgatttattttagggttgggacttgggcattgtgtaaaagagtccacagggggagaaactgaagaatgaagagatggtgtagaccctaagactctacaatgtctagggcctctggggaatagcattaagagttggctctgaagaggacagggaggaaaggcttctgcttcacttaatttcacagggacatgttcccaaaacctggcatttgcctaactcctactcctttacactgtacatggcaattttgcataaacatctcatttgtacctctaaataaccccaggatacaagagggcagacactctaccctaattttacagatgagaaaaagacaagtggcttgccaaagccacatggccacccagctgttttgtcatatgtaaagtgaggttttgaacttgggccttccaccggcagtgttgaacctggcacctggcatgctctgccagcacagctgatgctggactcccaagtccagtgctgttgctgttatctgccatggctcttcctggctccggcccatctcagaggcaatctggtgatgtctcctaataactgagggtcattatctgcttctcacacccattaaaactgctctttctaggaccctctgcagctcagggcccctgtggtgcagagctcaggtaggagtcactcagacgatgactgtgctatagcatttactatacaccagtcacttttctaaggggcatgcatatgttaactaatttatcttaataactctatgaaccaattgctttgattatcctcatattcagataaatgaagtgaagcaatgagagtcctaatttactgaataataccccactagcaaatgatggggccaggcttggagccctggcagcctggcccaagagcctgtgccttttggcatagtcccctcaatatggggaccatctaccccagtttacccagggcagtatctgtttccacctttcatcccagcttaatcattaatagcattcatgcccctgtcccatgaagttcacagggacatggtcagtttgtmtgaattcatcgcaaaataaacaggttccattaagttaaattgctgttttgttttgttttgttagcagggaggggtcactcctgytgagccacagccatctttccgcctgcactgttgcacgcaaaaacatatcaacttaaatgataagccatatagttcccaggcccacaagagcctaaagggcttcaggagccaaaagtacttccattctgggccctttaaaacctctcctggattttgttttcactttctgtaacattatttactttattgtttccaagatcctcacacactggccctggaaagttgttttggcatgtttgcgtctctttttcacaccccctcatctgagtatagtagtaacttttgtgtagcctttaaacagataatagtgtaaccttcattaacttaaaaacctaggctgtggcctcctgacagtcatgctagaatatttgctcgactctctgggctgtttgggcagtgccagtcctgccggtaggtgtcaggcactgcggcagagctatggggagggccacatgtgagggccgttggcagcctgcttcctcccattctcctcttagtacatgtaaatgttatatatagtatagtaaatgttacgttaacatttaaagatcattttgtaaattccaaagccaaatcttgagtttccaagtgatttacaaacaagcgcatatacttctctagtattcttacaaactgggcttttagtgtggtaaatactattccagaaggtcttgatgaattggtttaggaatcctctggtgaaagatctgcaccatcacaacagatgacaccactgtagaatcttttgtttctcttttgaaccagggtcttgctctgtcaccctgtctgaagtacagtagcacgatcatagctcactgcaaccttgaaccctggactcaagtgatcctcctgactcagcttcccaaacagctagtactacaggcgtatgccaccacacctggctcattaaaaaaaaaaaaaaaaaaaatttgtagagatggggtcttgttatattgcccaggctggtcttgaattcctggccctcaagcagttctcccacctcagcctcccaaggtgccaggattacaggtgtgagccaccatgcccagccctgcagaatctttaattcctcttttcaccagagccatccctggcctctgcagcctttgactttcttttctttctttcttttttttttttttttttttgagacagagttttgctcttgttgcccaggytgcagtgcaatggcgcaatcttggttcaccgcaacctccacctcctgagttcaagtgattctcctgcctcagcctcccaagtagctgggattacaggcatgcactaccatgcccggctaattttgtttttagtagagacgagatttcaccacgttggtcaggctggtcttgaactcctgacctgaggtgatccacccacctcggcctcccaaaatgctgggaytagaggcgtgagccactgtgcccagcaactttattttcttcctgcattttcccctgttttcatgaggcgttgccttatctaacgtgccatgcctgtttgtgtttgggttcacttttcttttcataatccaaagaatcatagatcataccaaagccagtcatctggctactaccaaaatgagttctgcctctgaatacaaagatgacctctggtgtagtctggtaccttttggctagtttttctccaaatttctatctaggtaccactgccttcccagggtagcggcagtctcaggccatctgtttccactgaagtggtcagctggtcctgaggcctcctaccccaatggacagtgactgtgtcattcaggatggaggtcaattgtcaggcagccaaggaagaaaaatacaactgattttttaaaaagaggtccagatcaggggaattcaattaacagcctgtagcctagttatgccaaattcattttcacatggttcatgcatcctgaaaagggtaactagtttgctggatttgcatatttcaattataagttgaattaaatgcagcagctgcgagcatctttttctttttttgcttccaaaacaatgagtcagaattaatccacagttatattttccccaagcacagcagaaaagttatgtgtgtattgtcaggagacaaaaataaattgttaccctaacccttttgtcccccagttatcagctttaagcctcatggaatgagcagcacagagggtgactattgagagaacacagtgagatagtttgcttttaaaaatccttgacatcaccaagccttccttttcttctccctgcatttctagtccaccaaacatctactaccctgagcaagaagatgcctaggaaatcaacaggtggtgattcctgggcttatgagatgaacagtgggactggaagagcaattttcaaaaatgaaacctatcttgttggggctcaggacacaccaccccaaaatatgactggaggagactagaatatgccaccccaaaatatacttctctggcatattttgagctggttattctgagaaactgcagacataggactagctctgaaaagctgtcactttgtaaaagaaatctacatctacaaaggaaatctacattaataagtgtggtggcttgcacctgtggtcccagctatttgggaagctgtggtgggaggatcacttgagcctgtgaggtggaggttgcagtgagctatgatcacgccactgtactccagtttgagcaacagagcaagaccctgtctcaaaaaaaaaaaaaaaaaaaagaaaagaaaaaaggacaattcaagctgctgagaattcttctttctgctgattcacccttacgcttccatactccacattacccagctccttaagcccagttcccctgtgctgcagtgtccaacagcagacacatttctcgtgtcagaacagttatttcctagaggtttgtggggttttaaaaattaccttcagagaatgtttacctctagcaggaaaatgcttcagtccaaaccaacgccccctccatgcttgtgtgcattgctgcgcatcatgtgaactcaggacagagaatgggcaggagaaggtgaatctcagcctaatgcctggctgacatgggagcataaggctacctggtctgttcatgaagtcacagtggcctaggcccgcaatgtctatcctcttcataaaaagcaccatgcttgttaggttggcttcctgcatttctgctggcttcagtggcgtcatgtctttggaggcaaattcttcagtgtacaggcagaaaaattttcctaaaagacaccaagaaaaatggctttaatatttctgggttgcctgcatacaagaattgacaacatttagtatttgtgtccacagcactacctgaagaagatgagccaagaatctgcttgcgtatctctgcctggctctggctgatgggctgcatgacgagcgagtttgctcttattctcgggttgtacacctttaaatggaaagacagcatcattagcgtcagataagtcatgattcagtaggctcactgatcctgaagagaatatgctgcgcagtactttactccatgaaatgcactgccacagactcattttctttgcacgatatttattattgtttcacttgccttgagatggaaactgcaagtgctttgataaatggatttaaaggttgtctgctttcattgtggcttcaataactatgagacctttgtgtcatctgctgaaatactagcactgtcacttctcaaagcactgtactggtgaatgataacatatgctcatatgtcacacagagaaagggttctcacctgatagtgccatgtttctttatagttttgttcaaatcaaccaggatcttggyggtctcacctttacaacacatactgagagttccaatcataacagctaatacagaaactgcgtatggcactaacaatgattttccttacaggtggttcacgggggcaagtgacagccctggtttctctgaaggctggactaattcaatcaagatcaactctaagtgatttccagggaaccttcatgactgttggaattgctctgtcataataagtcagggatatttaggaggctcatagtctcctggagggataaaacatctcggcacctagtaatggtaaattagtcaatatttgttagtttcgtttgagatctcaaatgttaggattttctgaagtctcagtgtctttcagagtttgagataccttgttttcattttttctaatttttaatttaaaagtaataaagaatattttgtaatgattaggatgaaaattttatcgtcaattataagccaaaatttgctaaaattaaagtcagtatacttgaaacaagtttctagtaagttctctggggtaagatactaattactctgataaaggggctatcaaaaaaatccagtaaattgttcataagaagagatcagtttaagagtcaaacaatttgctttgctagtaccttagctaaagaaaaaatactattaaagatgactatcacctttatgctctagtagttgagtcttccctcaaaactttctcctttggcagctcaatcaatttaattcatttccaaacctccaacatgctaatggaatcaagacttttgttactggctgcaataattcttctttgcactcatgaccaaattcaacgaatccccaggtcacatagttcatcctcacttcctgatcagtaaaatggtaggaaactgagaaactagtgcttgacaacgatcagcagtctgtttagcctactcaataataattacctttcttctttccacacccacatcgataacaaatctgactgagttgctccagatcaaaaactctccagagctagtagttaacaccactcttctttgataaacttggcatcttttttctgtttcatcgagtggcttgaacaatgaacatttctcttttggatacaaaggaacaaccaccagttctccaagatctgggtttaggttagatccttgatagacagtttcacagactttctcaatatcctaaagaaaaaaaaacccatgaaaataaaatacaatgcaaacaacatcactattaaaaaaatgtctgaattacaaaaaattttaggcaatactacgtaacagatacagggaaagaaatccctgtgttgctgcctacatgtatctttaaataagtaaagatgcacctaaatgagaaaacgtctttggggaagttaaatataatttatattgttttcccatttaattttgttagatttcactaaaaatctaagtaaaaaagatgacttcccacaactgccatagtttttacagctcaattccattctctaggtctctagcttatgtctctttcctttccataccatttgtagaatgggattgaattaactcaagggttttgtaggaagacagatccatctagaaaaatagcaaggtatcacaggtcactgagaactaggtgagctgtgctcgtttcctggtctgctaagtggctcccaggaagctgggcagaggccgctccagggggtcccacatcagctggtacacaggtacggtcccttgcttgcacttcctttttccacatataattgaattacttggggcagattttttaccaagcaaacagcatggctgttgatcctaatgagtgaaaacttgccaattggaataatgagaacaaaacgttttctccattcttataattctgattacttcattttactccacatattaaggaaggattgtttagaaattaaaaggaaggccaggagtggtggctcacgcctgtaatcccagcactttgggaggctgaggcgggcggatcatgaagtcaagagattgggaccatcctggccaacatggtgaaaccctgtctactaaaaatacaaaaattagctgggcatgatggcatgcgtctgtagtcccagctactcacaaggctgaggcaggagaatcacttgaacccgggagacagaggttgcagcgagccgagatcgtgccactgcactccagcctggcaacagagtgagactccgtctcaaaaaaaaaaaaaaaagaaattaaaaggaaaagaatgagtacttgagctgagctgcatcccctgaacctggctgctgcttggccttaggaggacacgcattcattcctcccagatgagtccatcaagcaagcttctcactggtgcaacttaacagctaacctggatttggaaaggggtatttgattccagcagcccattcatgagcaatttcctatcaagataaactgttttttttttttttttttgagatggagtctcgctctgttgcccaggctggagtgcagtggcccgatctcagctcactgcaagctctgcctctcaggttcatgccattctcctgcctcagcctcccgagtagctgggactacaggtgcccaccaccatggccggctaattttttttgtatttttagtagagacggggcttcaccgtgttagccaggatggtctcgatctcctgacctcatgatctgcctgccttggcctcccaaagtgctgggattacaggcgtaagccaccgcacctggcccaagataaactttttattgcactgaaatatttacttttattctcctagaagatgtgggaaaaataattatggccactaattctttatttggttctagctgctaaaactttttagtcataggtgaattcttcggtctaatgctctctcactgagctattttggctgtcttgtaagttggttctaatgttgaattttgttccaaatggcaataaaaaagaatttttaaaatcttcagaagggaaaaagcagagcaaaacagaaatagataaatagtttaggctcctcaagcacagctgatacagggctttaaggccataatctgcagaatttggggcagaaaagctttaaaaaatgtgcatctggtacttcagacattttgtttattcatttccttgattcttattcaatgtatgtggtttatttacatacgcataactttcctataactacctgcacagttacggaaaacagcaacacccactgaaggacgatatctagcagacatctagctcaccaaaaatgaaagaagatccacaactgcataaaacatttcccaggaaaacctccaacctaaaaacacctttgtgatagtttattactgtacagtaatctggctacatattatcgtaaatctcaatgtatgttttctgcttatttcatattttgtcttccggttaaaagacagctaggtgataggaaacaacacgctaaacattcagggctctaagtctcaattaagtgccaagacacagggcagcctgtgaatcacagagattaattcacagcaggtgtggtgctaggcaagtggctggagaaaatgtgacacacctaaggcaaatgcactgccgtttcaccaaaatgtttgagaatatttctgtaatttaaaacatacttcttaatataaaaaatggcagggctgggtgcagtggctcatgcctataatcccagcactttgggaggccaagacaggagaactgcttgaggccaggagttcaagaccagcctgggcaacatagttagaccccgtctctaccaaaaaaaaaacaaaaaacaaaaactagctgggcatactggtgcacacctgtaatcccagctactttgaaggctgaagaggtagatggcttgagcccaggagttcgaggtcacactgagccaagatcacaccactgcactccagcctaggcaacatagtgaggtcctgtctctaagtaaataaatacaaattttaaatgacaattaatacatttgtattagactggttgagtttgttttcacatgatatttaagtgctacggtaggttttaaagctttatatagaaatcaagaaagcatcaaatagcatggggggaaatgatcaatagctgttagcactgatttcggtgcaagacaaatctttccaagacacaaatcccaatccataagagatgagaatcttaatgagggatcctgacaaaaatagtaaaaaagaaaagtccatcagtatactgaatggtgttctgcttgttaggcagtagatggggtaaggaaaaccagataacacctgtggaatccaaggctgaagcaggagaaagaaacctggtgcccaggtaaagtctgctgaagccagcccaatgtcagtggctggcttgctgccccacccacagggcaggtcggctgttgagcccctgaacaatgaggagctcacctttagagggtccagtgctccgcctgggtcacagaggctcagaattacaaaatcctctggtagctttcatggcactctcactttaagactgcaagactgatggtttcttaataggaatgcctttccagcctgccttcaggggaaattacatacctctccaagtcctgtggcatttacagtttctactaccagcctggataatgatgcatgttctaaagttgacagttcaaaagtcactctacaattaattatagtttatattaaacttataagaatcatgtactctaagaccatctgcacctcagttctgttatgagctttattttccaagatccaaaatccatttccaaatccatttaggaatttttgcttaccctgacttgaaggattacacccatcctatcagtcttaattgcatttttttcttgcagaaatgtatatcctggttttttttttttaatttttcattttttttttttttctagagacagggtcttgctctgtcacccaggctggagtgcagtggtgcaatcatagctcactgcagcctcaaactccttagttcaagcaatcctcccacctcagcttcctgagtaggtgggactacaggcctgagccaccatgcctggctaattttttaatttttttgttgagatagggtcctgctatgttgtcaaggctggtctcaacctcctggcctcacgtgatcctcccgcctcagcctcccaaagtgctgtcattacaggtgtgagccacagtgcccggcctacgtcctgtttttcacctggcaattctgactctcaaatatattagatttgccattcttcccttccttaggcttcatctgtttacactgagaacctccaactgttttcataaatcctatgtctccgtaatcattttattattttcctcaggactttcttgaatatcttgaatcatgcaggatgagatgataacagaataaatcactgtaataggcagatttgctattcaagagaatgtatatcatatacatacaaaaaatgataaatatgcagtcatattgaggttctagaaacagatacatttaagaaaactaaagttcccaaagccagaaggagctgtcatcctttatgctttgagtataaaatagaataaatacttctgaaagtgtttctgaaatatgtggatgttcaagaaaaggctctgacagacagctgagccacttatctgttcagctgtggctcagcctacatcaaataatttcctttttggtttctgtttaatgagtagaaccactacatatatgggtcatggtctaaaaactcatgcttctcctctctgtgggagaagacagggaaaaaaggccaggcaattagtctccatgaagagaggtctaattctggagatcctggaggcttttagattcagccaacagagtagtggggaaagaaatagggccagtgtagctgcaatttaaaaaaaaaatgcaaccccaaatggtaccttggctgtctaaaagcagtaacagaatggaaatgatgcttgattgcacatttccagtcattcttttaaagagatgttttaaagaaatctgagttaaaggtttttttttttgtttgtttgtttgtttgttttttttttttttaatcttttaagaatggagccccagtccagggagatgaccttttcgggtgggctatattttctgcccatactccactgactatcacaggactgcttgtgggaaatgttgtgttacttaactctatggtgagtgcttaggtaatagtcctgatctccaacaaacacacctgctcacagggaggcagtggagaatgtcaggggagtcggcatgcacctactgtaccaagagacaattcacagcaagcataaatagagccagctgtgcctttggggcagccactctctggcctgagcctgctggagggaagttggctctggagatcatgtctagagactcctcacccatattttgttttcagaactgcatgtgattttagaaacacttcctgttctcctttcagcacaggttttatttaatgaggtgtgatgaaaccaaatatttaaacagttaattagcaaactgaaacctgtatgttagttattaaaagcttcccaaatgaaataccttattactgtaaggttagagtatcacttacttacttgttcacaggccagaaagactacaatgtcacctttctcacccgagtggtgaatttcaaagataaggcgtaaaatagactcaaaagaatccttttg

SEQ ID NO: 96027 - DNA, 72323 bp, Homo sapiens
ctgtgaacagcagtgctatccattccatgaatgtttagggtttactccgtgttaggcactagggacgggatggcaaacagggcagacaggtcccctgacctcttccaccaccctacagtcgagtgaagaaagtagaattttttatttaattattattatactttaagttttagggtacatgtgcacaatgtgcaggttagttacatatgtatacatgtgccatgctggtgtgctgcacccattaactcatcatttagcattaggtatatctcctaacgctatccctccctcctccccccacctcacattgctcttgtctcccacgatggagtacagtggtgctatctcggctcactgcaacctccacctcccaggttcaagcaattctcctgcctcagccacgtgagtagctaggattacaggcgtgcaacaccacacctggctaattttgtatttttagtagagacggggtttcgccagttggccagactggtctcaaactcctgacctcaggtgatccgcccgccttggcctcccaaaatgctgggattacaggcgtgagccaccacgtccagctagattttaaatattaacaaaataattacaagttctgattattactattaagagaaaagcgcagagatagaataacatcagagagggggcaccaccactttaggaagccagggaagggttgcaggaggtgaaatttaggcaaagattgaaggacattaggagtcagacctgccatagcaggagggaatagcatccctggcagagaggaaagcttgttcagagccacagtcctgaaagaagcttgtttgagggactacaagaagaccaatgtgcttgaagcataatacatctaagatcagatgtgtgatgagtttgaagaggcagctagatcaacgtaaggactttggagggcttttggcaggagagtgacatgatctgatttgatgtatattttgaaaggtcactccagcttccaggtagcagtggaagaagacatgcaaaaatcacaatcataacttacacggcatggtagcttggagtacggaggaagaggaagcacatttggggtatattttggaagtggaataaacagacctgctggtggatggagaagggtggggtgagggttgataatgaggagccaaggatgactcattttcaggttggagtaactgggaaggcttggaagactagtggagaaacaggtttggagagagaagtctcagtcccttagtcattcacctcagtttcttagtcactgaaataccttagatctcttatctaccatttctttaaaaacatgcgtgagcccagtaggcagtcctggctactcgggaggccaatggggaaggatcccttgaacccaggagtttgaggcatacctgggccacacagcaagaccctgtctctctaaaaacaacaactacaaaaaaaaaaggggggcagaaaaaggctgggcacagtggcacacgcctataatcccagcactttgggaggccgaggcgggtggatcacatgagatcaggagttcgagaccagcctgaccaacatggtgaaaccctgtctctataaaaatacaaaattagccaggcatgatggcgtgcacctgtaatcccagctacttgggaggctgagacaggagaatcgctggaacctgggaggcggaggttgcagtgagccaagctagtgccaccacactgcagcctgggtaacagagtgagactccgtctcaaaaaacaaaaaacaaacaacaaacaaacaaacaaaaaaaaacagaaagaaacgtgtagcagaaaactgctgcctgctggatttttaaaatacatatatatagcaagagcttacagaacaggtagcaccaagtgggagccggggggcttctcttgatgctgcatttgataaatatacagtttttactcagattatatgtttgcttagatttgggctaaagatccccaaagccaccccttggtattaaaactcattaagaaattaaggaagagatagtactattgaactattttccaaaaaaagaaaaaaaaaaaaggacaaaaacccaaaacaaatgggaagtgatgtacgttttccatgttattttatacatgagctatctttccaacactgaagttggtttagcaagaaaataattaaagacktcaatgtgcaagccaagagccaaaaccactctcaacagcccaaggttgtgaacgtatttaatttgccctttccctgggaagtcatttcttggatcattgacttactattattctgtaaaacagtggtagcccctgccttcctctgcttgctgccaagagtatgatccagcwgtggggtctgaagagtytatgtttattggattttaatgacttagttaacaaaggtcattcctaaaagtaatagaaaactaaggstgtggaaacagaacggaaaagactgactcgagggttatttctagtagttccttggtgttgtccttagatacatgtttaatccttaaaagcaattatgaaggagtcttcctcataaccaatttactgatgctatattcaactacacttgtaaaatgttattttagacctctcagtaacaaaaggaacagggtttaaaatatgttagataatatcggcataaacaatgtactgttaacataatattgctgacagtataaytgtaattcactgtaatacttgatgccacgtctgtagtgcttccattatggctgacagtaggaaataacttccgtctcaggtgaaatctggttggatacaaatctccaagttaaaagaaacctcaaagatcatttaatcttgtccttttaaatatttagtaactgtgaatggtagtaaatatttatccaaattatgtttcttagactgtaaaagaatttccaggctgggtgtgctggctcacgcctgtaatcttagcactttgggaggacgaggcaggaggatcacttgaggccaggcgttcgagaacaaattgggcaacaaaatcagactttagctctattcaaagtaaataaaattaaaaagaaaattaggggccgggcacggtggctcacgcctgtaatcccagcactttgggaggccagggcgggaggatcacctgaagttaggagttcaagaccagccggaccaacatggagaaaccccatctctactaaaaatacaaaattagccaggcatggtggcgcatgcctgtaatcccagctacttgggaggctgaggcaggagaattacttgaacccgggaggcggaggttgcagtaagccaagatcacatcattgcactccagcttgggcaacaacagcgaaactctgtctctaaataaataaataaattagcggggtatggtggcacacacctgtagtcacatctagccaggaggctcaggtgagaggattgcttgagtccaagagttcgagggtgtactgagctatgatcgcaccactatactccagcctgggtgacagagcaagaccctgtctcaaaaaaaaaaaaaaacaacaaaacttgagctaaatggtgattgaattatttaaaattaaattgatgaaataatttaagaatatgtggaaagaaagaaatttacagtcattcctcaggtataaattaaatattttccacctcaaaatccaatgacatgagatataaatgtatagttcacataagtaatacatttctcacatggttacagaacctttctgatcaggctccggttgaattttccagccttatctcatttctcctccctccttccaaccctgttttttcctcctcctctccttagctacagctttactaatcttcctaccgtgagcctcaaacccacgctgctctcaggtctcagggcctatgtacaagtaattcccactgcctggaatcccttgccctcattctttgctgggtcattctgcagacccagtactacttcctcttgggagcctttgtccatctcctcttcccccaatctccgaaccccaccaagacctcaggagttcttgagcaagcctctgcttagttttcctgggatgaccaaaactaacactgtccgatccgttgttcaatcctcaatccctagaacagagctgcaacataacaggcactataaatgaatgaatggataaagacagcactgaagaacttgaaattatagtttacacatgaaaacagtaacataaatctgaagaaataaagttcttttttttgttttttcgagatggagtctcgctctgtcaccaggctggagtgcagcggtgcaatctggcctcactgcaacctccgcctcccgggttcaagcgattcccctgcctcggcctcagcgtcccaaatagctaggactccaggcacgcgccaccacacctggcttttttttttttttttttttttttttttttttttttgtattttagtagagatgggtttcactatgctggccaagatggtctcaatctcctgacctcgtgatccgcctgcctcagcctcccaaagtgctgggattacaggcgtgagccaccgggccaggccaagttgctgtttttaaaaggtatatttcaactcacttctctaaggcgggaatatacacagcctgccatcagtttgacataaaacaaaaattttagcgttcttgtatgctaaatttcttttactaggttaaaaaaatgtagaatccaaagagctgtaaatgcaaatgacaaatactgtacaaaatctatcaagcaactataagtcacaacttgcaagctttctcctcagcaaatgagttaaaaggaaaagtatttgaaactttcttggtggaaaacgaatgacctttaaaaatgccaacattttccccagagaatagatttggtctgagttcttcatttctgaaattgtacaagataagacgacttggtttgagagtcaaactgcatccttctataaaggttttagataaattttaagtctccatacaaaacactccccttattttgagaacaaaaggaacaataagacagcttaggcggggcagagaaagaaaggccttgaaacaaagtccctggaaaggtaaaaacaacaacaaaaatagtaagttagagctcgtgtttagatctgataactcaaaactgcacaacttttgccatacatcgaaagcaacatgggaaaacagaaaaagagattacaaacattttttgagtgtcctaacttgtagaacccctaagaatgaatcaaatacacttggacaaagctcttcttttctctctctctccttcaagtcgcagactaggggtgtggggcggggggcggggagtaagacggggtctctaataaatacaagacccagcctcggacgtgtttaattgctgacattttagaagaaaaatgggctacttacaattaatgaaccaaactaccaaactaaaatcatgagtaggaggaggagtaaatggaaccgtccgggcgaagtttcaggaagacgcacgctggggtcgctgcgcccttccccacccatacctcggggctctccagtcgctcccagcccccagcgcggactctagggcgccggcggcccaaccatacagacttggcaggatgtagcccccttctcccctctccaggagagaaaagcgcgaggagacgcaaaccgtatttccgtgtccgagcgttgaaacctgcggagtcgcgcgcggggcgcccacactcgttcccggggagcccyagcccggtcgcccgccccggtcccagctccagcccgggcctcccttactctggggctccatggtcggctgctccccggcctccgcgggcgaacccccggactcctaacgcctctcagccagggccggcgtcgctacggttgccctgacaacccggaggcgaagtgggcagaactaaagggacggcgagcgggagggaccaaaagccgcaggaagtgagggagcgcgtgaggayccgcgcgtcgccggggacactgagcgagggtagcggccaggtcaccggctgaggacactgctcctgaagcccggtcaggcggtcgcgccctccctggcggcccccgcggcccsgcaggacctgtgccccgacgtcgccgacccgcggtccccgctgtcgccgacccgcggcgtccgtcgggcgagtgggcctgcccgcgggtaaggcgccggccctgggccgccctcccgggaatcgggagccgccgctgcaggtaacagcggggccccggcggcggaaggggtcgggggtcggcgcaggggcgggcgcgccccgagccgggtgggcggccccggcgcacctgttgtagccgcctgggggtcccctgcccgcagttggccgtggacgttccccgccccgactccgaaacgccgagggcggcctccgcgcctcctgctccgggagccgcgcctcagcgggaggacggagccctgcgggcagccctcgcaccaggggctccctccgagcccgggcatgggccgggcctggggcggtccctcgagcccccctgacgggaagcgtggagcaatgcgagccgccgccgtcgtcgctgtcgtccccagtgagcctggcgcgtctcctgaatcgcgagagccaggagcacggttttgcccggctttgccccgtcatccccgtgtcccatttcaggcagggggcccgggttggatctttctcgctggcttcgttttttgtgtgttgatttgtttcagtccttcgcgtttccggttgagttacggaatctgcccacacgttttgtggccaaactttgtagggctgtgaaacaatgtaacattatcccacacaatagtctttcatactggttttaaaacacagtgattcagggtttgctttaaggaagctttgaggatcacaagagattattatctggtaggttgtaaaaattcaaacaaccrgsagagtrtcataggttcyggaacaccrgraggaggaaagaaaaatggagasgagagaaaaaggataagcaagaaagtgcaggggcattaagggtgtggggggctgcaggattgatttggtaytcaggtctggagattatggcccctctattaattccaaccgctgctccagacagtacttgagggaaatggaaggaagagccrttttgggggtcatgsaagtgattactaatcttgccagtakaaagatttccactccatggatgacaaggacaytaaggagaattactttcctcttagggaatcattgagaggttaattgaacttgagaagcatatattctgtgatggaaactgacatwtattatattcttccaaattagstyttccycctctyagactatatggggactttttcagattaattgtcaaaacaagaaggtttaygtgtggatattgacaagcagcgtgatatatacagaacacataattcttaagctgaagtattaaggtaataawttaagggtggaaagtaaacacttcatggaaccttaactccctgttcctgaaatttrgagacaggggcttcatttttagacagaaagtataaagatcagcagtactcctgtatccagtggttctcaagttctagtttacatatcattagcaaaatcacaaagcggtcttttcattcaagatacaaatagagtgatcagtatatcataatcaaaagtgrcaagatagtgatttaaaaaacacctggcatttattgacaaaagaaaaggtaggattaagtctgctcaaacagtaaaggattagcattagtatttttttaaaaagaagaaacaacagtgcaggtctctatgctaaagtaataaggactgaagaagttttaagtttggaaaaaatggggatatgtattggtgaaacactttgtaatcatatagaatgattattttatcagcagctgttaagttgactttgaggaaattttgaattgaaatactttaggtgacaagtaaaggcaactgtkaaaagcaacatttgattttagsggacagggtacctgtgaaagaagactggttaggagtggaagycaggygtaaarrcactgaaatgtccgaggcagggacaatattcagtttctcttcctctatcaccttgtgcaatgtacctgttaaatgtttgttgaaygartgasaaggrcttyagagaaattgttttggatatagggatacacwttactattggagaaaacacccgagatcagaaagttgctaatgagataggkgtgggggatgaatggtaaagacactctacctttttggagttttctaccattgtgttttatttcttttcacgggcawgttcagtatgttattagtggtcaaatgaaaaggaataaagttctatatatatttttttaagtctccaagctcaktactagatagaatagttacattattgtttactttgctgatgtttaactaaatgtagcaaactgaagcattatggatcgggaataacaaagyaayaatgaagagacagatgtagtctttttcttatttaaatctcttgactayctcagaattcaaagtagaaataactttagtgggaggttaacattatttaatgcaaataggttgatayaaaatgtagcaaatgaacatgttattaatagttctgtcttctagccttactgtggtaagttgaaggaagttttcatttttgtttttgttggttttagggtttttgttgatttttgttttctttaccagagtgagggtacttttttctctatctgatactttctgaaactcttagggagttctgtcaaaggtggaaaacaatcaatttctatttttggtgttttcctctttgttctccaaacttgtcatggtctacattcaatttgttgcactcaaatggaatgtctatctctccgccctttactcgtccacagtctaaaggacactggccgggcgcggtggctcacgcctgtaatcccagcactttgggaggccaaggcaggcggatcacgaggtcaggagatcgagaccatgctgggtaacacggtgaaatcccgtctctactaaaaatacaaaaaattagccgggcatggtggcgggcgcccgtagtcccagctactcgggaggctgagccaggagaatggcgtgaacccgggaggcggagcttgcagtgagccgagattgggccactgtactccaacctgggtgacagagcaagactccgtctcaaaaaaaataaaataaaagttaaataaataaataaataaatgggactgcaggagcatgctgccccagtttctggaaagtctttcaggattaggctaatgcccactaaatgcacttcgctctcctactgggggtgctacacggtttagcatttagctctgtaggatgctttcctatagaattttatctcatatggatggatcttgtacctctgactggattaaatatgtttggagctaagtgcatgacttacgcttcttctgtgttgcttttagcacatggtggtcttcattgtgtacctgataatttaagtagggtaataatagagaggtcaaacctttagttaggggtcattgcattaatttctagctttgcccttttggaaaaccagaagctattattttgtcattgataacttgggataataaaacctgcaatggttgtctgatagtctagttgtgagaatcaagataaatgtgattatagattatgaatgaaaatatcttgtatgtcgtaatgaacttttttaatataaagggctgttattgacttaggcatagagcagacattgattccacattcacaatgtgttaggtacttcctgggctctggaattgcatgtcataaagggtaaacaggaaatgaccaggtgcttccgaagcagaacagcctgggctgaggcacgaaggccgggagaacaactaagccgtggtttattgtggctgaactggagaatacttcttcatgtgtattagcagaaaatgggaggaagtaagcccagaaaggcaaatgtgggccaaatcagaaggaacctaaggaccatgagtttattttccttaaaggtaataaggaggatttgggtcagtgactggatcagttttgcatttggaaaggatcactggcaacactcaaatgacagattggtagagagcctaaatgagagacaaaaaaattggagatgttgctgaagctcagtgaagaaatgaagagaaccaggagagcgatggtgggaataagaaggaggggccactaaaaaaggtagaattggcagatcttggtgatataggagatgaggaaggagaagccagggatgacagtggggtgatagactggattgttctgttattcattgaactctaaagaagaaaaaaattttttgaggagtttaagaagtggggtagatgtgttcagtttgagatgcctgtcatatacgttgggaggtcccayaagtagtagtagttggacatgtgggtctggaacgaaaggaaaaagtctgagatgaagatagaatttggattaagcatttagtgattgaagttaaaatgtgatkattttctccaggratattatgtggaataagagggtaagggatagagccctgaagtatgcacattttaccttgtggggaggggctgattgtggaagaacccgtggagactaaagaccagtggtcagaaaagggagctgaaaatctgggaggattaatggaagagtacctactcctgaggagttcatgcattggcattccccaaaatgattatattttyctctagccaccgtagaacgcacaacacagttcatctattattgttttattaaagttcatgtaaaatgactacccattactttgttaacaacagaaatcttgatatttatgtttaaaaatattttttaaaacatttttaaacarattttttagatatagagtcttgytatgttgcctasgctggtctggaactcctgggctcctccmgcctcagccttccaaagtgctgggattccaggcatgagccactgtgcctgtggctatttatgggttttttgtctacatttgggacaacaaatcaagtaaaatgtaactttagaagttgattatgattatgcctcaagcaaatacttaaaaaaaaaaagagagagagagatggataaaagttcattttgtgtatgtctcaggtaaagtatgttaacttggggagaccagcagtaacctgttctttaaatctcagcttttattgaatctcacacaaaatttttctcagatgtgtcactagactacttaaataagccagattagtatttttgcatactttattaactctgcwtctactcagagtaaattagttttyggaatggaatgcagtcaaaaaatcatcaaaataatatcacaaagcactgagtggtccagtcatttgaacttctgacaatacctttgacttagaaacttatttgtrgggagtggtatattaatactatacataaacattgattgagctcgggggggactttctgtatatacattaaaaaatatgtttttttaatagagacggggtctctattaagtgacctctattttttaagtgagacggggtctcactgtgttgcccaggctagtctcaaactcctgggctcaaattatcctccccacttggcctcccaaaaggatgggattacaggcatgagccactgccccaagcctaaaatttttttaagtaccgttagaatgtaaggattctttttaaaaaatttgattgtgcagggttggttattcaaccaatatgcaatacaatattcaatactgtatattcatcacttctcggccttttggctaagatcaactgtagtatctgttgttattaatataatattgtatattcaaccaattgtcaatacaaggctggttgtatctgatatgaaccaacattgagttaaaaatggaccttttttatttttaaaaagctaattaactagatttgcttacttaaaatcaaagcaatcaactcgttacaagtctagaaataaggattttaaaatagattttgaattttgaccttatcttttyccagaaagactttaaattgatactggaaaccaaataggatatatttttgggagatttsaggctattaaaacaaaggcaaacaaagaagtgaccttctaaaagtcctagtaatgattaggtccattgtttcaattaaagcataccrtgcttgagagataaagtgtattaaatatttgactgtaactttgtrttagaaatatgtttttcaaatctataaaaaagatttacaaatctatctataccatgtttttcagttttatggtatttcttccagacctctcttcctgacatckccattagtgtcaagtatttcttcaacccccagtgatgcaacgtgagyctatttttwaaaatgtagtctggaagcaatatrtaayatagtcaggaagcagtatggatatatggttaagyatatacactatacactkaactggggttaagcagagatcatactscctgacttkaagcacctghyctaccacagatgatcttctagaagcygtataaattaaacctctgaaggtttacwtttccycatttgaaaaatggaaataawaaagtaaaccctcatgrrgtccttaagagtttaaatgaaataatccatataaagtgcttaagtgctgaacwtagcatctggtgtgcaataatcaytctataaatgctaattggtaaaattatcatcattgttattgttagtccaactatastagtagtatggaaccaggcttctcaaaagtgtggcctgcagatcagggycagtgcagacttactgrtttgcagtgagatcyggagcttgtgccagaatgtaaataggcgatgtcactaaacatactgattactgttcagctgactttttaaaaatagcaagacctcttcagtgtargaagcagttagttgatttacattctggtgcaarctctttaccttgccacaaaccagcaccagagttgacgtggagtgttggaccagtgatcccgctctccaaaaataatagtcctttattctgaagacgttattattcactcataatacctcattaactttctttttttctaaacatagtaaaaatagagtgtaagtatattgtttatgagttcagcagatatttaytgatcacatagtttgtgcacagmcctgtatcttattttgcaggagttgcaaagcgggctsagaaattaatcttggctttaggaagtytaccataaacccgcaaaaggaaataagtgaaaatctaaataaatgtgttgaayatatrcagtgaktgtttgcaatagtgttataagttggttccaaagatttcaatatagacggatgtttccttttgctgagctgctaccacaatgggacagaattaattatttttttggaaacggagtcttaytctgatgcccaggttggagtgcagtggcgcacttcagctcactgcaacctccgcctcccagattcaagyaattctcccacctcaacctcctgagtagytgagattacaggcatccgccaccatgcccagctaatttttgtatttttagtagagacggggtttcactatgttggccaggcagatcttgaactcctgacctcaagtgatccacccgccttggcctcccaaagttctggggttacaggcatgaatcaccacgcctggccaggacagaattaataccttttactttttcagcattatgctatcacaataaagttcagagtttgctttattaagatagtgtttgaatattctaggagattcagaaacctgcagtactagggaaatctgagttttagatataataacaaaattataaattttaaagatttgtattgtagaagattatccttaagtgttttttaaattactaatttactatttcacccttcatgcaaatatatgaattataaatgattgattgttccatagaatatgaagagacattaaataaatcttaaaatatttataaagttttggttaaaatgagcacaatttcttctcaaaaaaattcactgccagcctgggcaacatagggagacactgtctctacaaaaataaaaaaataaaaattagccaggcatggtggtgtgttcctatagtcccactactcgagagactgaggcaggatgatcaattgagcccagaagttggaggctgcagtgagctatgatcatgccactgcactccagcctgggcgacggagtaagaccctgtctttaaaaaaaaaaaaaaaaaatgcattgctcaaacagataatgttgaaacaaattctggggtaatataaacataataatttttaaaaggcaaggcgtgtatattttacatataaatatgtatattatatagtacagggtttacaaactatgagtcagatcatgagacagatttatttttgcagactaatttactgttgagtgggyttagggaaaaaaggaaaataatgcaaaatgttcaagtcaagaagtgttatttcatttttaatatttcttagaatgttttacatggaagtggatatattggtttctcttattgccatgcttggtgcacctgctcataatcacgtttgttgtgccttttgccataaactgttacctaatctcactaatgactttaagaaaattgaaggtgggtgttagaaagattataggtaatattaaagaatataaggcaggcatggtggtgtgcacctctactyctagctactcggaaagctaargcaggaggatcacttgagcccaggagttgaatacagcctgggcaacatagactctgtccctatttctaaaatttaaaaaaaaacacacacacaaacacatacaatgtaaaataaagaaaagactgtaacctgaaatttaagaggagaattttaaggaaaaaaagagtaaaaaatgaaatttggatcaagaaatgactaggtaagttagacccatggcactgtaatcacaacttttttaccatagcagatcaggtattttgcgatctggcccctatctcatctttgaactcatcttgtaccaaagtctttctctgcaattaggtaccagccacacttgccttcttttaagtaattgtctgtaaggttgagtctacatatcatagacaaagaatttctatttccacaccccaccctcagcctcacctaaccagacctgcctgttcaaactgtgtccctaccatgttcacattgcagacacatattaggcactcaagtattggttgaacaggtaaatggaaaacccaaaaatggaggcattgaggatgagaaaacttgaagacacagaagacctattagattatgaatgatatcgatggtaaaatacaatcagatgttgcccttagaagcatatgatccctaaaggatagaaaatgactcattcactatttactcagcccgtaattattaattagtcacycactrtatttggatttaggagtggaaattaccagtgaagaaggtrtagctccaataacagtgtaagtaaagagacagaaagacatggggaaaagataatcactagtacaaacggttcaagagtcccctcatacttgatgttgcctcctcagcatgtgcartttacaagcggtcccacaaagatcagtgatctgctagagcaagcgtgatacatgccattgtctgaatctcagtgcagctttgtacttttcaacatrataactcttctgaattgatcaagaagaaagcagctttaataaatgttgaaaggagttaatttggggtttggatgtatgattcaagggacgaccaggagcctctacaaatattccagtttgtgggtttgtgagtcttaaagaattctaagaatagcaagagtctatcatatatcataaacagaagggaacaaaaaagtcacataaatccagaaacatagtgaattcctgatagaagtgtttaaactctatgcagcagtagtaaactaccttgaacttagctaagagtgaaataatgaaggaygtaactatgcaagatagactgcagtggagacactaagccctgcttcatagagctcacattccagtgaagggcaccaacagaaaacaaagagggaaaatgtatacattatgttaggtggtggtcttaaggagaaaaaatgaagcagttaaagaggttaggaagtggtttttgggagtgtgggagagcggtaaaagtttagatagggtggccagggaagcatttactgaactgccatttggtaacgacctttatgcagcaaggaagctagccatttggatatctgagggaggaacatttcagacatacagaagggtgaacaccaagttccagaggcaggcatctgccatggtgtttgaggaatagcaggggagccgtctggctagggaagactgaagtaggagctgttgcaaatgagggcagagaggcgatgggtccagatcatacagtgattgttggtcctcttaaggattttggtttttcctcagagtgagatgagatgggaagtattggagactattgagcagaggagacatgagctgactttaataggatgactctgactgcaggcttgagacctgactgtaaggggctaagggtagaggaaggccggttaggaggctattgcagtaatccaggtgagaggggtagtggctcagaccaagtgttcacagtagaggttatggggcacttgatattttttgaagacagaactgacatgattgaatatattagttttctattgcttctataagaaattaccataaattgagtggtaatttattgtcttaacagcttcgtagatcagaagtcggttgtcggtctcactggactacaatcaaggtgccagcaggactgtgttcgtttctggaaattctagaagatgatctgtttccttgcctcttctagctcctagaggtcactcacatcattcttcggccgtggccccttcctccaccttcaaagcccacaacattgcatctctccgaccttcttccatagtcatattttcctctgactgtggcyaggagggtcctctgattgttaagactcatgtaattagattgggctcaccaggatcgtccaggataatcttccaatctcaaggttattaatttaatcacatctgtagagtcccttttgccatgcaaagtacatattcataggttccagggattcctacatgcacatctttggaggccattctacataccacatcagtcgaaggaccagatgtgggatttaagatagagaaaaatcaagggtaacttcaaatactttgatctgagcaatgggaaggaaggaattaactgaaattggggggaccagatttgtggctttggggtacatgttgggagctcagttgcaggcgtgtaaagtctgagtttcctattaaatatccaagtgggagatgatgcataggtagttgaatacatgacactgaagtttagatcgatggatcctaaggacagatacacccatacatccaagtatggatggcactaaagccatgagatgagatgagaccacttaggccctattaaagagagaaaggggaagagaggtccaggaactaagcattgggaacttccagatatctaccaagtgctaaaattatgtatttgggtatttgatacatgaaaagtaagcagtaatattggcttgaatacagaaaaaaaaaacacacaaaagaggagcactgaatggtgaaacataagttactcaggacaaattaatgcttttgcttcacttaatgccttacaaactttgtctttccatttctgtgaactgtatttctagaattactggaccagagccaaacacataaatgactaagacatagcttcatcttacattgacttctaattctaccttgttaaggttgtctgttaattagatatgtattattttcatggatgcatgtttaagagctgtaatagattgatttcaaatagctgtccttgacaaagtgtgccatctacaatatacatgtatgatagctttgaaagagcaaatgtcaatctttcagatttaaatttcttatagtggaatgtagtttatacttacaacagaacagttatgaaactttattttgaatgacatctaacctaccatattatttgtttctctttctttagactggtactgttaaatttgccaaaggccaagacatagatctttggtacatatttaattacctctaggaaaaaacatttacatggcttacaccagttgcaagatgaataaggagaggtatatgaatgttattggagtcaatgggcccaactcctctagttaggtctcagccactccaccctccaaatttggaatccaaaccatatagcagcaaaaggtccttctgagtagtcgaaatagatgttccagagtctataaatgtcatagttttgcgcctcagactcattggattcaatggtagcatcctttgtggactcaagctttacaaatgtgtctgtcaaacaagcttgtctggcttctaatgcaccggttaggagagcaggttagaaaggcagagaagagcctcacaaggtaagaggccacaccacacagtggcatgggttctgagtccccagggaagagcagggctccaggagagcagtctggtctttggcttctgtagatttcggagacatctgaggacatcattctgttttggcaactgatgtaatggtgaccttgagtcacaatgaaaaagttaaattgtgagtatagtttatttaagaaggcagaagtctggttatctgtttctgcaagtcaaaccaccctgcaacttagtagcttacaaaaacagtgaccatttgttgtctcatgatactttgggttgtatgggctcctgtggatgctgcttctgctcagttggctggggttgcagtcatctggaggctcgactgggctggggcatcttaggcagcttgttcacatggttgaaggtttatgctgctgtggactggaagttcagctttggtctcttcccggtggcttgggcgtgggtacctcatagaatgacagctggttctaaagaggagtgtttcaagcatgggaatatcttggaagtgattcagtatcacttaactgcattattttagtcatagtgacactggtcacagggccagctcagattcaaggggagaggaaatagactctacctctccatttggaacagtggcaaataatctgtggccatctttaattccactataacagagaagtggttaaggctaatgtgtgtggatacattgcacaatgtgtgatgaaggggccaggtaagtctcaggtctttagaaagaagactattcagaaaacttgattatttcctcagggttcaaagtggtcagtgctttataagtaagaatttactgtaattataagattattacactcttagggagtattataaataagagaaacatttctttttggtaaaaataatagctgttctttttttaaggtaaaacagttaagaaatactacctaaggcaatcattggttataatatttaatagcaatttaatttacatgtaggctgagaacccttggaagggattctaatcagaacaaaagaaaaatagaatataaaattaaattttaacttctctkaagagtggaattttctgattcttggataccttcccagaattagcttgtgcgatgatctcaagctaccatgcttcctggagctattctgtgggtctactctcaccttatagaggcagtgaagagttctgaagtgaatccatattacaacatttctattatgcctttrtaattccattttaattttgaaacactggcttttagatgaatttttaagaactttacttgggaagagctatgaagttcttctgcctctctggttacttacctctaaactagcttgttcatctgtgaattttaaaactttctatcctgctcttgctgccatcttcaaaatatcctttatgtgtgtatctagtgcctagtttactcatctaataagcccttagaagacactcagcaaatgttttttgagtgattgactgttgccctggagcctgtcttgaccaatagagagagagcttttcttatcacttactaattaggaactagctgttgagcacactggctccaaccatctaaagcaataattaaggtaaaccaggtgatccgaaaagtgcagtaacttacaaaatatcatgaactgtattttattattctttttaacttgagttttctttttcatttttatctggttaatgtgaaaaggagcttatttccagcaacactaatggaatttttctttttaatcactagtaattggaaggggaaagacccttcacctgacatgtggggactgagttattggtataaatcttgctctttcttgggtgatttctcttcttcatttaaattaaaagttgtccttaatggcctcttggagctgacatgttgggctcaagacccaggaatctcaagaaatatgctagagatttctggtttaattaaacaaaagaccttattaataaaagccagccagctgggcatggtggctcacatttgaaatcccagcactttgggaggccaaggaggacagaccacttgagcccaggagttcgaaactagcctgggcaacaaggcaaaactccgtctctacaaaaaaatacagaaattagctggacatagtggtgtacacctgtagtcccagctactcaggaggctgaggcagggggaaaacagcctgggaggttgaggctgcagtgagccatgatcacgccactgcatccagcctgggtgacagagcgagaccctgtcttttttatatatatataaaataaaagccaaccataactacatatggaaggaaataataaattcattcccctcacttggctttctaaactgacataagcaaaaggaaaatgaaaagttttaaaaatgtttttcattaaagtaaaggatttcttaataatagattttcctgtagcctgtgttagaggaacactcaccaggtcatcacagttctttccttttatagggtccagctcctcttttgacatgggattaggtgaccacgtgattgattagcctcacaatcacaatcctgtccctcctgttgctttccattcacagttgatcaagacgcagagcctgagatagaggtcaggcagagagcacgaggcycagtgcagaatcattttctgaaccagccaggaaataccggaacccaccaaactttaaacaccagcctaaattattcctgttcttttaagcaggcagcagaaatgacagaaacccgttaacagaaaaaaaaaaaataatgcttttcatttgaactcctgtgcattttctttttaacttatatgtgttcctaattttccttactctttttgtttgtttgtttcttagtgtggtttattgacaatcatttacaatgccgaagagtgctgtagtgagccagcacagtgggtaacacagcaacggagaacagatgcaggtttgaggaatttaacttgctaaaaccttgaactgaagtcttagagattggaacatacgggtttgtataaataggcttttaagccctgtttgcaatgggttactgataggagaaacttgcttgtggaatgtcagctgcgtgagctcactgtcagacaagatggaagaagaagggctggagtgtccaaactcttcctctgaaaaacgctattttcctgaatccctggattccagcgatggggatgaggaagaggttttggcctgtgaggatttggaacttaacccctttgatggattgccatattcatcacgttattataaacttctgaaagaaagagaagatcttcctatatggaaagaaaaatactcctttatggagaacctgcttcaaaatcaaatcgtgattgtttcaggagatgctaaatgtggtaagagcgctcaggtgagtaaccactacaaaaaataatttgctgtatgtgttgattttttaattgttatttaatgacatgtcacagcctagtgttctaataatagtgtctaaaacaaaaaacaaaacattattcagataaaataattaaatcacgtacctaattttattaattttactaatactagctgaaaagttaataatatctatgtagaaattaattgtgtttagggtaccactgaattgtctatagagcagtattaaaattactcaaatgatcctagtattaaatttactcaaatgatccattgtgtatatgatattttaaaagatgtgatgcgtgttatttcctcagcatgggtatggggattaactgctctgtttcagtgcccagtggtctgagaatccagatatgtggatgtgcttgctggtgaagctggctgagctactgaaatcaaaagcacaaggaaattctgattttcctgactataagaaataactgagcaactaaatatgatccaggcctggggccacacactttggggtctaagatgggggaaagaattaggatcattaagagataaacctagggatattaaaatattaaagagttggagcaggcacagtggctcacatctggaatcccagcactttgggagaccaaggtggacagatcatttgagcccaggagttcaagaccagcctgggcaacatggcaaaatgccgtctctacaaagaagtagccgggcatggtgctgcatgcctgtcgtcccagctacttgggaggctgaggtgagagaatcacctgaacctgggaagttgaggctgcagtgagctgtgatgatgcccctgcattccagcctgggcgatgtgagtgagagaccttgtctcagaaaaaaaacaaaaaaaacaaggagtttgtttgagcaaagaatgactcatgaattacgcagcactcagaaccattggaggttagtgagccccattctagcagcaagggcagtgagcttttataggctgaacatgaaagtaagacaaaagacatttaaattggttagagtggaaagttccgagttagggaatagttggcagtttctgattgataaagtctagtatggttttactgtttacattggactttagtttgcttatgtgggaccttctagagctctgtcattgcctcagcctaatggcctctcaattaaagtttgtttgtttgtttaacgggatagtgggccaggtgcagtggttcacacctataatcccatcactttgggaggctgaggcaggaggattgcttgagtccagcagtttgagaccaggctgggcaacatggcaagatcccaactttataaaaaattaaaaaattagctgggcatggtggtgcgtgcctgtggtcccagctacccaagaggctgaggcagaaggatcacttgagcccatgaggtcaaggctgcagtgagccatgttcatgccactgtacttcagcctgggcaacagagcaagaccccrtctcaaaaaaaaaaaaaaaaaaaaaaaaaacaagaaaaggctgggcgctgtggctcatgcctgtaatctcagcactttgggaggccgagacgggcagatcatgaagtcaggagttcgagaccagcctgtccaatatggtgaaaccctgactctactaaaaaatacaaaaattagctgggcatggtgatgcacacctgtagtcccagctccttgggaggctgaggcaggagaatcacttgaacccaggaggtggaggttgcagtgagctgagattgtgtcactgcactccagcctgggtgacagagtaagactccatctcaaaaaaaaaaagaaaacaaaacaaaacaaaaaaaaacaccaagaaaaacaaggtagtgtagagaaggaaaaagtaataattttctctgtccttcataactcttatctgaggctccctgtaacaaaagacaaattaacagaagaaaaacagaagtgtattaatatgtatgcctcatgtatacacgggaaaaccccagagaaatgagcaagtctctagagtagatctcaaagaaagcatttaaattttgggcttaaataccatcattctctgaaacaaagtaaaaaaggttgtggggaacaaccctgttaagatgagatggccaggaaaagcaccttaaatgaaggtgaagtttgttatgaagatgtaagtcgatgtcttctttacttagtcatctcctcctgttgcagagagggagatgcccttataagcagagatttcttgtataggcacaaatttatctttaaaaaggtaacttttcagagctactcctatgtctacactttctcaaaatgtgcaaaggaggcatattttggggtcacatattctggtctccttcagtcatattctggggaggtatgtcctgagccccaacattagatagttaataaatacttattattcagtttgttgttgtatttggacttcaagtttttgttcaagtgagatccatattttactcttaagttttaaagcaagcaaccagtatttttatcatgaaattcatttctagattctcgcgatgtaagaattagaatagaccatatagtgtgaataataagaagtcccatttctcatagagaagttacgaatagatctagtagaatagactatgctctaatagaatagaattagaaactgatggaaccccttcatttttcagatgaataaactgtggcccagaaggatttgataatttgtctatctaatgtcagtagctttctgaattggagttaaaagaatattttctactataaattgttgctttcaagttgtttattatctctagagtttacctattttattatcactattattttttgagacagagaggctcgttctgtcacccaggctggaatgcagtggggcagtcttggcttactatgacctccgtctcccggttcaagcaattcttgtgcctcagcctcttgagtagctgggattacaggcatgcaccatcatgcttggcttatttttgtatttttagtagagtcagggtttcacaattttggccaggctggtctcgaactcctgggctcaagcgatcctcccaccttcacctcccaaagtgctgggattacaaacatgagccactgtacctgccctaaagttaacttactttaaaggtaatttgaaaagaggagggctggacaacagatgttttttatctgatttacagctgccagtatcaaaggtttattatgatttgttctttgttacgctgttattgttataacaaacgatttcagttcattacgagaagctaacgatgagaactgactgagtataattttcctagtttctgtggacaaataacattgaaaaaatgtgtttttattttacaataatttcaaacttacaaaaagttgcaaaaatagtacaaagattttccatatgttgttcacccagattccccaaatgtaagattttaccatataaactttatctttccctccctgccccctccatacattcatacacatttttattctgaaccatttaggggtaggttgaggacatgatgccctttgcctccaaatacttaacagagtatttatttactgaaaaacagtgtgtagccgtaacataattatcaaaatctggaatgtaatgttgatatctaattattatctgatttctagacattcacatttaatcagtttcccattgatagcctttataatcactgaaaaaaattgtttttctggtccaaaatccaatctaaaattgcattgtattttattgtcgttttttaatctgacacaactccccagtctctccctgtcctttatgactttgacrtttttgaagagcacaggttatatattctgcagaacctccctcagtttgaacatgtctgatgtttccttagggttaggttccggctctgcatttgtggcaagaagatcacacaagtgctgtgtatccttctcagtgcctcatatcaggaggcacaagatgtcagttttgcccatgctggtgatgttaattctgatcccttggtaaggtggtatctgcctggttctttattgaaaagttaacaatttccctccaatcatttaatagatacatattttgaaagtatgtaaatgtttctcattatacatttgtaaccacccaatgggttcatcttgtttgttgtcaagatagagccaatttatcaagacaagggaattgaaatagagaatgaatttaatacacataaagctggctaaacagcagacaggagttgtactattactccaatcagcctctttgtcaatttggaggctagagtttttcaaggatagtttggtgggcagggggctaaggaatgggtactgctgattggctgaggatgcaatcacagaggtgtggaaaacagtcctcatgtgctgagtccacttctgggtagggacaacagaggagttactggtctatccagttatagggcctccagttgtcagaaatacaaaaacctgaaaagacatctcagaaggccaatcttaggttctataatagtgatgttatttacagggaggttacaaatcttgtgacctctggaataatgactggtaatcatttaactacacctacatcttggcagaattcaggcccctctcatcctcctaacctggtgtcctttcattagttttacaaaggcagtttcattttgctgtcatcatttaaactataaactatctacaaaagttagcttggcccactgcaggaatggctaagggagtttgggggtgaaaggcaagatggagttgtcaggtcagatctccttcacyatcataattttctcactgttacaatttctgcaaaggcagtttcacattcatccactagtgttagcatttttggtgattcttacctttgaattattacattagtagtaaccaaagatgattattctaattctgacatgccttctacacattatttagaatctttctgtaagtctgagctttctctccttcatcatttatttatgtcaatgtggactcataaattcttattttattctatgggttataatgtattactaagcctacttactttgttgttcaaattgcccccaatgtggcttctctgtccttttgacatttccccattattgagcacttctttgctttctggctcagtaagatgttccaggttcatctagtacattccgcatgccggtgtagaaaccattttttttttctccaggagtccttgttccgtttagtggtgaactgtgttttgaaaccaagatctggacactaagtacctattaccattggtttatcattgcaattttttttttgagacagtgtttcattctgtcacccaggctggagtgcagtggcatgatcacggctcactgcaacctcaacatcctgggctcaagtgatcctcccacctcagcctttagagtagctgggactacaagtgtgtgccactacactcaactaatttttgtattttttatagagacggggttttgtcatgttgcccaggttggtctcggactcctgggctcaagcaacctacctgccttggcctcccaaagtgctgggattataggcccacttcacccggcctatcattgcttttaggccatctcagtggacacaacaaggaaataaatgtatgtgagtgcaatatacacacgtctcattctatccatctatttgtggctctgtttctctctgtctttctctatttttatgtatttctattttcttacctctcatattttttatctctctttctatatcttaaaaaccatgagtttgtactgatgcctctgattccagtttagcactacagggtttattctagccttcccagttttcatatccataacttctctatgagaaacagggcttcgtgttattcacactatctttacctgttctcagattgaacaagtaaagatactcaaaagaacaattcatattgtagtttcagaattgctaatccacactgcagtttaaaaaatttttttaatctacttcttgagttttagaatttatcatcttcaagagcaagaattgttatatgttatatgttatattaatacctagcaatggtttctcttgtcatttttaatttctcaattatttcaatgaattaggcttattttctgttaattgggacgacatgtatcttcaaagtgagaaaaatcaaaatggtactcaaataagaaaatggatctatcctaaactaatttagatagtgggagcattggttggtttcttttggaaacaacttggtttttgttgttgttgttttaagagtttgcgagactgttttcttgttcttcagagttttaaacctttcaagaaaaaagtctttcttcagagccaagctttacaaaggtcctaaagatttcacctgtctttggtgcagaaacagaggacaatttcccatatgtttatagaatcttttcttattacattttttgcagacaggttatgaacgatcctaaaagagagagaaaaacatctctagaagtgtatattttgcttatttctccttctctagtttttgtcctgaaatttcccatgaatggatgggtcagtgaggtgaaaaagatatgaaaagatatgaaaaagaattaacttagattctaaaagatgtatgacttagaacatctgtacttctattgactgagtaaacttgttcaccattttctgctggtaggttctacctgtattcactcaaaaccaagatgtatgtgaattgttatccagggatgtgtgatatttgattcagaagggacctcactcctcagtaatggattctgatatattggctcactttgggtgggatagctgccttaggggcatactcaggctaggcattttacaggaatgttgttgaaaccattaagacttgcaaacttaaaaaccatgagcttgtgctgatgaattcaacactgaatgtgttgaattcacctttgggtgaattggtggttctttagattcctttaaacttgtagattctgtttttctggtactgaaattaaagggagtgattgggaccttggcagtagcttcaggattggtggtcctagagacattaagagaagaaagcagaagaggactcaggccctgatggacgtcctgatgatcaaaagtgagggattagaggcctttgggactagtatgtgtctaacagaacagtaatagcattgtgtctcatggaggtcctttttttctcacttcatttattctcatttaactatattaaattatagttaactaactttattatccattagatgaggtgaaacaatcactggcagtagatggaaaggacagaaagttctacaccagtgtagctcatgtggaggtcctcttgccacagtggcagtgatgagaccatacacggatacgtgatgccgctgctgctcccttgattctgatctggatctggttgcagattcttataggagatctccctgcagcccaccctaaagaccccaggccccagctctcccactacccagcagcccaacctctgtgtgctgcccggagtygggaatggagcatctttgcctcactgtctgaatttgtacaagttgtagaactgcagttgctaacttaggttgataaagccttgatttagattagattttgattacccggaggactcctcttacctactctcatagcagcagattggccagagtgttggtgatttcctttcaggtaggcggtaagaggccagggatgcacattctcatgcctcgattgcttaccttgcatgccccagagtcagttccagctgggctttgggacagagcatagggcaggccccactgctctggctttatgcaaatggcacatcagaagtacagaaaactgaatttagaaaatggattgagaaacatgaaaaaagtatttggtgagttcagaataaagagatgtgaagtattgatttctagttagggagcatttccagaccaaatgcgtaaatccaagggttgcacatcaccaaactcccaggataaatcacatgaaaatagctttttttatgtgttagaggagcaattttctgtttcttcaccatattgtgcaacttttgctaagtactcagtcacaaagtgacccagaattcaatgtttctctgaaaaaagttaaagccaaatgattcatagaaaggtacaactatttaagcttttctaattcccatagtgccaacttggcaactagtccatccagaataatgttttttaatactaggggggaatatcttccaaagaggaactatggggtagaaacaaaacctctaacaggcttgtaagtcattggtgagaagacaaagatgcaactgggacaatgaaaaagttgctaagtagtacccagaaaagttaggccaggtgttgtggctcacacctgtaatcccagcactttgggaggccgaggcgggcggatcacctgaggttgggaattggagaccagcctgaccagcatggagaaacctcgtctctactaaaaatacaaaattagccaggtgtgctggtgcgtgcctgtaatcccagctacttgggacgctgaggcaggagaattgcttgaacccgggaggcggaggttgcagtgagccaagatcctgccattgcactccagcctgggcaacaagagtgagactccatctcaaaaaaaaaaaaaaaaagaaaagaagcagaactaggggaagaaaggtcaataccaacaagagatacaatatttactataaatgcagagaaggcaagagttctttgtaaagctgcaatctcagtatcccttgaaatgtgaaatactcaaattatcgacatttgccaaatgataacattttttagccagtaattcaagtttgctaaggaatcaaccctcagtatgttacttagcttgcccagagtgattcagaaggcatgtaaaactggagaactctaacaaataaggcagatggtttcatgtttccctcttttctggctggagataaccttttcagtttgtgtttgcattgcttactgttaactatctccaagtagctgttactggaaggggagctgcatcctatgtggtcagagccacagttgagtacgtgcagtataatttgttgtgacttctgctcaactattaacttgggcacgtaagcaaacattcctacattaagcacgatatggatatgttcagtcttctactggttattgtaactgatatttagatggccttttcccatttctgaattaatgtctttgcctcataggtgaaatagtttgctctaatgtagaggaaggcagaaaaggaaaatgaagactgttggattggtatatttgttgtacttccaggaatgtataatgtttatactattatcaacacactgtaataaactaatcttgcagaatgtgtttcatgagcaaagagaaataaattaaatgcagtttttaaaaaaggcccaaatcagaagcttgagaacatggctcatgatcattggaatcttgtcgaattttagagttcgaaagcagctgtcctggaccttatatgaataaccaggctgaacgtgtccaaatgttttaataaaactggatagtattatttcagcaacgattctagctatgtaaagcagtgcccactgtcatcatagtactgtccccctgatgttgccattaggctagaaagagtagtttatttatttatttttattttttatttttttgagacagagtctcgctctgttgcccaggctggagtgcagtggtgtgatctcagctcactgcaacctgcgcctcccgggttcaagtgattttcctgcctcagcctcccgagtagctgggattacaggcacccaccaccacgcctsgctaatttttgtatttttaatagagatggggtttcgtcacgttggccaggttagcctcaaactcctgacctctcaaataatccacccgccttggcctcccaaagtgctgagattacagatgtgagccaccgcacccagcctagaaagagtaatttaaaatgctgattgcctgagaatttcatggcttcagttgccacctttctataaagatgcttagaagcaactgtgatgtagtggcaattatactcgccaagaaactagaagatatggattggttctggtcatgctgtttactggcagtatgaccttggacaagtcacgcctctaagtttctttcctcatgcatcaaatgagggtgttggccttcatgtcttccagagatttctttcagtactgaaattctgcaactaccatgcctatctctagctctgacctctcccttagcctcctgccttgcttttccgttgatcccaggatggttatgcctggatgttcttctgataacattgaccatcttcctgactatcctgaaggtcatcttcctaccctcctaactcctgattccccccaaaagaactttatgctgctctttagcttcattcatttattttattttactttccaatttcctgttcttgtcaattatataattagtattttaagttagaaatcatagaatatttgtcttcttcctatgcataattagtctgttagtgggcactgcttattcttcctttgcagtaattttcccgtggttttattacctctctcccatgcttagcactaagcccaagcctttctctctcttcttttcaattattatgatgtccttatccatctttccactcaactcttatccctaccatatgtcagatcctctgttcggtattgggaacaaatgcaaaccacacgtgtagcttaaggatcttcccacatagtggagagacagagaatcatattcaaacaagggttttggctgggcacaggggctcacatctgtaatcccaacactttgggaagctgaggcaaaaggatcacttgagcccaggcaattgagaccagcctgggcaacagagcgagaccctgtctctactaaagaaattttttttttttttttgagacagagtctcactctgtcgcccaggctggagtacagtggtgccagctcagctcactgcaacctctgcctgccaggtttaagcgattctcctgcctcagcctcctgagtagctgggactataggcgtacgccaccacacccagctaatttttgtattttcagtagagacagggtttccccatgttgaccaggctggttttgaactcctgacctcaggtgatccacctgccttggcctcccaaattgctaggattacaggcatgagccaccatgcctggcctaaagaaaattttttaaaaacaagtagttttaatatagcttttcacatgaatgatgtttgaggtcttggctagggaccctagatagtggaccctgacatgaaggcaatccatttaaaagtaagaatttggcaagaataaaaaattacttgctaaggaataaaggaggcaaaattttatgtaaattcttaaacgatgtagaatcttaaactatgtagaatcacagaattttaaattatttctagacagtataagaaattattcattcaatgaataattactgagtactaggataatttggtgaccaacacggataggtctctgcttttagagctcatttgaggggccgttaggtagtggggaactaggaacaaacagcaacctcaggaaggtgatggctgccacggtgggaagcacaccgtggatctagatacctaggggatcacagcaagccttgtggagaaaacgacaccagagttcaaacttgaaggataattctcattcattcagtctattcattttacaggtaagaattaactaaagcttagaaaatttgtggtttacatggaacaaattaatggcaagccaatcccttaggtggcttgttattcctggatcttgccttgattccacgtttcctgagcgcagtatcttaaaatttcatctttcatagaacaaagtaagcgttgagtaaataattactgataacttgcaacctgttgacaaggctgacacctatctgaaagtgcaggaagtgcatttgcctttcagtccttaggaatttacagtctacagcagtcattcattttggagttacttgtatttctggtgagttatgtttatttttcaaattacagtgagaattcagatctaagaatttcataatgaatctcataaatagcagacctcaagataattagaaattttacaacgtttaaattccttagatcaattaaaaacactcttggaataatttatttttaaaatgcatgtaacaatgcataatttactgacaatgccttaagattgtagcatacaaatgaattcagtacattctactataataattcttgtacaaatgaatgtgataaacatcagttggtccataatatattttagaaaaaaaaggatttttaaaataaaatggctctagagtagctttgcttagaactgactccaaatccagatgggttggttgattatctcactgggtttatttagatgggtttatttatttaattatatttagattgtaaattaccaggatattttagcttttattatcagagaaatgttaagtaggcttatctggatatttgttatcatcatttggatttaaatataaatgctttaattttgagtcactagtttttatctaaatgctatctataatttacattgcttaaaacacaatagctgataacagaagccatatttttgatgggccttctaatcaaaaagaaaataatctctaaatacattagtcttttcagaaacacagttgaggttgaaagtattttttttttcatttttgtccttgatttttttttttttttttttgagacggagtcttgctctgtcgcccaggctggygtgcagtggcacaatctctgctcactgcaagctccgcctcccgggttcacgccattctcctgcctcagcctcccaagtagctgagactacaggcgcccgccaccacgcctagctaattttttgtattttaagtagagacggggtttcaccatgttagccaggatggtctcgatctcctgacttcgtgatccgcccacctcggcctcccaaagtgctgggattacaggcgtgagccaccacacccggcctgtccttgatttttatctgcctttttttgtctggcagtcaaactttcacagtccctgttaactcctgtttcttcttaactttatttcctagcagtaactctgtgcataatccatattgttcagagtttcactaagtaagatgtaatacagcccactgctgatttactgatgaaagaaaatcacttataagatgaaccctgctgtaagacagagatgtctcttgttttgttttcagcagaagctgatcctgtctcattttttcctgctacaggttcctcagtggtgtgctgaatattgtctttccatccactaccagcacgggggcgtgatatgcacacaggtccacaagcagactgtggtccagctcgccctgcgggtggcggatgaaatggatgttaacattggtcatgaggttggctacgtgatccctttcgagaactgctgtaccaacgaaacaatcctgaggttggtttgtggggttcagtcygctccctgctgatgattcttggcttaggttctacaattctgaaggagcattattctggcattctacctgttaagcatctatgctgtgcagtagcaactggtctctgtcatcagccagccagcaacagttgctttcccacactggcatcatctgggattccttgtctaaatgtatcccatgactcccattatcccctggaaaaagttaacaacttgcttggcccctcagaaccttcaagcgtgtgcttctggagctatgcctcatgcagggtccacatcattgcctgtgtgcaagccacatggacacctggagcacactgtgtgccctgtgctttccacaccctgtgcctgtacacctgcccctccctgtgctcagcatgtccgggcccggctagttcctcctagtcactcagtatgcagtgtagcagccacctactccaggaaggcttccctgcccctccagtaatacacattagaaaaccctctgtggggcttctggaaaacttggtgtcagcctgcatcatagcagcttcgacagtgtttctcaaactgtgctttgcagagtcttctatgttccaaggagacttctctgtggctaccgcaagttgtggtatctcttctgtgcttagcttcattatgagatttcctttgaagaaggatttccaagagcttgaaagaagaaaaaaaaggaaaaagaaactggaaaaatcactgctctgggctagtgcttctcaagcacctttatattacagccatcatagaaagtgatagtatccatacagtaccgcaaggaaatggtcacagctgcctggagccagagttgaccatcccacgggcttcagctgccccgggcactgcccgaccactccaagagccaagtagctaagtatctcggggtcagtatttctgcacctctctaacccatttgtgtggcatacagtgtgccacgcacagcattggggaagctctgcttttctgtaacagggcagggatggtttttcacgtgctcatatccctagtgtctcatgtgctcatccccaggaggatgttcggtaaactggatagtggaagggattttgccctgtcccagctagcactgcactctggtgcggttcttatctccattcagaaaacccatggggctgggcacagtggctaatgcccataatcccagcactttgggagggcgaggcaggaggattgcttgagctctggagtttgagaccagactaggcaacacagtgagatctcatctctacaaaaaatacaaaaattagtgagcgtgatggtgcatgcctatagtcccagctactcaggaggctgaagcggaaagatcacttgagtccaggaaatcgaggctgcagtgagctgtgatcgcgccactgcactcctgcctgggtgacagagtgagaccctgtcccagaaaaaaagaaagcccatggggctcattcggtttgtactaagctactttccctcaaacgtttatcttcaaaagtagaagacagtcttcaggctagtgtcaaatcataggggaaagtctttagaccatcagcactctgacttgaacttcttgaagatatattaccttctgttattataacaattatgtccctgagtcattaaattactatgtatttataaattgctgattgtgtaaattgtacgtgagtggtacaaaagaaacataaaaacctctctggttcttaggagctcacaaactagttaaagagctggacaggacaagacataggaccctgaaagggtgaaggatccctaagcagatttgtggttggttggttggtttgacattttaaagtagccctttgaattatgtttttaattaaatgatggctctgactaggttctgaagttaatattatatctttaataccatctagactttgaaaaccctttaaaaggattctttaatgtagtcatttttaaaatgagatattataagagctttgtcatgatatggaatcagatatttctttttctttcttttttttttttttttttttttttttttttttttttttgagacagagtcccactctgtctcccaggctggagtgaagtggcacgatctcagctcacttcaacctccatcttccgggttcaagcgattatcgtgcctcagcctcctaagtagctgggactacaggcatgcaccatcacacttggctaactttttgtatttttagtagagacggggtttcgccatgttgcctgggctggtctcaaactccttagctgaggcagtttgctggcctcggcctttgaaagtgctggtattacaggcgtgagctaccgcacccagcctaagatacttcttaatatggaaagccacaaagacaaataatggtggggaaatctaataatactgttagacacgcctcaccttttaaacatctatcacatgttaggcttaggattgttttatggtaaaaacccaagcattcaattctgacacccaaaggaaatactatatattaaagtatgtattagtttcaatctgtgtatggcattcctttcttaacagggacagttgcttcaggtgtggtgggctgaggtacaaaggcacccatggagacaggtggagagtagcttcctgctttgacaggttttgcaggttgtttctttctgcccttgctgggctgccttattcttcattgctttcatatcttcacttcacagttactcttgcttctgaacattgtactttcttttccactgtgacatgcccccagaaccagcgcagagtcagaagatactctgatgcattgtggtaaacagtgtttgagtcacaggaaagaggccagagctattgaaaagacccctatgataaaataaagcaacacctgttttcttcctggtattccatgctctggagaggaggcaacatggctgtcaaagggtgtctccaccacttactcacttgtaaccttatagaagtcacctaacctctttgacctttaagttgcctcatctgaaaaatgtggacgattaatatacttgctctgagggttgttgtgaggactattaaatttatgtaactgatgcatggtgtatgtatgtggtagctatgtttataattatatttttataattatgattagaacaagattgattttcctgaagaggtatgctagccataattttgaataagctcagattgaatagctatttaaatcagaggatttaacattgatcattgattggccgggcacggtggctcacgcctgtaatcccagcactttgggaagccaaggcgggcagatcccaaggtcaggagatcgggaccatcctggctaacatggtgaaaccccgtctctactaaaaatacaaaaaaaattagctgggagtggtggcaggtgcctatagtcccagctgctcaggaggctgaggcaggagaatggcgtgaacccaggaggcagagcttgcagtgagccgagatcatgccactgcactccagactgggcaacagagtgagactccatctcaaaaaaaaaaaaaaattgatcattgattatagaaggcagtagtctatatttgatactgtctttttcatttttttggtagccccttagtatctatcaaacacatcataggcaattagtaaactgtctttaagcctactactattttttggatgctatatgtaacaactttgttcttctttaagcttttctctggccttttttgaaacagtgaatacctgaatattatatacctaaaatagtctttaggaactacatatcaagatatctcatagaagtgactcatagtgtcaaatggtggtcttttctgtttttagaactggaaaattctcaaattttcattaaggttaaactcaattatataattttataaaatataaatattaataaaactttattttattatagtcttagcttttagaaatttagccttaatttaaagatataaactgcatttcctgaaaccttggtagtgtatctattttttttacgtacttattagttaacagcactttttaaagtatcatacacacaatatctcattaccataaagttcagaaacatatctttgtgttatatagaaaaaaagtagtttttttttttgctttgttttgagttggagccttgctcacattgcacagactgggatgcagttgtgggatcatagctcactgtaatgtgggactcctcctgggctggagtgatctcccacctcagcctcccaagtaggtgggactgcagaaaaatgtgggtttgtatagtaagttttaggattgagccttcacaattcccttatataatcatctgtaaggctaggccttgctggatgagtctgctggagtttttaataagttagcatcttctcttttttttaattaagcctagatgtatttacataacacataaacctcctcaatcttatggggcagcattacttcctataagatcagtgcttaggtgagttttgctgaaaaggaaacagagataacattagaaattaaatctctaattagcctcagcaaaaaaaaaaaaattgaaaactagatttcaatgcatctgttggcatcttgcacaaagtataatactatagtattcaagatgctttattttctaagtttgaggaaaggaatcatcaatttatcactgctcatttgaaagacacaggatgagaacctgtatgaaaagaaaggcagagggcatacactttgatctcataaagatccagagaggaagaacatggacttttatcaccaaaactacaaggccaaggaagcaatcgttataatttgacagtgacaacagatagaacaactatctgggtttaaatcttgactctctacctggctttgtgaccttgggcagggtactgaatttttctgaccttcagttttctcatttataaatgagtcatagtaatgggatagcaatatctactttgaagatttattctgaagattaaatgagaaacatatacaccagcttagtgactggctcacactaggtgcttaatagatgtttgtttacttcctttttttttttttccttgaaagaggttaattgaggactgtgtcaagatccccaaractacccccgggttcagtgatttgctagaaaggttcatgggattcagcatattatttacatataactaaggtttattgcattgaaaagatacaaagcaacatcagcaaagggaaatagtggatgggacgaagtttacaggaacccaggcgcaagctcacgagctctcgcccagtgaagtcacaaaccgtgcacttcattcacagctcgtgaaatggtgccctaccagggaaactcaggctcagtgcccagggtttttattgagggctggccgtagaggcaccctctgcctagtatgtttcaaaattccagactcccagaaggaaagcacatgtgcagcgtaaaacatattgcctgtacaaatggttcaggcacagcaaactactcttttctgggggagtctcgctctgtcgcccaggctggagtgccctggcgcaatctcggctcactgcaagctccgcctctccagttcacgccattctcctgcctcagcctcccgggtagctggtactacaggcgcccgccactactcccggctaattttttgtatttttagtagagacggggtttcaccgcgttagccaggatggtctcgatatcctgaccttgtgatccgcctgcctcggcctcccaaagtgctgggattacaggcggggcaaactactctttatcagttctgggaatggtgaggaccctccccaaatctaagttcccaaatgctagccaagggctaaccttgcaggcaggcctgtcgaaggatagcaatctcagaattgccatgtacaagaataaataaaagtaaataccttaaatgggtaaaaaacatatgggattggggccgggcgcggtggctcacgcctgtaatcccagcactttgggaggccaaggtggctggatcacaaggtcaggagatcgagaccatcctggctaacacggtgaaatcttgtctctactaaaaatacaaaaaattagccaggcgtggtggcgggcgcctgtagtcccagctactctggaggctgaggcagaatggcgtgaacccgggaggcggagcttgcagtgagccgagattgcgccactgcactccagcctgggcgacagagcgagactctatctcaaaaaaaaaaaaaaaaaaaaaatgggattggtttcttcaagcagtaatacaggtaaatatgtaaatagtgtcagaaagttattttcattaagcttagtgactaataggtggttattttaattttaaaaaatcatcccaagaagtatgggaaaagcccattaaaatcactaatgacctctccccactccaggaattctagccagttttcatgctgcccttaaataggtggttactttttagatccttctgtttgcttattatttggatgacatcttaatgatatcatctctcacagtgaatcaccaataatagtgtctgtcctaacagtgggctagcaggaccatgagcctgagccaggatggttattcttgtatcctttccttgaaaagtgtataattttactcaaaattctttcattgatgaatkcgagaggaaaaattgaccagggtgttttatgatactactttttatgtataaagctcagaacaaaagttagatgcaggcttttattaatatttgtaataaacatttaggcagaggtctttaacttagggttcagaatggtctttgtagggggcagtccatgaacatatacaaactgggtataaatcttgtttatctgtgtttttttgtgctataattctgtagattgtatcaacttaaaggaattttggccccagtaaaaatttagagttactgatttagagaaatgaatataggaaaggcatttttcttgttaggaagttttttgcatgasttagcataagaatattctaactttaatgtttcttctttataggtattgtactgatgatatgctgcaaagagaaatgatgtccaatccttttttgggtagctatggggtcatcatcttagatgatattcatgaaagaagcattgcaactgatgtgttacttggacttcttaaagatgttttactagcaagaccagaactgaagctcataattaactcctcacctcacctgatcagcaaactcaattcttattatggaaacgtgcctgtcatagaagtgaaaaataaacaccctgtggaggttgtgtaccttagtgaggctcaaaaggattcttttgagtctattttacgccttatctttgaaattcaccactcgggtgagaaaggtgacattgtagtctttctggcctgtgaacaagtaagtaagtgatactctaaccttacagtaataaggtatttcatttgggaagcttttaataactaacatacaggtttcagtttgctaattaactgtttaaatatttggtttcatcacacctcattaaataaaacctgtgctgaaaggagaacaggaagtgtttctaaaatcacatgcagttctgaaaacaaaatatgggtgaggagtctctagacatgatctccagagccaacttccctccagcaggctcaggccagagagtggctgccccaaaggcacagctggctctatttatgcttgctgtgaattgtctcttggtacagtaggtgcatgccgactcccctgacattctccactgcctccctgtgagcaggtgtgtttgttggagatcaggactattacctaagcactcaccatagagttaagtaacacaacatttcccacaagcagtcctgtgatagtcagtggagtatgggcagaaaatatagcccacccgaaaaggtcatctccctggactggggctccattcttaaaagattaaaaaamaaamaaamaaacaaacaaacaaacaaaaaaaaaaacctttaactcagatttctttaaaacatctctttaaaagaatgactggaaatgtgcaatcaagcatcatttccattctgttactgcttttagacagccaaggtaccatttggggttgcattttttttttaaattgcagctacactggccctatttctttccccactactctgttggctgaatctaaaagcctccaggatctccagaattagacctctcttcatggagactaattgcctggccttttttccctgtcttctcccacagagaggagaagcatgagtttttagaccatgacccatatatgtagtggttctactcattaaacagaaaccaaaaaggaaattatttgatgtaggctgagccacagctgaacagataagtggctcagctgtctgtcagagccttttcttgaacatccacatatttcagaaacactttcagaagtatttattctattttatactcaaagcataaaggatgacagctccttctggctttgggaactttagttttcttaaatgtatctgtttctagaacctcaatatgactgcatatttatcattttttgtatgtatatgatatacattctcttgaatagcaaatctgcctattacagtgatttattctgttatcatctcatcctgcatgattcaagatattcaagaaagtcctgaggaaaataataaaatgattacggagacataggatttatgaaaacagttggaggttctcagtgtaaacagatgaagcctaaggaagggaagaatggcaaatctaatatatttgagagtcagaattgccaggtgaaaaacaggacgtaggccgggcactgtggctcacacctgtaatgacagcactttgggaggctgaggcgggaggatcacgtgaggccaggaggttgagaccagccttgacaacatagcaggaccctatctcaacaaaaaaattaaaaaattagccaggcatggtggctcaggcctgtagtcccacctactcaggaagctgaggtgggaggattgcttgaactaaggagtttgaggctgcagtgagctatgattgcaccactgcactccagcctgggtgacagagcaagaccctgtctctagaaaaaaaaaaaaaatgaaaaattaaaaaaaaaaaaccaggatatacatttctgcaagaaaaaaatgcaattaagactgataggatgggtgtaatccttcaagtcagggtaagcaaaaattcctaaatggatttggaaatggattttggatcttggaaaataaagctcataacagaactgaggtgcagatggtcttagagtacatgattcttataagtttaatataaactataattaattgtagagtgacttttgaactgtcaactttagaacatgcatcattatccaggctggtagtagaaactgtaaatgccacaggacttggagaggtatgtaatttcccctgaaggcaggctggaaaggcattcctattaagaaaccatcagtcttgcagtcttaaagtgagagtgccatgaaagctaccagaggattttgtaattctgagcctctgtgacccaggcggagcactggaccctctaaaggtgagctcctcattgttcaggggctcaacagccgacctgccctgtgggtggggcagcaagccagccactgacattgggctggcttcagcagactttacctgggcaccaggtttctttctcctgcttcagccttggattccacaggtgttatctggttttccttaccccatctactgcctaacaagcagaacaccattcagtatactgatggacttttcttttttactatttttgtcaggatccctcattaagattctcatctcttatggattgggatttgtgtcttggaaagatttgtcttgcaccgaaatcagtgctaacagctattgatcatttccccccatgctatttgatgctttcttgatttctatataaagctttaaaacctaccgtagcacttaaatatcatgtgaaaacaaactcaaccagtctaatacaaatgtattaattgtcatttaaaatttgtatttatttacttagagacaggacctcactatgttgcctaggctggagtgcagtggtgtgatcttggctcagtgtgacctcgaactcctgggctcaagccatctacctcttcagccttcaaagtagctgggattacaggtgtgcaccagtatgcccagctagtttttgttttttgttttttttttggtagagacggggtctaactatgttgcccaggctggtcttgaactcctggcctcaagcagttctcctgtcttggcctcccaaagtgctgggattataggcatgagccactgcacccagccctgccattttttatattaagaagtatgttttaaattacagaaatattctcaaacattttggtgaaacggcagtgcatttgccttaggtgtgtcacattttctccagccacttgcctagcaccacacctgctgtgaattaatctctgtgattcacaggctgccctgtgtcttggcacttaattgagacttagagccctgaatgtttagcgtgttgtttcctatcacctagctgtcttttaaccggaagacaaaatatgaaataagcagaaaacatacattgagatttacgataatatgtagccagattactgtacagtaataaactatcacaaaggtgtttttaggttggaggttttcctgggaaatgttttatgcagttgtggatcttctttcatttttggtgagctagatgtctgctagatatcgtccttcagtgggtgttgctgttttccgtaactgtgcaggtagttataggaaagttatgcgtatgtaaataaaccacatacattgaataagaatcaaggaaatgaataaacaaaatgtctgaagtaccagatgcacattttttaaagcttttctgccccaaattctgcagattatggccttaaagccctgtatcagctgtgcttgaggagcctaaactatttatctatttctgttttgctctgctttttcccttctgaagattttaaaaattcttttttattgccatttggaacaaaattcaacattagaaccaacttacaagacagccaaaatagctcagtgagagagcattagaccgaagaattcacctatgactaaaaagttttagcagctagaaccaaataaagaattagtggccataattatttttcccacatcttctaggagaataaaagtaaatatttcagtgcaataaaaagtttatcttgggccaggtgcggtggcttacgcctgtaatcccagcactttgggaggccaaggcaggcagatcatgaggtcaggagatcgagaccatcctggctaacacggtgaagccccgtctctactaaaaatacaaaaaaaattagccggccatggtggtgggcacctgtagtcccagctactcgggaggctgaggcaggagaatggcatgaacctgagaggcagagcttgcagtgagctgagatcgggccactgcactccagcctgggcaacagagcgagactccatctcaaaaaaaaaaaaaaaaaacagtttatcttgataggaaattgctcatgaatgggctgctggaatcaaatacccctttccaaatccaggttagctgttaagttgcaccagtgagaagcttgcttgatggactcatctgggaggaatgaatgcgtgtcctcctaaggccaagcagcagccaggttcaggggatgcagctcagctcaagtactcattcttttccttttaatttcttttttttttttttttgagacggagtctcactctgttgccaggctggagtgcagtggcacgatctcggctcgctgcaacctctgtctcccgggttcaagtgattctcctgcctcagccttgtgagtagctgggactacagacgcatgccatcatgcccagctaatttttgtatttttagtagacagggtttcaccatgttggccaggatggtcccaatctcttgacttcatgatccgcccgcctcagcctcccaaagtgctgggattacaggcgtgagccaccactcctggccttccttttaatttctaaacaatccttccttaatatgtggagtaaaatgaagtaatcagaattataagaatggagaaaacgttttgttctcattattccaattggcaagttttcactcattaggatcaacagccatgctgtttgcttggtaaaaaatctgccccaagtaattcaattatatgtggaaaaaggaagtgcaagcaagggaccgtacctgtgtaccagctgatgtgggaccccctggagcggcctctgcccagcttcctgggagccacttagcagaccaggaaacgagcacagctcacctagttctcagtgacctgtgataccttgctatttttctagatggatctgtcttcctacaaaacccttgagttaattcaatcccattctacaaatggtatggaaaggaaagagacataagctagagacctagagaatggaattgagctgtaaaaactatggcagttgtgggaagtcatcttttttacttagatttttagtgaaatctaacaaaattaaatgggaaaacaatataaattatatttaacttccccaaagacgttttctcatttaggtgcatctttacttatttaaagatacatgtaggcagcaacacagggatttctttccctgtatctgttacgtagtattgcctaaaattttttgtaattcagacatttttttaatagtgatgttgtttgcattgtattttattttcatgggtttttttttctttaggatattgagaaagtctgtgmaactgtctatcaaggatctaacctaaacccagmtcttggagaactggtggttgttcctttgtatccaaaagagaaatgttcattgttcaagccactcgatgaaacagaaaaaagatgccaagtttatcaaagaagagtggtgttaactactagctctggagagtttttgatctggagcaactcagtcagatttgttatcgatgtgggtgtggaaagaagaaaggtaattattattgagtaggctaaacagactgctgatcgttgtcaagcactagtttctcagttycctaccattttactgatcaggaagtgaggatgaactatgtgacctggggattcgttgaatttggtcatgagtgcaaagaagaattattgcagccagtaacaaaagtcttgattccattagcatgttggaggtttggaaatgaattaaattgattgagctgccaaaggagaaagttttgagggaagactcaactactagagcataaaggtgatagtcatctttaatagtattttttctttagctaaggtactagcaaagcaaattgtttgactcttaaactgatctcttcttatgaacaatttactggatttttttgatagcccctttatcagagtaattagtatcttaccccagagaacttactagaaacttgtttcaagtatactgactttaattttagcaaattttggcttataattgacgataaaattttcatcctaatcattacaaaatattctttattacttttaaattaaaaattagaaaaaatgaaaacaaggtatctcaaactctgaaagacactgagacttcagaaaatcctaacatttgagatctcaaacgaaactaacaaatattgactaatttaccattactaggtgccgagatgttttatccctccaggagactatgagcctcctaaatatccctgacttattatgacagagcaattccaacagtcatgaaggttccctggaaatcacttagagttgatcttgattgaattagtccagccttcagagaaaccagggctgtcacttgcccccgtgaaccacctgtaaggaaaatcattgttagtgccatacgcagtttctgtattagctgttatgattggaactctcagtatgtgttgtaaaggtgagaccrccaagatcctggttgatttgaacaaaactataaagaaacatggcactatcaggtgagaaccctttctctgtgtgacatatgagcatatgttatcattcaccagtacagtgctttgagaagtgacagtgctagtatttcagcagatgacacaaaggtctcatagttattgaagccacaatgaaagcagacaacctttaaatccatttatcaaagcacttgcagtttccatctcaaggcaagtgaaacaataataaatatcgtgcaaagaaaatgagtctgtggcagtgcatttcatggagtaaagtactgcgcagcatattctcttcaggatcagtgagcctactgaatcatgacttatctgacgctaatgatgctgtctttccatttaaaggtgtacaacccgagaataagagcaaactcgctcgtcatgcagcccatcagccagagccaggcagagatacgcaagcagattcttggctcatcttcttcaggtagtgctgtggacacaaatactaaatgttgtcaattcttgtatgcaggcaacccagaaatattaaagccatttttcttggtgtcttttaggaaaatttttctgcctgtacactgaagaatttgcctccaaagacatgacgccactgaagccagcagaaatgcaggaagccaacctaacaagcatggtgctttttatgaagaggatagacattgcgggcctaggccactgtgacttcatgaacagaccaggtagccttatgctcccatgtcagccaggcattaggctgagattcaccttctcctgcccattctctgtcctgagttcacatgatgcgcagcaatgcacacaagcatggagggggcgttggtttggactgaagcattttcctgctagaggtaaacattctctgaaggtaatttttaaaaccccacaaacctctaggaaataactgttctgacacgagaaatgtgtctgctgttggacactgcagcacaggggaactgggcttaaggagctgggtaatgtggagtatggaagcgtaagggtgaatcagcagaaagaagaattctcagcagcttgaattgtccttttttcttttcttttttttttttttttttttgagacagggtcttgctctgttgctcaaactggagtacagtggcgtgatcatagctcactgcaacctccacctcacaggctcaagtgatcctcccaccacagcttcccaaatagctgggaccacaggtgcaagccaccacacttattaatgtagatttcctttgtagatgtagatttcttttacaaagtgacagcttttcagagctagtcctatgtctgcagtttctcagaataaccagctcaaaatatgccagagaagtatattttggggtggcatattctagtctcctccagtcatattttggggtggtgtgtcctgagccccaacaagataggtttcatttttgaaaattgctcttccagtcccactgttcatctcataagcccaggaatcaccacctgttgatttcctaggcatcttcttgctcagggtagtagatgtttggtggactagaaatgcagggagaagaaaaggaaggcttggtgatgtcaaggatttttaaaagcaaactatctcactgtgttctctcaatagtcaccctctgtgctgctcattccatgaggcttaaagctgataactgggggacaaaagggttagggtaacaatttatttttgtctcctgacaatacacacataacttttctgctgtgcttggggaaaatataactgtggattaattctgactcattgttttggaagcaaaaaaagaaaaagatgctcgcagctgctgcatttaattcaacttataattgaaatatgcaaatccagcaaactagttacccttttcaggatgcatgaaccatgtgaaaatgaatttggcataactaggctacaggctgttaattgaattcccctgatctggacctctttttaaaaaatcagttgtatttttcttccttggctgcctgacaattgacctccatcctgaatgacacagtcactgtccattggggtaggaggcctcaggaccagctgaccacttcagtggaaacagatggcctgagactgccgctaccctgggaaggcagtggtacctagatagaaatttggagaaaaactagccaaaaggtaccagactacaccagaggtcatctttgtattcagaggcagaactcattttggtagtagccagatgactggctttggtatgatctatgattctttggattatgaaaagaaaagtgaacccaaacacaaacaggcatggcacgttagataaggcaacgcctcatgaaaacaggggaaaatgcaggaagaaaataaagttgctgggcacagtggctcacgcctctartcccagcattttgggaggccgaggtgggtggatcacctcaggtcaggagttcaagaccagcctgaccaacgtggtgaaatctcgtctctactaaaaacaaaattagccgggcatggtagtgcatgcctgtaatcccagctacttgggaggctgaggcaggagaatcacttgaactcaggaggtggaggttgcggtgaaccaagattgcgccattgcactgcarcctgggcaacaagagcaaaactctgtctcaaaaaaaaaaaaaaaaaaaagaaagaaagaaaagaaagtcaaaggctgcagaggccagggatggctctggtgaaaagaggaattaaagattctgcagggctgggcatggtggctcacacctgtaatcctggcaccttgggaggctgaggtgggagaactgcttgagggccaggaattcaagaccagcctgggcaatataacaagaccccatctctacaaattttttttttttttttttttaatgagccaggtgtggtggcatacgcctgtagtactagctgtttgggaagctgagtcaggaggatcacttgagtccagggttcaaggttgcagtgagctatgatcgtgctactgtacttcagacagggtgacagagcaagaccctggttcaaaagagaaacaaaagattctacagtggtgtcatctgttgtgatggtgcagatctttcaccagaggattcctaaaccaattcatcaagaccttctggaatagtatttaccacactaaaagcccagtttgtaagaatactagagaagtatatgcgcttgtttgtaaatcacttggaaactcaagatttggctttggaatttacaaaatgatctttaaatgttaacgtaacatttactatactatatataacatttacatgtactaagaggagaatgggaggaagcaggctgccaacggccctcacatgtggccctccccatagctctgccgcagtgcctgacacctaccggcaggactggcactgcccaaacagcccagagagtcgagcaaatattctagcatgactgtcaggaggccacagcctaggtttttaagttaatgaaggttacactattatctgtttaaaggctacacaaaagttactactatactcagatgagggggtgtgaaaaagagacgcaaacatgccaaaacaactttccagggccagtgtgtgaggatcttggaaacaataaagtaaataatgttacagaaagtgaaaacaaaatccaggagaggttttaaagggcccagaatggaagtacttttggctcctgaagccctttaggctcttgtgggcctgggaactatatggcttatcatttaagttgatatgtttttgcgtgcaacagtgcaggcggaaagatggctgtggctcarcaggagtgacccctccctgctaacaaaacaaaacaaaacagcaatttaacttaatggaacctgtttattttgcgatgaattcakacaaactgaccatgtccctgtgaacttcatgggacaggggcatgaatgctattaatgattaagctgggatgaaaggtggaaacagatactgccctgggtaaactggggtagatggtccccatattgaggggactatgccaaaaggcacaggctcttgggccaggctgccagggctccaagcctggccccatcatttgctagtggggtattattcagtaaattaggactctcattgcttcacttcatttatctgaatatgaggataatcaaagcaattggttcatagagttattaagataaattagttaacatatgcatgccccttagaaaagtgactggtgtatagtaaatgctatagcacagtcatcgtctgagtgactcctacctgagctctgcaccacaggggccctgagctgcagagggtcctagaaagagcagttttaatgggtgtgagaagcagataatgaccctcagttattaggagacatcaccagattgcctctgagatgggccggagccaggaagagccatggcagataacagcaacagcactggacttgggagtccagcatcagctgtgctggcagagcatgccaggtgccaggttcaacactgccggtggaaggcccaagttcaaaacctcactttacatatgacaaaacagctgggtggccatgtggctttggcaagccacttgtctttttctcatctgtaaaattagggtagagtgtctgccctcttgtatcctggggttatttagaggtacaaatgagatgtttatgcaaaattgccatgtacagtgtaaaggagtaggagttaggcaaatgccaggttttgggaacatgtccctgtgaaattaagtgaagcagaagcctttcctccctgtcctcttcagagccaactcttaatgctattccccagaggccctagacattgtagagtcttagggtctacaccatctcttcattcttcagtttctccccctgtggactcttttacacaatgcccaagtcccaaccctaaaataaatcagaaacagaagcttcatttgctccttcagccctcctaagtgataactgcatttttctctgtccatttatgtaaatgtgtatatacattaatgcaggggtccccaacccctaggcagtratgggtaccagttcgtggcctgttaggaactgggccggacagcaggaggtgagtggggggcaagcgagcattactgcctgagctccacctcctgtcagatcagtggcagcactggattctcgtaggagctcgaaccctattatgaactgcacatgccagggatctaggctgcccgctccttatgagaatctaatgcctgatgatctgtcactgtctcccatcacccccagatgggaccgtctagttacaggaaaacaagctcagggctcccactgattctacactatgatgagtygtataattatttcattatatattacaatgtaataataataaaaataaagtgcacatgtaacgagcttgaatcatctcacaaccatcctctccaccctctggtctgtggaaaaattgtcttccatgaagtcggtccctggtgccaaaaagtttggggacctctgcattaatgcatgtacctggcacacagtaggtactatgtgagtatagctctttttgttcttccctatgctacgtccctaccatttggaagttccagtggcactctggawgcactctgttatagaatgcattatgttgcagtggatatattaaattcttctgaatgcaagcactagtaatccagctcaaactagcataaggaaaaagtgaattatgataagggaactgaggtatcttaagaaatccaaaacaagttttttagtttctcatccctgtatctmtaggttcccctccctccctcccttccatggtatggaactggcagtcccagaacaacctagaaaaatcaggaagaaaaatgcatgggttttaaaatgaccatacaatgggtgttttctatatgagtagttagctggcattatgcaaatgtgtagagtctccccctgtggactcttttacacaatgcccaagtcccaaccctaaaataaatcagaaacagaaacttcatttgctccttcagccctcctaagtgataactgcatttctctctgtccattgatataaatgtgtatatacattaatgcaggggtctccaacccccaggccgcgatgggtactagttaatgacccgttaggaactgggcagagtcttagctgctctctgccctaagctttatgatttactatgtcagctcctggaaactcccttggtctaaagtcgaaaacgcccaagaaagggagccattgattctatttgagaagctgcccaccctgaaccagtcccctgtgactggggttagtagtgataatgtggtgttgtcacgtggcacaaaatcctgtcctataagtatggaagtgaaggtacagttcctataaaaggggacaatttggaggtaaaagtgcatttccagtagagcaggattcttgatttacgtgtgcatctccatatataaatgagaccatccatgctagaagggccaagagtgaggctgtcccaratgtgtgcctgccccagagccttgccagtgccaatagcacaagatactcaaaacagactgagagcaaataataatttgagcctcacccttatgaggaaatcatgaaccaacaccaaacataaagtcctttaactactcatatagaaaacacccactgtatggtcattttaaaacccatgcattttttttcctgatttttctaggttgttctggggctgccagttccatactatctaactacagtgccaactcttgtttaaagatagttctctataatggtatgagggtggggagagtcttcagctagtcaccactacaaaaacctggggccagcttcctggctgtaagaacagttactgggagtggagaccgttggtaatttgtgaagtggcagaactttcccaatgcccttacgcttgaggaatactgactagacaggtgccctctagaaggccgatagtcttccccagaacatgagcaaaggcagtcacgtgtgggagacaaattcagcttccttccccacttagtcctttctgaggcctgggcggtgggagtgatgtgacatgcagggagagtcgagaggatcaggaggtgcctgtggctgtcaaaggtctgcgtgtgtttccttccatgtcacgggcaggagcagagctggcgtgtgagaggtcttcaggcacagctaagctcggaggagctggcctccgcctgcctcacggtgcgggtggcactgggagggcagtggggatactgccattacccgagagccctgcccagggcaaggctggacagaaggatcttggctcccgccagtgggcagggagttgaaaatgcttttcttcagtttaccatggaggccactctatctctaacatcctttccaactctaatgactcaaatccagccttacttctctgctcttattgggaagaaagggggttaaggagtgtggtggaaggagagggaatggccctggctttggggactggttaccaggagaccccctgccctatcctcgtgaaaatacatgtccactttagacaagagaaggcatgatgttctctctcctatgcatattcccaggaataattgcagactaaaacttttacctgtaggaaagtacatataaatatgttggcatacatttgcataatgtcagctaccttgagaggaaattcagtgtttctgagccatttttgccagattaggcagaaagtaggccaaagattgttataacaaaagagacctggctggaggaagcctcctgagcacctgagtagacagacttcctgtgagggtttgggagccaaccgaggcttcctaccatctgacatctataagaacactataagaacatgggaaacatgccgcgtggggctgtcagctctggaactgccgtggccttggactccacttggcctgtgctcagcttggagttagcgctgcatcggctcctcctctgctggttgcagtttaatgacctctttgtaactaggttttctactgatgccaaggaaggaaaatgcaggcacatattggagcttggcatttggggttccacagaaaacaggcacacagaacagtgaagaaatactgtaatgatagcccttcacattactttgagtgatggtagtggaggaggagtgtgaccttgcagtgagctattccacagggagtacagctgccgctggcaagcgagcttaataaagatgatgtttggttcatctcaaaattgccttcagaataaagcagtctgattttgcactgccagaacaaagaggcctgacactaaaacacttccattccatttgttagcgttacttactatggattatacttaagcagcactgccctaaagaacccccatataaactcttctgctttttagctaagcaagtttatgggccacactggggagataaaatgcagaatataatattagcaaatcctatttagttatttattaatgttcttcacctgtgtaatctgcattcattaactcattctttctaatataataaaaccccaagaacatcctctccttttctgttgtaggaccaggagcagaatcatgaagtcatttatgttactaaccctgtgtgcggccaactcaactccagggtgtaaaaatgaatagtaggtgccctttggggacagagcctggctgtcaagccagatgcttaaagggaccattgccaaagatcctgtaacttataatgcagcagctttgctgatttatagaaactggtttctgaaaagctttcagtagttaagtttgtactccagccccttcctgctctgtttaagatgcttatttctgatgctgcttcttgtaccttctccagcagatcggctgttacttttcatgtcatgcctcactgatagaactcttgaactttttttctgaatagcccatctgtttatttcccatgattgtgatttctcaaggtcatggttagtccaaaggtccccaagaatgaacaagtaagacggtaatgctgtatgtcaggacccaggcaggacaggaatatctctgagaagccataagcttctgctcagttttaaatcttgatgggaaaacattcagaatagggaaattcaacatatttgccccaaggtaaggatgaaagccttgcttcagtactccagcggatgtctgggttccctgcagatttcccttgggtggtttggcactgccccctcactcctagtagcagatcttttgcctgtggtgggcgcgtcaggctgaagttatatctggtgctggctccgctgtcctccagcaggactggaggtgtggtaggctgcatcgcagcttccctgagtcatttcccagcctacagtagtggcttctaatgccttccagttgtcctgacaggaatggaggaattttatcaaatcgaagtttgtgagtaggtttttttttttttgagacggagtctcgctctgtcgcccaggctggagtgcagtggtgccatctcggctcactgcaagctccacttcctgggttcacgccattctcctgcctcaacctcccgagtagctgggaccacaggcgcctgccaccacgcccggctaattttttgtatttttttagttgagacggggtttcaccgtgttagccaggatggtctcaatctcctgacctggtgatcctcccgcctcggcctmccaaagtgaggtttttgagctactcagtttgcctgaaatttagacatagagcttaatgatcaaagtttagacagcacataagaaaatttttaccatatgttactttgaactcccaggagcagacaggttcaagcgcttcttagggccccagagtcttcagcccctgcccaccttgcacttactggaactaaaacaaaaccaacctagtggctcataaatcctgcagttttggggtataacaatacagcagctttctattatgggatttgcttcattgtgtgacctgtattgctataccaggaaccagaagggtggacaaaacacatgtatttatttaataaatattaggttggtgcaaaaataattgtggtttttgccattgaaagtaatggcaaaaaccgcaattacttttgcaccaatctatatatagccttattccacaaagagaatatatttctttaaataaatggatttttaaaaactttggtaaagactgagcatatataataccacatcattatcgatgttacataaacttaaaagaaataaagagatggagagaatcagcttgctatctttatttctttatttgcactgggaaataacatctttgtctactatttctagcatctgagatccaggtcagttgtgattaatttttctctgtattatgcaatgtattttcctgcttttcatgcctctctactggatgctagacattgtacattttaccttcttgggcactgaatatttttgtagtcccagaggtacttttgagctttgtcctaggatgcagtgtgatcctttcaggtcctgctgtatagctgtgtcaggtggcagtgcccatctagggtttctcacttgtgttttctacccagtgccccataaatcatgaggttttccagctagggtggtgggaacaggccctaccctaggtcctgtgtcagcaccactgttccttctaatcttctcacatggctctttctctggcctgaggtggttccttacacacatgcgctgatcagtagggctgtgctgcctagttgagggagctccctctggcccccgacttagatctgtgtgtctctctccagtactgtgaccgcgagttccggccaccttagtctccctggatccctggcattgttttcctactgcagggaggctggcaggctccacctgggttccccccgcatgcacactgcagctgggaccctcctcggagcatgagctggacaatcacagggctcccctcctgagtttgccctctcaagaatcactatccttcactccctggtatttggtggcttgcaaaccgttgtttcacatattttgtccattgtttgcttgtttcatgcaggagggaaaagtccagtacctgtttctccatcttagccatatgagactcttaaattattatttttttcctttcctagcaccagaaagtttgatgcaggcattggaagacttagattatctggcagcactggataatgatggaaatctttctgaatttggaatcatcatgtcagagtttcctcttgatccacaactctcgaagtctatcttagcgtcctgtgaatttgactgtgtagatgaagtgctaacaatcgcrgccatggtaacaggtatccttaatgactattccttttctttttttgcaaatctgcactaggtatagatttagatcggatccatttgaaattatattttgaggagcacagagcagagatagtgatcaactcatttaaccttttgaaatgatagtgaggtattttaataggttagaaaaggaaaattttcttaatatgaaaaattatcttaagaaaactaactcaaagttcagcaaatttatacatcagatgtatgaaaacatactagatttcttttgctgaaataatcagtgcagatgaagaaaatgtgtcactagaggtgtttttccccaaataatgttgtgtgcctgttttttatttcctattggcttcattcatcctggcttgtatgttttaatttattctaatactgggggaacagaccaaccattgtgctgtatcggaactggttccaatcctcttcttgtgtctggacctccaagcacctcaggttttccctgctcctgccggaatagaagcaggatattaaccatattcagttgaccttagaaaagcaaacacacacacacaaaaggagagggagaattaggatgactcactctaaatttctgggatttctaagtaaacaagaataacatatttattcagagtaccaagacaggagccatgccactaacagtcgtgacccctcccctctgcatgttaggctaagataaaatgtcttcattattgctaaccatgtgacctttttcattttgaagctccaaattgcttttcacatgtgccacatggagctgaagaggctgccttgacttgttggaagacatttttacatcccgaaggagatcactttaccctcatcagcatttacaaggcttaccaagacacmactctgaattctagcagtgagtgtaagtgaatgctcagaaactacctattaattccaccttcctttccctagataagtctgagtccttattagttattcatcaaacattcttcgccagccctactggccacttgaatkcaatggcacttgaggccctaaacgcacccacaggcatctgcagagtgggagatgctcagtccccctgctcccacggagctctggtgtgccaccatggcgggcctgtacttccagagctccaggactccactcagccagccttcagagcaagcttgcttggggcayggtgacgggggacacagactcgtacatgggtctttggaggaagacaagaacagccacctctacgtgcccactgtcagagttgtgctgtgcaccttccgtatcctggcacattcaccacgtgcatgcagagaggctgcagagctccagatactagtgcagaataggtaggctggggtgctgagsggaggctgcagagttgctgacggagcttgatagaggagagcagagggtgtccagagaagagaatggcgcatgtcaaagcaaagccacaaagtcctttgtatgcctgaagggcagtgggtagcttacctgtcacaggaaggtactcagaagtcaactggaagctgctatgcagacagaaacaagaggagggggcaaacagggcaaagcagcatagcagaggctagagccacccataaagggcagccagtaaggtccctccctgacattttccatgaagcatcttttacctcctttgttctgaaagatggtgtgaaaatatgtgaagtagtgtgaaaaatatgacagcaatttgaaagacagaattgtataaagaacagggagttagtgtttcaaagctgagaagaaaaagttgtcagtggagccagcaggtacacaggaatctggtggcaccttttgagggcatgctgaatgggtgacactaagtacatgctgtggttgctccgagcagcatgagtggacaggacagggtaaatgagggtcttctgtccatggtgccatggccatgtacattcccaggtccatcttaagtaattacaggtggccagaaagactaacttcaaactcacccacatgcctgaattttaagataaaagttacagctagggtagatagatgagcttaactrtaacataattaattcccaaatcaacctggtagtaatcctgttcttatcattaaataaaatatgagatattttcatagatcagaggaatttatactgtgggctttttcctgcctagtttgattaaatgggaccacatacatacatgctgtatgcatagagacacaacatagatcttacaaaatcctctctggcctttatgagccacgggttagtgaaatacatcttcagtcaccactaggaacagtttccacagttggctgggatcacagaaccccagcaggtggcatgggtgctgtcggtggcaccgtctcccttcctggtagtgccctgacagctgaccttgcagccaccagaaatccttgtccttgctgccttcctgccactcacctacgtggcctcctttgtaggagaggagagcacagggcttaaagatggcaactgcctggcctgggctcttcagagcttctgacaaatcatttctaaatagccttgtgttctttccctcctagactgtgtggaaaagtggtgtcgtgattacttcctcaactgttcagcactcagaatggcagatgttattcgagctgaactcttagaaattatcaagcgaatcgagcttccctatgcagaacctgcttttggctccaaggaaaacactctaaacataaagaaagctcttctgtccggttactttatgcaggtgagaaggggtggggtcacctcagcataggctctgctgaattgcacatactcaggatatgctgccaacaatggcttaggatgatgattttgacattaagtaaaactaaaaatccatgttattattaaagatttggtacttaagtatccttcccctcaagggaataaagggccaaggcagaatatgtagtcttaatggagaaaaatgacatatcattatggatttcctcatctgtaaagtaaggttcctacatcacagggtcattgcgtgctacacaccaagtgtaaagcacttggcattggagtgtatgtcgcccatagtatggtgggtagcgtgctaagtttcatctcatggccaaaacattaacctcacagctgcactgttttagcagtgccctgctgttgctgaagttagttaacatcactgtctcaaagttttaggcaaaacatgcttatggcttattttctacatgtgaaagtaggaaacatgagtggcaaacgttagttttaactatcccgtataaaatactttggtatttttttcaacaaacatctttgtataatgatctccatattaatacaaaatcttttttctttaaaattctgcctttcagattgctcgggatgttgatggatcaggtaactacttaatgctgacacataagcaggttgctcagctgcatcccctgtctggttactcaatcaccaagaagatgccagagtgggtcctcttccataaattcagcatttctgagaacaactacatcaggattacctcagaaatctctcctgaactgtaagtttaatggagaagaaagggttgtattttttttttaattcatacctgtaggagtaaatgacaaatttggcttttattcttagttctaaagtttatactgatgcaatcttaatttacgttgacagtacctactaagggcaggcctctgtggatgatacctaagaaatgtccctgcctgttagattacagcatagaaaagacagtgtagaaataaaaacaaagaccatgtgtctttaagaaggacagaatgctagagaaatgcactgtatacaggtgcattgaccttgagaggaatgagcttagccatctttcaagagccactgcagttggagctgtcggggaagaggaaggagggaaggctgaagagagaggcaggcaccagaaggtgtaaggctttatgggccacatagtttatattttatctaagtgcagtacacagcaattggagcattttaagcaagagtagcatcttctcgatatagttttaaggatcactgtagctggccaggcaccttgggaggccaaggcaggaggaagatggcttgagcccaagagttcaagaccagccctggcaacatagcaagaccccgtctctacaaaataaaaaaattagccgggtgtggtggcatgcgcctatagtcccagctacttgagattctgcgacagaggatcgcttgagcccaggaggtcaaggctgcagtgaggtactgtcacaccaccgcacaccagcctgggagacagaccaagacgctgtctaaaaagaaaaaaggaaaaataactgtggctgctacatgaatggaaaggaggggcaatggcaagagtgagactactccactagtctttgagaggccagtacagagtctggatccattttgaaggttccactactattccagcaagtagtgttcaaggcagcaaccaagagtgactcatagatgtctggcttacgcagctggatgtggagtggtactagttaaaataagaagcaaagataccccctctctcccctacccaaagctctcttaagcatacgattggtgcctcttatatggtgatgggccttaggggaaatactagtttccactaaaggttagtggtagacagcacttccactgtgtggcataacactagagaggccaacttattctagaaatgcaacaggattggctgcataaaaaacagaaagtatttattttacaaagtcggactgagatactatctgagttcaaattaaataccggttctacaggtagattctccagggatgggaagtgcccagacataatgtttggtgtctctcaccaccttccccactcataatctcatctttttgtcttaaataaacagatttatgcagctggtaccacaatactatttyagtaatctgcctcctagtgaaagtaaggacattctacagcaagtagtggatcacctatcccctgtgtcaacaatgaataaggaacagcaaatgtgtgagacgtgccctgaaactgaacagakatgcactctccagtgactccccarcaaacacaaggtgcagcagggtcccaaaggtagctggatggctgaactgctggatatgggagatacatgacgcgaagacggatttcacatccacaggacggtcttgaagaaaataacactgtgtatattattttaaaataaaaaatagaagtttttattgagttctttaaattackactccatgcttttcttcttcttggaaaagtttttaaatcaaccactcataatttgaccaaaattttaaaaaactggtattttgtaaatgtgtcagagacacatgggacagaaccctactttttgtagaggaacttaatctgaataaagtctgagtttttcagtaaatctccactgagttttctggtaattttacaaaaacaagcccatcactgtccattggaaatgggttagacagatagatattctttcagtttatccatgatttcgttcatcttgtcgcctggaattaacatcacagttcgcaagggcgtcattggtacgtcatcaaaagaccatttgcctcccagacaagtgtcgctctcctcctgcactgagtagttgaacttgagaattgccttctaaaccaaataagtaaccatgaattaaaaatcgggacaacccaaagacaaaacccatttgatctacggcaaagaatattacgtttggcatatgcttaaataagaatgagagctaaaaaaaagcaaaactcagaattgaaaaagttcaaatgggacattcaggcagaagttataaaacacaaaccaagtagattttaaacccacatgaggaacagggatagaggtgtgcaatttctaagaggtgaacaagcagctaagtggtattttcatttaattgtcaaaataatcttgtgaaacataatgaaattaagacttgtaaaatttgatatttaacaagaacttgtcttcaaacactcttttctcactttctcagctgcttccttagcatcaggcttttgtgtgaagacagagtaaatctgcataccccgccatcttaaaacacccatacacactccccccaaatggtcaacctgaggtgttgaagcatatggttttgttttttttttttgtttgtttttttttttgagacagagtctcactctgtcacccaggctggagtgcagtggcgtgatctcggctcaccgcaagctctgcctcccgggttcacaccattctcctgcctcagcctcccaagtagctgggactaccggtgcccaccattgtgcctggctaattttttgtatttttagtaaagacagcgtttcatcgtgttggccaggatggtctgatctcctgacctcgtgatccgcccgccttggcctcccaaagtgctgggattacaggcatgagccaccgcacccggcctatgttttttaaaaattatgtttactatttacttcctggaaaagaagggcacagctaaatttgtagcgctttagtcttctgcagaagtcttcaaagtgatgtgatatcatccaattcaggaaaatatgttcccctcagagatacacttcaagatttttttttttctgagacagagtctcgctctgtcgcccaggctggagtgcagtggcgcaatctcggctcactgcaagctccgcctcccgggtttatgccattctcctgcctcagcctcccgagtagctgggactacaggcacgtgccaccacgcccggctaattttttgtattttttagtagagacggggtttcaccatgttagccaggatggtctcgatctcctgacctcgtgatccacccgcctcggcctcccaaagtgctgggattacaggcgtgagccaccgtgcctggctcaagatgtttttgtgttttttttttgtttgtttgtttgtttttgagacggagtttcttccttgttgctcaggctggagtgcagtggcgcgatctcggctcactgcagcctctgcctcccaggttcaagcaattttcctgccttagccttccgagtagctgggattacaggcatctgccaccatgcccggctaatttttttttttttgtatttttagtagagatggggtttctccctgttggccaggctggtcttgaatttctggcctcaggtgatctgcccgcctcagcttcccaaggtgctgggattacaggtgtgcaccaccgcacctggcccacttcaagatttttcagaggaagagagggtaagaatattctctggtatatggctgtccatcacagtacaagctacctttataggaaaaaaatgctggagatatcccaccagcaggatgacatccacgactaaggacacagagcagcaggggtgccccagcttccacactgaccagctgtgtgatcgcaggtaatttccctcatttccctatgccttaaagtccacatctgtaaaccccaggctaatgtctacctctccgcatggttttagaatgaaagatttcacaggaagcatattataaatgcctaatcattcttaacaggttaatcacttttctcctcctcctcctcatgctcataaccacagtgcaggcaaggaggctggtgcctagcctcctgagtacctactatgcacctggcactatgttagctgctaggtcctgtggggaaacagaaaaacagagtagccacacttgaaagacttggacctaaagtgggagaacaataaatcttgataaatcattttcaagaaaatccttatttacatctaaacaaataagcaggatagtcttacctcatagaaaaattcttcctctgcatttgcaaacattaacgcagctttctttttgttgctaggtttctttttggaawtgttttttcctgcttccacaaatgtcttactaatcagaaggtaaaagtagcacttcccacatggcttattggttctgtgtgcccccgccagttctttcctgcaaggcacacacacaacatttgtttacctgctgggtcaagtgaaatccatcaacaaaccagagcacagaaaacccggtgaggcatcttcagtgggttctgctgtgacgcaggcattcaatctgaacacttagtctacaggaatgatttttatttacataatcagttgcattttagattatgtattactttttataatactatgatatatctcagattatgctgatttgtggatatatagcaactaacagatcagatgagtctcaaattcactcaatgtatcactgctctgcctgtgcataagttaaaaatatatacgaatctgaatttttgaattttttaaagcaatgaacatttaactgaaacacacaaaggtatacagccacaaccaatgtcactacagcctgtgactactaccacagtctctaattgctagagtctggaactaatttctgacatactgcagaaactgcataaacacacaacctaaattctagcaatggaatcgcaacaaagccttaatgtttcttctttctgaaaattaaacatagccttgtgcatctggatgcccttgaacaaaagaagaaactcagaacaaccgtcctcttcagctttccttttttttttttttctttttttcgtttggagacaaaatctcactctgttgcccaggctgtagagtacaatggcacaatctcggctcactgcaacctctgcctgccaggttcacacgattttcgtgcctaagcctcctgagtagctgggattacaggtctgcaccaccatacccggctaattttttgtgggtgtatttttagtagaattggggtttcgccatgttggccaggctggtctcaaactcctagcctcaagtgatctgccagcttcggcctcccaaagtgttggaattacaagtgtcagccaccacacctggccttttcaaaaaaaaaaaaagaaaaaaaaaaagatagggtcttgtaattttgcccaggctggcgtgcagtggctattcacaggcacaatcatagtatattgcagcctggaactcctggcctcaagcattccccctgcctcagcctcctgagtagctgcgactacaggcgtgcaccactgcgcttggctcacttcagctttaacaggactaggagaaagcaaatcaccctcctataaaaccaaataaatgtgagctccagctgatcagaaaaaaagaaaaccaaaaaaaaacaaaaaccacttaaggcaccagaagcacaatctgagctacagctgagagagcagggagcaggagataagaagcatcgaatccctaggaaaaaacagcaaacgtaaaggtttccagagtagagttgcattcctacagctatttaaaggaaaaccacaacgcaagggctatgacctctgagaaagaatattctataaagaacctgtctaggtcaagtgctgtgactgacacctgtaatcccaacactgggaggccgaggcaggaagatcactttagcctaggagttcaagaccagcctgggcaatgtagcaagaccctgtctctaccaaaaaaaaaaaaaaatttaaattagatagaaataaataagagaatctgcctatattttgtcctctattgcaaagcacagacaatacaattcttagtacactcagtttgctagatttcacagctacatttgaaatatttttgtaaacttaaaacttctggattaaaaaatagaataacaaaaaccctgaaaagctagccacagtatcaggactatggtttcatttgttatgaaacataccaatagaatttgggaactttaccagttttgttattgttgtaattgttcattattttattcatgttgcagaaagctatctgtgaaggtgaaaaacttcaatcaaatggggatgcaaagtctatatgaaattatctacttatatatcacttaaatcttaagttaaaatttcatgattattgtcacaaactcttcaaaaagccagttgttaataatgtatgtacttcacaggatgtttcttccactcccctcacactaaacccacttaaaccaaggacagaactctttctatatctacatattctacttaaatgacatttaggaatctatttgaaaaaaaaattactgttcaaagatattttcccagaatctcttactgaagctgctggtacatgggcagagcgatctgtggagggacattaatgaatctttcacttaggagaaggcccacaggcttggtggtgtcatttaaaaacttgtccagctgttcaaccatgctcttttcacagttcttctcacagaagcgtagaaccaactcttgaatttgttcaacacactgggtaccctagaaagcaaagagaaagcttgtttcctattacaagccatcacatagaggacaaaacctgagagtaaaagctatcacttttcatcttacagctaagggcagtttcctgccatagccttaacgtcttgtatgtcttcagtgttgactgcttaagcatttctcaaaagtaaatacactggttatttaccatcccatgatgagtggtaagagagtcataattaacattcagacacactggaatggcaactctagtccatctcataaagatagatggaagtaactggacagtttatttcaaaattaaagactaagtgtagcctgcatcttattctgaggtgggtaagcagctggtttactttttattacaactcatcagagaatcaataaaaagagatgaatcgaaacaaaataaaatgtcagtaaatgccctcaacattgaggcagcaaagcctgagaatatccccactacacaagtagcaaagataacagctgcagagagacagcacaaacagctcctgcatcagtaccaacatcaggactgcaaagccagatgattccctaaaccacagggagtaaacaactttaactgggtacagacccaacaccaccaccttcatattgaaaaaggattacaataagatttcacaagagcacttatccctatagttaatatcactgtttaacataaaagacattttcaccatgcattaaataaaagtggttttggcctaagaaataaccattcagatgccatccagtgaaaccaacctttctttcagttaaatttaaaaggcttatgaaaccaaaaacctcatcttcatccatatcatcattgctgtcttctgaaacatccgtttgctattttaaaagaaaaaatatttaaatgttatatttagtataataccaagagtataaaaccaagtcttgggatgtaggcctcatttatcttttcacttttcaaaagcaaaactttgttttaccaccgccatcttagaaagcattgtattttaaatactgtcacagttttaccaccatcatcttggaaagcattgtatcttaaatactgtgtgaccttgttcatttcgctttacctcgactctgttcctcttttcagattctgaacagattgaaatttctttgtaccagattaagtcattttcttttatcagattctcaatataatacaaatccagaagagataaacctcatgaaataaagcattttcatttgttttctacacaattaggctggagccaagccttgcttctctgctggcccacagcattgtttcatctaaaactcatgagtttccagaacacttgtcag

SEQ ID NO: 96028 - DNA, 190849 bp, Homo sapiens
aatgaaatatttaaaaactaaatttctattgtgctttagtaaccgctaagaaataaatatctgtatctcatttttaggagagctttcctcagtgctgtattatgtctcattaccaactttttcctcaattccaagagcaaactgaaattatataccaggtagaaacaaggtgattaataaatcatcccaccagtgataatgttctgtggattattgacatgaatttcactgtgaggaataaagaaattatgtcataggtcttataatttctcaagttcaaggaaaaatatccttttgccaaagtgtagatatttctgagagtcctatgattttttgagtgaggaacacacgggtattcaatgcattatgaaatcatctgaagcaggccatggaaggtgctggattattttattatttggccttccaatgaaaacaactctaatttacaggcatcagtttattttgtaaattgaatcaatttttcttaatcatagaagaagagaaataataaatgacttttgccactgtgcatggaatggtcacctgccctcatccttatgcatttgacaatgtgataactgttcccaaaacaattacacacacatacataatgatatattgttcacctgtactcggtggccaagaagttaagattcaatcataccctcatatgtgtgaaatgacatatgaacaaggctattcttgtagcattttgtgttagaaaacaactgggacgcgcagtggctcacatctgcaaacccacactttgggaagctgaggtgggcagatcattgtgaactcaggagttcgagactggcccaggtaacatggtcaaatgctgtttaaacaaaaaatacaaaaaaaaaaaaaattagccaggcatgacggtttatgcctgtagtaccagttactccagaggctgaggctggagaatcgcttgagtctgggaagcagaggttgcagtgaaccgagatcgtgccatggcactccagcctgggcaatacagtgaaaccctgtttcaaaaaaaaagaaaaacgaagaaaaaagaaaagcaaacaactgggaataattaagtggcctagaagtgctattttaaatatatccaaagatttaaaagaaaacatgaatataataaataaccatatgaggacctcattagagaaataaaaattatttttaaaataaccaaatgaaaagtctattacctaaaaatacataacagaaataaaaaagaaatcactggatggacttaacagaagattaagcattgcagaagaaaagattggtcaattttaaaacttggcaatagaaaccatctaaactaaaacacctacaagaaaaaaggcttaaaaatgttaaaagcctcagtaaccttgtgagacaatatttggagataccacatgcatccattggagtccaagaaggacaggaaggggaaaatatttttaacgaaataatggctgaaaatttcccaaatttgatgaaaactacaaatttataaaataagaaactcaagtaatcccaagaaaatagacacaaggaaaaccatatcaatggcaggtgcagtggtttatgtctataatctcagcactttgggaggccaaggtgggaggatagcttgagcctggggattcaggatcagcctgggcaattttgtctctacagaaaaaaaacattaaaaattagctggtcatggtggtgcatgcctgtagtcccagctactcaggaggctgaggcaggaggacttcttgagcccaggaattcaagattgcagtgacctatgatcacaccactgcactctagcccgggtaacagtaaaagaccccacctcaatgaataaatacataaaataaaataaaacaacaccgagacacattttaatcaaatttcttgaaaacagtgataaggagaagattttaaaatcaactagaggaaaagggtacatcaccaaaactactgataataagcaataaagaatgaatctcaaaaagagtttgctgcctaaaataaattagaaataagatactatgtgattccatttatatgaagatacagagcaggtaacactacctatggtgatagatttcagaataatggccatctttggcaagagtggggagattctattgggggaagagacatcaaataactttctacaatgatggaaatgtttactgccttgagatgggtatgcatttcactagtttatacacttgtctttactcattggcgtatcccttaagatctgtagaatgcgtgtgtactcttcatcagtgaaaagcaatccaagaaaaaaacgaagagttcaaatgtggtaaggatctgggggagggcctaattattgttttttctgggtgagtagaggaatcttccagcaaaaagatctgtcctcttgatttcagtaattgttaacacttgggcataacttggaaaaagaggaggagagggaagaatagttgggtaatgtaaaaatagatagttctgaacctatttgttattcaatctagtacatccttgagatcagaataaccatcctgactgtggttactaaaagttacctcttggtgggaacagggcctgaacaaaatcattgaaggactctggtgttgtctcagtgtattagtccgttcagacatacctgagactgggtaatttacaaaggaaagaggtttaatggactcacagttccatatggctgggaaggcctcacaatcatggaagaagacaaaggaggagcaaagacacatcttacacggcggcaggcaagagagcatgttccctttataaagagaactgccctttataaaaccatcggatctggtgagatttattcactatcatgagaacagtatgggaaaaacctgcccccgtgattcaattgcctcccacagggtccctcccacaacacatgaggactacgggaactacaattcaagataagacttgggtggggatgctgccaaaccatatcactcagtttttccttccttgccctgccccacagccaatcaatgatcaagacctgcttttttcctcctaaggttgaataactttatgagaatgtttctgtatgatgtttaaaagcaacttcttatttgctttccacacattgattttgccttttttttttttttttttttttttgcttattctcctagacagtattcctggcctcagcattttaattttaattgacatctattgggccctctaagcatgatgggcagtatctcagtttctgcagagaaacccaaaagcccagtcctcaagtaaaatagaagacaagacaagtaagtgcagttaatatcaataatcgcaggagcactgcctcaagctgtgttttagagggaaggggctaaatggttgggtgtaggggaggcctggggagagcgggcaggaggccagccacggacaggcctgagacaggatcagacagccagtgtgccagggagctgaagaggactctgtggactcaagaagggccctaaaagaggagtggtgaggtgttcaggagggcaagaggcagaggagctcctcaaagcctgggaggaggataggggaattgactctgatgtcaatagggaccttgagcctatgagaggcaaaaatgaagatggtgaagaaggatgaagggcttccctgtggtaatcaacagggccctggcacaaacacttctgacaacacgcttctgtgtgacaatgatgaatgtctgtagactttagaaagggttgagaatttttggggtccagcagagaagatattatgaggaaagaagagccatctgcctccccatcatgttaccaaggctgttcactttccaatagcagatgtctgacaaaggcaagttgtttctgtcttcttagctcacagtctctgcctcctcagccctgcagcgttaacaagcaaaactgtgcttagcagagctttgtaattatggccttcatgtacataagcctgactctgtagaccacaacagcagaaaaatccaaagcctggtgacgtcatgtgctacctggccccacctcaacctgggctgttccttggaggtgcactcaggagggagccacccgccctgctgggctccgaggtgaccaggctgtctgctgctgctggctggggcccatcctcctctgctctgacagcccagacgccttcactgagcacctcctggctactgacgttgctttaggagcttgagtctgagaagccatggagatcaacagagcctaggctgctggagcttacagccctgggggtaggggaagagggcacgacagacacaaaaggagccaataaacccacaaataattccaaactgtgatggaggatgtggaagagagtggcagaagagatggatgcagggcgatcttccagaagccaccagtaagaaggaaccaggtgcactggttggaggagtcccaggcaggaaggagcttggctctggcactgagagaaaggagccgtgattggagcccagcgggcaggggtgagaggctcagagcagccagggaagtcaggcagagcctcgtgggagtttgggttttaatattcctggaggcttttaagcagggggctagcaggacccggtttacactttgtgaggtgcctgggaccaagtgtgaagaatggatcatctgggagagtgggtcagaagctggggagccactgcaggttttggaggggcgcaggcagtgagatgaaagggcaagatgcatggagaagccagtgggaagtggacttgggccctctgggaggtggacttgaggtgggacacggaggcagggacagggacgactgcagagaaactaagtaagagcaagaggcaggtctgagacagcaggagacagccaggaggagctgagcttggaggagagggccccagagtggtgctgcttagagtcattcccatacggatggtgtttaaagctttggggctagacaaggcccccagggacagaaatgggcagggcagggcaggaaggtggagctcaagttctccactggtttcgcagctctccggcccctgtggaggggaggtcccactctgggcaaatcacgtgggggtggcctctgccaggaggcacccattgctctgcagcctttggggtccgtagctctgtctaaacaggccttaagtatgctaagagtcgtcggctggcaatcggtgcaacgtggggtaacacaccgtaagtgccactttctccccatccattcattcattcataagcctaatgagctgggtccctaccacagaatgcagcttccctcatgagggctgggccgtggccccacccagagggcacggcacaaaggttcagaaccaacatgccaccagtgtcttttctgctccttccagggaactgccttttctctgaaagctccctaaatagcttgagtgaaattccctggaagaagtcggctagacagcaggcccagtgcctggctctgtcgctcttctttctctttgtgcgtttttaactttgacagatactgccttcgggacaagcgagccctcttctacatcccccagacaggcgccttatcccctcctctttccagaggaggccaccaggcccagcgacctcacagctctcccagcttcctcgcaccagaagcgcacggggtgccctgcgtgtcccacacctgctgcaagaccagggcgagtccctagtcaggccacttcctggtgcacagggatagggcagggagaggcagggccttgcctttgctctccaccaggtgtgagtgcctgccataccttgaccctctgtctacgcacctgggtcccggcggagtggctgggccaggcctccccggaaggggcaccagccttgagtaaacggatgcccacagtgtctgggtgctcccagggcagggccgcagggcctcagggccatacccgcctcgcaggtggggcgggcgccctggatgcgctccccgcgccgggcaccaggcgtcgcccccgctcctcgcagcgcccaggcccccgcccccgccgcggagccacagccggagctggagccgaggcggcggcgggacgcggccggccggacaaatttcctgctaggctgcggacagcgggcggcaggagccggcgcgagcggcttcaggaacccacggcctctgcgcgtccccgcgacccttcttcgcgcccggcgaagacagccgggcgccccggagggcggcgggcaggcgcccgggagatgcggagcctccgctgcagcgcgatctgcgcgaccagaccggcccccccgaggtgagcgcgcgtgcggacagggaccctgcgcccctgtggggaactgtgcaccccgggaggcccaagcaggccggggcgctgcctcggccgctgccgcgggagggaggggccgctccggggctcagagtccggaccccggccccgccgcccccgcggcgcgcccagtaccagcggctggggcccgtacgacccccgaccccggcctgtggcgcgtcccctcacccggagtccccagcccaacttggcgaccacagtggcagtgctcacgctccctctcggtaaacaggaggagggcgcgcgtgtctgcgggtggctacagtgcgcgggggccggcggcagggcggcgtacgtgaaagcgggcgacacagagagggggtgcaggccgcgcgtggggggctgcgcccactcgaggctggaggctggagcctttgaagaaagtggctcgagttgtgccaactctgggaggggccggcgctctgccaggatgctgccccgcagccgggcgggcgcccgcgccttcccagggaggcaggtggagcgggatgcagcagccgccgggggtcggagatgcggcagggagaccctggcaggtggtccaggctggactgccgcgatttgcagggtcgacgacctcacagggctcctgagcacagatgcgagcgcggtgccaattctgagagctcccgggaccatctggggaaggccgggcaacccacaggatggggaggcagagccaagccggatggagaccgcgctggacctgacctaaattccttccaggcatgcaaacctttccagaaagattaggcaattatacttgcagaattatgatattggtttgtcttgagtcgtgaccattccatcagagtttcaatccaggaaactcaaagaaagaatacagctctctgcttgtattttagagtgaatgagcgtataggtgagttgaatgaacaccagcaaagagtgatcacgtgatacagaaattactgtgtccatgtccagtcagctctgcatttggccccaggtaccccttgacccagggcgtctggaggtctttgtgtcccaaagatggatgaagttctgcctctgcacactaacgactcttgtccatttaaactgtgtgtatgtgggtggggagggggggtgtggagggtcgtttccaaaactgggataatggccagaggagggcatgaaatggtgggggccagtggctggggcaagcgtctgaccaccacggtcactcagccagcatggtatgggcagagctctgtggtgtgaacagggttagggtctgtactttccaagcacaggctcttggcatttggggagcaaaaggtcagaggcgaggtggagcaggcccaagaggtgggggctgcgctgtcagtgagagaggcctgacgtaccacccagcccttcccagacaaggctctgcccctgaatctgaccttgggggccaagatttttgttcattgatgttggtgatgcctgtgagtcaccaccgccccctccctaccccaacagaccgttcccatgtggacaagagctaggagctagatttgtctctgtaaaaggtcaggtcactggatgtgtccagatggcttgggacttagtcacacactccctcatcagttccagtcaaaccagttgagggaagtcgatgagggtgttattgtctttacgtgtgatgcttcttggaggccctgtgtggacacaaagtgaggacaatgcggaaagtcacacagaggccacctctcatttctgtgggggacagctggcagagagagatgcgctccctgtgtcagcaccgccacctccacggaagcctggaggaggtcctgaagcactgtgccctgatgggagccccctcttctccagggatgcgtgtgtgcaaaccattgcccctgagagtagatgcggctgtgtgtgtacatccttgcccctgagaagagaggtggctgtgtgtgcaaatcttgcccccaaaccccaagagaagatgcattcacagtgggggtgatggtagatgcatcagtttcaactggtgaaagtatgcttctcccagctgtgcctcagtgggtccactgtgctccatctgcaccaccattagcctagtctaaggtgcaccgctgatcaatattccctccctgaaggccagaggtgtgtttctaggcccggccactcctctgtagttctcctccgcagctgcccacttgacatttctccctgggatatcaaatgccccttgactcaatgcgtcaaaatcaaacttgtgatctcccctccccttccagtactttcccagtgttgtctttatccatccaattccaccagcctccatgttgcttctgaaatgtatgccagactatagtttctgtgaagagagggcaatactgtatctccagtgcccagccatgtgcctaccagtggagccttgaggactactgtccatggataaacaacttggaagtgagaccttcccgaagcgcatgtgctgatggagcaagtgtgtgtctgttgcgtggatgttgtatggttgataggcagccacacatttttgccgatgtggatgggcatggtccatccagggctcatgtggccagcccttctggagatgctggactcacctgctaaaatgactgctggcttggaccagagacaccccaagtgacctcccagggaggcaggcttgggagcagggagggaacaggatcgaagctgccccgtattcccttgctagacaagtctttttcatttataacatttgagtcaccctcacagaagttctgttgccaaagcaggaatgaatgtatccattagggtaaagactggccttcttaatatttgaatatcacttgggaagaaaactacagttctaagaacatctctagtttttcttttggctttyttcctactgacccaatggctttgtcttccataaagctcccaaagctttccagatcccaagactcagctccctgctctcagcctccttcccctttatttccatcttaggaactcctacccatacctcaaggcccacctcaaaagtctcagtctccacaaagccttcctggctcccctacctgagaggaatctctcttactcttggttccatagaacgttatttctgcctgtcctaaagcacttactggacttgactttgatttccagttcacttgctcaagtagtttatctcctccactaggcagccagtgctttaagggtggagggtgtgtctctgagagcatgtactttgggttcagtcagtcaagttctgactctggtgtgaccttggctaaatgactcaaaatgcaggcttcagtgttctctagaatgggagtaatcatcgctacttcccagggctgctgctgtgagggggacataggatacatataattgacaggccrcttggctggtatgcagtaaactgtggttatctttcccctacaacatctaatgctgtgcattgcacatgtaagaatcagtgaagtttgaggccgggtgcaatggttcacacctgtaatcccagcactttgggaggctgaagcacgcagatcacttgaggccaggaattccagaccggcataggcaacatgatggaactctgtaccaaaaacacaaaaaaattagatgggcatggtggtgcacacctgtagtcccagctactcaggaggctgaggtgagagaaacatctgagcctgggaggtcagggctgcagtgagccatgttcacacaactgcactccagcctggttgacagagaaagaccctgtcatggaaaaaaaaagaatcaatgaagtttgaatgaatacatgaaccaagccaaaaaccatacaaatagatagataccttttgtgcatcatccagatcagtaggtcaaatcagtgtggtgtggcatgccagataatttttgcatggcaatctaaatgattattatgtaaattttgcgtgattaagtattttaatcccataatgttatcacttaccatgaaggcattcattcttcaatatgcaccattgactccagtgatcgatgaggcagaaatgcaacttgctgtgcacattaaccaggctcgtggcctgaattaaaccaggctgggtgtgaggcactgcaaaagcaaacgaaacccacccctgagaagcagtgtggcctagaatcaggtgtctggaatcagggtaagagagcagcttctagaccagaacataaagctaggaagctgtggcctaccctagaaactctcagaacttcactttgcttatccaaagaaaggggctgtcctgggccatctctgggcccctcacagctgctgcacttccgcccgatttcaccccttccccaccactgggcaggaagggctgctgactccgtacaaggctggatcccaggcagggaggcctcctgtttcttggctcagcatttgggccacgtgtctctctgctctggacaccaaatctagagagagtgaggagaggcccgtgggtacatgtagcgtgctgccaattttaggtactggccctagacatatcaagagtttattttggaggattaacttctcattattttgtcactaggatttttttttttcaccaaaagcagagtgctggatgatattttagatggctgggattttagatcagccatacctgaggcaataagagttggtcgaatgttaccaatccttgagcagacacagatgagcagttgcrgggtcgttcgctgctggatgtgggctaggagacccctggtttggggattatgaaggcagcctccttttcttccctgggctctggctgctgttttcccagtcatacccatcatggtctgccctgtccaggtgttccatgtggggagtattgatgtggtgcccagcctttgaactgttaacaacaccctgctcacagccagaaatgtgggccccacatctttctttcaactgtatgaatacttcagaggctttgattgagcttaagaaatacaaattcttaacaatatatttcagaaaaataaacatatccttttatattgattcccaatgaaataggggccagataaaatattttaaaagggcatctgtttttaaaaatatctttcaaatgcaatcaagaatgttcagttaatccggtccattatgtatattgtaacaagtaacaaaaggggcagagaaatctttctcccaaaaacaaatataaagtccagcagggagtagggaaatgtttgaagaaaaaaaaaagattcttagttatgtgctaaaaaccaaacgtgttttgggcaggtgctttgatgttagtgtttgttgggtggagagtaaagaattgataggaaaacttgtttggatcccaggtctgggtgccagctacactacatttgatccaatggaagggctagcatgggaacaatagcatttggtgtgagcgccctgggcaggtacatgactctgtcgtcagctcccagggatggacagccagtcccacaatgcctggagctcagagctcactctgtgcatgtatgtgacatggagagatggatggatgaaggtaatagaactgagtaggagcctgtccaggtagcagtggaggaggccaagtggcggaggccttccctgccatgattttactctgtctgaataccagcagcaagtggaagccacggggctttattttcaagggaggtgacacagcctggggctcagggaaaggacttaggagcagaatgactgggatcagatgggggcccatgagactgaggctctggacaaggcaagggacttcccctggcccagtgtgagcccaagtctttacggtggggagcatgatgccgccaaggcagctgcacggggatcggtggaggtggtacgcagaggcctggccccatgatcaccaaagggccagcggtctcacacaaggcaagggcccaggggaccggaatcaaaggcctgagatgatgtgagccctgacttctcctctgccacagtcgctttgtcctcaaggcaagtcatttaattcctattcaataaatgcacaaacataatttttggttattaatgtccctaaatctgtttggacatttccagctgaacattagtcaccagttttgtactagagagaaaattagttccatctttcttctcaactgagatttttaaatgtcctatcacatagctacttgattacagtgtattattttaaatgacctctgtactaagtccttttattttggcgtcctctcactccagaaggacttggcattggcatttttcaggctgtgtctccacagtaggactttcataggtctgcggtgcagactggtttgctgtccacaggcttggccctgactcctcggctaacatgcacaagggcgctctgagggtcgggaacgcacccaccaagcacagcccagacgaaatggaagctcctgtccaggcaggttcccggtgaaactctagggagctccagccttcctttcttctccagtttattaagaggctggcctcagaggtggacacctacttccacaatttgatgtccgaccctgggactctcctctttaccctgcccccacctcatccaccagccttttggtctgaaatccttgtcatggggtaaagctttttattctgttgttggaaacacagtatatggtttggctgtgtgtcccctccaaatctcatgttgaaatgtggtccccagcgttggaggtagggcctggtaggaggtattggatcatgggggcaggtacctcatgattactagcgccatccctttagtgatgagtgagttcttgctcagctagttcacatgatatctggtcattttaaagaatgtggcaccccccacccactctctctcttgttcccactctcactgtgtggcatgctggctccctccctctgccttgattggaagcttcctgagcctcacctgaagcaggtgccagcattatgctttgtgcacagcctgcagaaccatcagccaattaaacctcatttccttataaattacccagcgtcaggtattcctttattgcaatgcaagaacagactgacacacacagcacaggtggaaatacaggctttgcggacaccggtggcctgtttttctgacactatcatacttcccaggataggctctactcttaactcttctaaccccatccacttgttataaaacacactttcagaaaaaggctaggttgttactgaggtaacatgggatggatctttggaggtgggaaggcctccagcctcctctggggaagacaaagtaaatcctccctatggaattctccagcttgttttcttgattccagagagacctgctagtgaattcaactaacaggttggttttcagcacagaatatttcctacagatgtcggtgtttctttccaaatccttcctctcttcagggcgctttcccactgttctagacgtaggagagaaagcacttctcagatggtgagcttttatcttccaatcttgtcaaccgaggagacctggaagttccctttcaacctggaatgtgagccctgcttgctgggcacgagataaggaccaaggattgacccaggacaatttcagagagcacaggggtggcatatcctcatgtcagggcgtggagctaatattcagacccaaacactctgaatctctgaagcagaagctctcttaaaattcctggggaggaaatcagtatgaattaataaaaagcctgaatattgtggatttttattaaattcgaggatttatagtaactcaatccaggccaacaaaacgttgccttccggtacttactttaatgaatagaaagcatgtaaatgctcttccaaagagaataacacattttagcatcttaaatatgtaaaaataaaactcctgtacaatcctagttgcactaggaagtctacttatcaaaaaaagaaacttctgtttccagccacattatttcaaatcatcccaaaacttacattgttactagtaaaatttttcattgtgattaacactttttttccagtatggttttcctctttctgaaagcaaccttagtttcataaacagttggacatttaagtactggtcaaaaaagtactctgaaccagtaacctcgtccttaattttgaactgctgttgactaagcgctctcttttcctaagctcatagcagcccttcgttcagtgcttcagtaattcaataaattactttttgccaaggttgcaaacatcagctaaagttcagtcatctactggagatgttatcagtctgtccatttaaattcttttgcgcaaagtccagatttggacccaaagtaatataaaaatgcaagagccagaaatttaataattttgtactgtgttgtgccaagccaggcctattcttagctagccaacaacattctttcaaaggatattttttggttttcatcaaatgtaaatagtgtttaagagtctgtaatatcatttagaaggaacaaatggaagtattaaacctttattgactacctacagtatatagaggatctataacttatgatggttttattatagtttctcaaccttacaatgggtttattgggcattgggtacattttaaacttatgatatattctatttacaaggggttcatcaggatatgacctcactgtaagcccaggagcatccgtacgtacaagcactgtgcttagcgctggagttacagggaaaaaaaaaaaaaaaggcacgatggcttgtgacatcctgtggatgctccaggtccacaggaagacagaactcacttccagggagtgttaaatgtgatgctggatgctyctgtggaggaggggagacatggaagggcctccccaggtagagcagtgacgtggtctggctctgtgtccccacccaaatctcatcttgaattgtaatccaaatagtaatccccacatgttgggggagggaccttgtaggaggtgattagatcatgagggtggtttcccccatgctgttctcatgatagtgagtgagttctcatgagatctgatggttttataaggggctcttcccccttcacttcactgtgcacttcactgtgcacttctccttcctgtcgccttgtgaagaaggtgccttgcttccccttccaccatgattgtcaktttcctgaggcctccccagccatgctgaactgtgagtcaattaaacctctttcctttataaattacccagtcttaggcagttctttatagcagtatgaaaacagactaatacaagcaggcttggtttactgggccatttcctaggcagctgacagggattgagcattccagacagaggggctaccatgtgcttgcctggcagtaggaagcggtgtgtcctgtctggggaagagcaggtgtctgcatggagctggagcccagggacagaggggatgggacaaaaaggtggaaagtttaaggatcacccaaacatttgtacaccatccaggagtctggattctgtgtgacggaccagcagttcttaccgtgtcttaaattatgaccccctttgtgattctagggaagactatggactcattctccagaaaaacgcatgtgtgcacacagtcatttgtatagtttcagcaagtctttcctaacacccctccccccatcctgaggctcacaggttccaggtgtgtcccctttgtgcggcctggccagccccacagagcccagcagcatgctcagctgtgagtttgagaaggggtcccctgctggctgtgtgtggaaagccagaatggaggtgacgggggaaaccgactcagcaggttggatttataggcaacatgaccatgtgggtgagaggatgagagtgagaaccaaggccccgcagttttcggccagggtgactggatgcatccggaccagacacaggcttacgagatgatggtgcgcccagggtgtgagctgagtttgagggtgccagagggggaagccgctccaacatgtggaatccaagcagctgattccagcagggagggtctgtccaaagggaagcgaagagagtttttcagcatgaaactgatggtgccaatgtttgtgcttcactgcgctaaactgtcatctttctgttaaatttggcttacagggccaggtgcagtggctcatgcctgtaatcccaacactttgggaagctgaggttggaggattgcttgaggctaggagtttgagaccagtctgggcracatagtgatactgtctctaaaaaatattagccaggcatgatggtgcatgcctgtagtcccagttgctccgggggctaaggcaggaggatcacttgagcccaggaggtcgaggctgccatgatcatgccactgtactccagccttggtgacagagcgagamccygtctcaaaaaaattttttttattttgaaaattgggttacactgtacattcttagggtctagacaatattcctaataaaatgccatgtaggctgggcacggtggctcacacctgtaatcccagcattttgtgaggccaaggtaggtggatcacatgaggtyaggagttcacaactagccgggccaacatagtgaaaccccatctctactaaaaatacaaaaattagctgagcacgctggcacgcacctgtaatcccagctacttgggaggctgagacaggagaatcgcttgaacccatgacacagaggttgcagtgagctgagatcacaccactgcactcagcctgggtgacagagtgagacaccatctcaaaaaaaaagccatataatgatggttgttgtcatcagagaagtcggctcacagggggtgatgtctcctgctcccacttacaaagtaggtgrgaatgatctcgagaagctccatgaggtgaccctcagcctctgatggggacaaacaggagtcaccctgctctctctctggctcccatgactcttatctaaagacctcaggctggcttggagcaccccctttaaacttcctttaaaaaaggagaaaatcggcctggtgcagtggctcacgcctgtaataccatcacttttggaggccgaggtggccagatcaggaggtcaggagatcaagaccatcctggctaacacggtgaaaccccatctctactaaaaacacacaaaaaatagcccagcatggtggtgggcgcctgtagtcccagctactcaggaagctgaggcaggagaatggcatgaacccgggaggcggagcttgcagtgagccgagatcacgccactgcactccagcctgggcgacagagcgagactccatctcaaaaaaaaaaaaaaagagagaaaatctatatggaagaaatgaaaattattgaaggagcttggggaaaaggctgaaagaatcttggctgttcatgcaaaccaagtcccagggctggcttcatggctgttgggcaacccctgcccagtcagcatcctggcagttgtcactttggcagagtcggaggacagacacacaatgacagcaagagcaaaggcagggcctgcccgcgaggaagagccacggctgttgagcgtggatgtgtatttctcaaggagtatgaaggagtctttttgcaaaattgcaaagaactggcctgactgggaagtgcaagagttatcttcccttcagggaagagggaagtttaactggggcctccttgggctggaacacatctcaaagtcatggttcttggaaacccagggtgcatttatggacaagtctattataggagttgtaggtgtatcttgaagatgcaaaaattcattttgtacctttattttacacatcagaccttacccaggtaccattctgtgctgggcagtgcctaggactgaggcagatttggctccattggtgtgcccaggaaatggacttcattgcacactgaaggaccagcccttcaatgcattgtcttcaaataaaaatgaaaatttcactcatttctggtgattttctcaataacctttctcataggtttgaatataactagaaacataatttttgtccaagtctttcagttcaccaaaaaccaaagttaaattctacccttgcgctttagatgttaacaatttgagaagtttggcgaacaattccatctccttatttagagccagagctggaggccagctgcagatgaggaaagggagacttgcccaggggcacgctgcctgctcctgccacccgtgggctgccttcttcctgttctgttctgtgctgcctctagtggactgaccccttatccctccttcctgtgcctgcaacacggcttatggtgctgggcctcaggaaatggaggtccctcatctgcatccataagaagaaagcccgggttattcatctgtttagacagaagtgcactccaacctttagcaggatctgaaggtgagaagctatgacttcattactgtgcatccatcttttgtctgcttggccctagtcctctgggtgtggtttccgcctggcaaattacttccaggagatgcttgagaaggcagtagcgtgtggaaacatcttatgtgcagcatgcttttgtttacaaatgatttattattggttatgtcaaaatacacatcctgaatgaatgggcagtgctgggtagaaatcagtgacatcaatcgtggttattttacttagcagtggattttttttttttccttttcagtgtagtagtaatttgtaaatgctttatgsaggttatgctttctttagtggcttggcatcttggaaattggagcagccaggctcggcgtgctgtgtccatttttagccctagcaggcaggaagtgtggccatgctctctcagggtaactgctgcgagtttgtggctagaatgatgttgggtgggagttactcaactgtttgaatgcaatgggcttagctaatggtaagaaagtgcgtggagcctgggaagcaattgatagctggttaccctgagctcagcctctagtaacaaatgacacaaggcatttgtgaaggctggaaagcctccgtgagaagagcaccttgagtcccactgggaaggggcagccccttggagcatgaggggtctcttgctgcctctgctttgggtctggctgagggtccactttgctccctgaccccagccagggtaccagttcccagattgctggtgggygtgtgacagctcatgtggccaagcaccctgccctgcttcttcaaagctcctaggtgggggagtcccagtggcagggcagagggaccaacccccatggctgactcagctgtagtccacccagattgcatttatgggtaagtctactagaggcactgtacctgagcctggggcaacccttcttctttcgtggacttccctggtctctccaggacgtttcagtgcaaatgcagctgtgtgataccaccccatacactggcggggctgaagggaggttgggttccgtatcagtcagggaccttagggatgcacgagatggaaatatgactcaagttcagtcaagttcataggggcgttgacttacaaaactgaaagctcaggtacaactggatccacatggccagatgttgccaccaaggccctggctctctctcatatgtgctctgacagactcagtcctgtggggcctccagcaaactcacattctgtcttccctgtgtaaggagagggcgtttccctacagatcaacccagacwtgagtctccttggctctgacgagccaggcttggataactggcycaacctcaaagcttcctcggtgtctggggcttgccctgttctgataatccaggcttgggccctctgtcttcccaggggccagaggtggaaacacagctcctttggcaagtgtcctattttcagtgggggtccagggcaataaatgaaatactcgttacgataataccagcgatcactggtgttgagggtgcacttgctgagtgccagccagatcctgctctaagcacttggacatgttaactcggtcagtgctcacagctgcaaaaccaggtgagggcagcaattagtgcatttttgacagaaggaactggaggcccagatagggtagcagcagggcagggatttgaaaagggattgagaccaataatccccaagacggaggagtgatgcctatgtgtggaagcaggggccacacggctgctggggatggggtgggaagaggcgtcctgtggcctccaggctcactcagggagcagtcagatggaaggccggggtagacacctggacctgcctgggaagggctttagaatcacaggagggacgtgagctccatcttgaactgggggaggtgatgccagggatgtggacgtctatagggactgggctgggggcacagagctgggggccaggagaggctcactgagctgttgcccagcagggctgtgcctcagagtcacaggggaggttcccgagagcctcctgcttggaccctgctctcatgattggctccaagttctacagtgaggccagggcagctgcattttttacaaagctcccccaggaaattccaagtgtggccagggtggagaatgccagggtcttctgtagggtcccagaatgaggtcaggactttcttcaatgcagagggcaggaggggagtccaggaggaatggacagggtgctgtggctcagggtgccggtggaaggcaggcatcgatgctgagtctgaagccctgtgctgggcaggaactttgctcttgcaggaagtgaaactgctggaggaaattgctaaaggaaagcaatggaatagactaatccatgacaagttgttagtgaattcatgaagtccaattttaagagctgctttttgaaagaaggctactggagaaaggctaactaaataaacaagttgctgatgttgggatgtcaggcagctgagctgacagagatcactcccagcagccctgaagccacaggagccaccacacatggtcatttacacagttccattcattcattcactgtctcaagttcatttaacacatgtgaatggaaggccttctggtgctgagactccaatggtgaacaaaacccataggtgcccttgcattctttgccgccggacacctaacctgaatctgggggtcctgtgggaggcagtcccgtaaggggctgtctgtgcggagctcagccctgctctggagactccgtggggcaagggggccagggggccatcgagggccgctctgaggtccttgtgttgtccgtgtgggattgagaaggcctcatgccaggagctgtgctcttctcttccaggtgggccggggccatgtgtattcattaggggcctgtcatccaagtgggcacttaggacaaagtggttgcccagctctctgctccacagaaccccatctgccacacatgataccacttttgctaggccttcttctaaagagttccactgaacccgtaagagatgtgtgttcctgccactctgttcccagccacaacatagaaaggggactgaactctataccaaggtgggtgggctgagagccccaggcacagcggcttctgtcgggccatttctgcccaggttcctttctctggctccctccctgctcccatcttccctccccctctgccctctctggcttttcccatcctcagcttcatctcttaggacctcgtcttccagaaccccagacccagccaagctcggcctccctcaggccttcagctagtgacctcagcattggtggagggactgctctgaccccagacccagcccttagtggcaacagtggcagctctgtgggcagctgtggctaacttgagcgtctggcggcattcccagcctgcactcctgtcccaggcagaggcctggagagctggtgctcagcccggcatagcggctggcgtgccattcttttgacatgagtaatagcaaagcaagtccaagaaatgtccagtgttttctccctgttgttgcccaatttcaaagagataatccaatcaccttatcaggtgaggggtggggcaggcttcccagaagcagacagagtgtggggacaccctgacctggccccaggagtcttggctatccagagcgagtgctacaagtctgggaagaacctcataatggaatcgcttgcctgttttgatcctgatgtgaaaaccagtttgaattttttttttttttttttttttttgagacggaattttgctctgttgcccaggctgaagtgcagtggcacgaactcggctcaccgcaacctctgcctcccaggttcaagtgattctcccgcctcagcctcctgagtagctgggattacaggcgcccgccaccatgcttggctaatttttgtatttttagtaaggactgggtttcaccacgttggtcaggctggtctcgaactcctgacctcgtgatccacctgcctcagcctcccaaagttttgaattatttttaaaggctccaaggagagcttctgttttgacagaaactctatcaagatatcatccagcccagtgtggagacacaatcttcctttaacacaggattcaaaccacatgcagtttacttccgggtatctctgtcaggatcttgcattcatttcccactgcctgatgtctggttggtggaagctgagacccctgagggatcagaacagatccagggagagctgggagtgctacttttccatgtctggtctgggttttrgggagtgatgttcccacagaaggcttaagctggaaaatatccatgatgagtccagggtacatttggtggaggtttaaatactgtgtcaagatgcatacaaataaacttaaccgtggtgcatggcagaagatgtctctgggaaactgagtgaacaagtgaaaggaacacaagagaacaaactcttaagcttttttgtagagaaagagtttgtgctcgaaatagggacaagttacagggtgacaggcatgactgttttcagcagggagggcaagcgaaggtgggtgagcttgtttgttgttgttgttgttttgaaacagagtctccctctgtcacccaggctggagtgcaatggtgcgatctcggctcattgcaaccttcgcctcccggattcaagtgattcttgtgcctcagcctctcgagtagctgggactacaggcgcccaccaccgtgcctggctaatttttgtatttttagtagagacagggttttgccatgttggccaggctgatctcaaattcctgatctcaagatcctacgcctacacctcggcctcccaaagtgctaggaccacaggcatgagccactgcatctggccaggtgagctgttttaagaccacaagatcaggcagacatgggattgtcagcaggatttttaccatcaggtaacagtcaatgtgttcccctccgcccaacttccctcactgtactcaaggaatatctgatgacccaataataaaaacttacaagattaactgagataacccagtttaatgttcaataaggtcccactgggctgcagaatacagaaaaattgacccatataacttggcatttgtatcttttctgcaaagtctcaataatgtataattttaaaatctagaagttatggagcattgaagtagctgagctttctagaaagcggacattgtaatgaataagcaaagcaagaaaacctcagacattggtaccagctctattttaagcagaggcatgtggagctccctgggatacttggaaatgcacattcccaggtactgcagaggctgttcctatgaactatgctaactcaatcttcagcacagtcttctgttttctgagctctagagcaaggttggcaattttgccccatcttacctgcctgaagccagcacacctgagggcttggcttgggctggaagatccacttccatggctggaggatgttggccatggacaggaggccttcagtccttgccagatggacctatccacaggactatgtgtcctgatgatctgggagctggcttcacccagagagagtgatccaggagaaagcaagaaagacgttacagtgtctttaggacctagcctgggaagctgtattctgctgtttctttgacatcctatttgtcacctgatttagccttattccttcaggaaagaatggctggctctttccaaacagtatgtatgggtgagggatcctcattcttttctgaccccgggtggattagttgtggctcctggcaatatccyggatctgactggttaacttagtgagaaagggagcttggcagacggctaccgcagagttctcagaatcaatagtgaagctggagaacaaggctcagaaaacagggaggagcccaggaagctagcagcctgaaccatggtcgaggccaggccacaggaagcttttagtaagaatgtggcctgtggtccacggccactgagcctgctaggcccttccagctgtggcctctgcaacagttccaaagcatccctggggctatcaccctaaagaccaacatcttgggtaggattgatggttggagtctgtgtcaccccctgacaaatcctaactgcttggcggagggaatgtgagtgaacaggaaggacctcccctgggaggtggagcactttggagcagcagctgataggtaaagggcacctcaccagcccacaaaggacaaaaggttaccctgtctatactgagctcaagtgtcatttttgrctacaagtatacctggtattacagtattaacatactcctgaaaagttatgttaattggaattgtgctttatatacactgggtaagcttaatacctttcagaagaccatagctaatccttttgtgaagcagctaatctttttagagaacaaatggtcacttcttaactatttctttcaagattaggagtctattgtgttttctcaaggcagagtagccagtgtttaagttttcccttttgctcacggtgaggaaatgttactttatagaaagctgcttgcagcctctcatgcagaatgaaaaaacaatgagtttttttccttcattttaaatctccactgtmatcaactgtcttttgcaaggagtacagattgttgaaaattttaaagagcatgtatgatttcattcttaccagcaaggctgttttaatatgagcatattttaaaactaagaatggcaggatctgaatgagcaaagaagcaggcgctgtgagttgttctgcggcaaagcacatttggacattcacctccaacatttctgtttttcttctgtgaggagctttgagactatatatagtggaggtattttgttcggtttcctagagttgctttcacatttcctggataacagcatgccgggagaggaggctgggaggctggctggtgtgggcgtgaggagcaagcctgagaggtttagactctgctccaccaggtctagcgacgggctctgtgtgtccgaagtagtcatggtggccacaggaaaggagacgcctagcaggggaggaactagacaggggacgagttgggaagctgctgtcacaatcaaagaccagaggggagaaagaggggaagtgagagagaccaagggaaagagagttgtctttttttttttttttttttttttttgagatagagtcttactctgtcacccaggctggagtgcagtggtgtgatctcagctcactgtaacctctgcctcccaggttcaagcaattctcctgcctcagcctcccaagtagctgggattacaggtgtgcaccaccacacctgactaatttttgtatttttagtagagatggggtttcactgtgttggccaggccagtctcgaactcctgacctcatgatctgccagcctcggcctcccaaagtcctaggattacaagcatgagccactgcgccaggtctctcttaatccaagagtgacaatggcaggtaggtacactggagagtgacaatggcaggcaggtacactggatgccccccacccccccgggggttgggttctcgctcaccattagggagatagcatgttgaacagtagcgtatttctccatatgtctaactcggctactttttcctccagcattggaacacaaaactatcattggctgatgccagatgaagtactggcttgtattcctttaaacaccagaatcctactcaatgtggcaagacaytccscatgagagggcatagtgggtaatggtggatccacttagcggggttgagttttctcagttttaatgtatgtaagatgtgggcccatattatggttagcaaaaccaatgctcagagatggaaactaagttgttcagggccatgtaaccagagggtagtagagctgggatcaagccccagtttgtctccccaacccagggcatctctgcagacctgaacagtccccctcctcatggagaggagccttctggagggggtgctgcctgggaattggggcagctagttttgtgccaccttctggaattgcagactgtgatttggaggttgtcacgtctttgagtaaaatacacagctgaagaaaactcagaaagtaacatttttgagtgggtagtttagtcgtatcagtgaaagggaatcactttcttgatttgattgtacttttaaaagagaatactaatacctatttacctggtgcgttttaatgaatgactcattatttattattattgtacagtattgttgaaagcatgatggctttcttttaaacagctttttccatacttcatattgcatttaagtataaaacacagaaatcatcatcgtgttttggctaacacaattgatgcactcttcaaaaactattagagagtatattgatttcctggagataagaaccctgatttgctttttttcttcaagattgtaaattgcattagtggtgaccgtcagatttatagttaaagcaaaacttcaagaggggtaaagtggatgactcacaaacctcccgtcatcagtgttcactgtttacgcttatctggccagcctgtctcatgcagcatccaaacggactttaaaattcctttaatttaacacagaaacgttctctgatgagtttctgttttgtttatctggtcatctctgtgcccttgtttcctgtcctgctccctctttcagtaaatcttgtttgctatcaacaggcctgtgtttgtttccttggagcttggaattcctgagcgggaaggaaatactaggaaacttaatgcagatatgtaattcttttactgttttcaaatgtacagggaccatcggttgaattgatgtatccttccttcttttggaagtgctcagtgccagttcatttccccttttgcatagctttgatggcttaattccacgcacctagacccatgtctcctggatggaggacagattagctgtgctgggttagactcataggcttatctggaatcctgcactcatctacaacgctgattgagtgaacagcaaacatcgtactgtgggtacaaacttggaggtgtttacttggaaatttatatctaccttccaaataacatcttggaaagcacactggtagatgaggcctcattgatgaattcacttagaaaaacatcatagcattcatttttatatcaatcttcattcagcccaatatttgtagctgaacaaaacactgacaacatgtcagacacgaaggccatggtcagttgcctttcacacaggaaaacaaagattagctgtgtagctacggaaagcgaatgtctgttaagtacagaggttgtagttaacagctttatgtattcaatttgtttgcaattgacaacacctcattaattgtaagcccagtgacactgcttgctgtttcaagtcacttttaaattacacacgtgctacttaatcttaaaagcaaaattaaacattggactggtttacatttcaagctacaatatggaaccattgtatttggaggaatgagtttaatatgcattgtaaaataaaattagggggtactttgcattcacagcggcttatgtaattaggttcagtcaactgtaatgtttcaggttaatgtcttccatgatgtatgctgtgtaaatagtgaacttacatatcccttaatacatctgaattattacataaatccttaatattaatataataaagtattttaagcaaattacttggaagtgtgagttgcatggcaagtaggtaaaactgatttatttttaagagatcagcaaagataaacatttcatttatttaacaactacagatatttatcaagtctctacctggtccaggtacagaggacacaaagatctgaaaactatagttaccgccctcaagaatctgctaactgagtgtgacgtttccagagggttccctggaatacggatccccagttccctgttgggcgtaggcaggasagttgggagccacaggctgcagcgggtgggttctcttgagagtttgtgggtagagttcagaaggcctgcaaatctagacggagaaaacatttgcacttttatttccaagtaattggcttcttttgcaatcctacatatcctctatgcctttaaaacattgtttttaggcctggcgtggtggctcacacctgtaatcttagcactttgggaggctgaggcaggcagatcacttgaggtcgggagttggagaccagcctggccarcatggcaaaaccccatctcttctaaaaatataaaaattaaccagatgtgatggtgtatgcctgtaatcccagctacttgggaggctgaggcaggagaattgcttgaacccgagaggcgaggtgaaggttgcagtgagccgagatcacaccattgcactctagcctggacaacagaggcagattccatctcaaaaaaaaaaaaaaaaaaagaaagaaagaaaacaaaagcattgtttttagattttattttttaaattacatgcttggagtaaaagtcactcattttggcgtacagctccatgaattttaacaaatgcagagttgtataaccagtaacactatcgagacatgcacattttaccaccctgcccccgaaaaaaaaaatctgtcatcatgcacctttatgtcagaccctgtaaccccacccctaccctggtatccactgatctattctctatctttgtaattttgccttttctgaaatgtaatatatgtggaattatttatagccttttgagtctggcttctttcacttagcacacggatttaagaaacatccttgtgtgtatcaatagtccattccattttatggctgagtagcattctgttgtatgcatgtagcgcagtttgtttatccatttcccagttgggggacatttgggttgtcttcagtttgaggcacttaatgaataaaatggctataacatgtgcatgtaggtttttgcataaacctaggttttcatttcacatggataagtagataggatgggattgctggctcacatgttaagtgtgtttaactttataagaaacttcccaactactttctgtcatgggttcaccatttgcttttccaccagcagttgctctgcatctttgccaacatttgctattgccagttatttattttttatttatttatttacttttttttttttttgagatggagtctcactctgttgccaggctggagtgcagtggcgcgatatcggctcactgcaacttcagcctcccggattcaagcgattctcctgcctcagcctcccacgtagctgggattacgarcgcgtgccaccacactcagctaatttttgtatttttaatagggacggggtttcgccatgttggtcaggatggtctcaatctcctgacctcgtgatccacccgcctcggccttccaaagtgctgggattgcaggcatgagccaccgtgcccggcccgccagttgttttttcctttgtaagtttttgccatccttacaggtgagtagtagtatttcatgtcagttttaatttgcatttccctagtgactcacagtgtccagtatcttttcaggcccttatttgtatataaagttgtttatctcctttaatagtatctgttcaaatcttttgcctrtttttaaaattgggttgttaatgctatatattttattgtatgcaattaaaagcattattctgatgatatttccctaaatggcccaaaggattcgtgttccagaaaatattaagaacctttgaaagacacactgactttaaaatgttctttacatttttgccttttctcgtgacacgtctactttgctcaaagtccgcctcaaggcagaagctggcctgtgatagaatatttcccaccccatctttctttctttctgtttttcgtatatgaagagggatttccaaatgccaagtgtgggcattcctatgcccccttcccaggagcagcaagccatttctctattctgatttctgaaactctaccgccccctttgcatcgttacccaaatggaaggaatcctaggttgtggggaaaatgtgaactaacatattccagaaaaatgaccccactccaccttaggaattaggagtttttttcttaatgcaggacaaaartctgattgtgtattttatcatcatttatcatgcacattttattactgtttatctccacaacaccatgggcttgatatatttttctgccttaatctccatttttttcatcaaagcttcccagtagggactcatctcctagcaaaaatggtttttaactatttgggatatttttaaaagacttttgtggacccttttatatggtcagccaagttttgacttagtcatcactcattctttaagtcaagtttcaataccgtcttcaatggttaacgtttcttggaaccataaagcttatttatgatgaatatattaattttattttgcagttcttctattaaggaatataagaaggaatatagggcacagaaagtggttctgtattatttttatttgaattcaacttatgattgtcctcctcgaatcaaaaagaaaaaaacattgaaaaagcaaattacacgcaaagtctatattgaaaattaacatgccgcgttgaagaactctgccatgtgttaattattgatattgttgctttagaattagctttatcgataaatggatgtcctaaattttatatttggcctattgtggccaaatatatgcaaacttacgttaagtgcttatgttttggggtataggagctataaaaaaagattgttcccttccatatgtgtacagttcttctggggaaatgaagacatacacaggtggaacggtaagaacagtggcgaagaagggctgcacggagtttctctccagccttttgcgcatggcacgcaggctcatcattgcagctgcagttttttactctgctttccctgcagcaacagagacaggagggtggagaagggcgcctgtgctcttttgcagctgtgtgtgctcatgccaccctcccactcaacactccctgctcagattcctcacgcagcagtgacaaagtaccactcactcagtggctcaccgtcagagaagcctgggcctggcctggcccagctggttctctgctcatcgtctcacttgacgaagttgacgggctgcagggtcatgtgcctttccagaggctcaggatgaattcactcccaaactcattcaggtattggcagaatgcagttccttgaggttgtaggactgaggtctcagcttccacacaggctgtgggctgggggaggtcctcagagctagaggctgtcccgatgctttagcgggtggctccttcctccatctttaaagcccgccatgtgctcccagtctctctgaccccctttctccctcatctctctggctctcctgctcctcgtctgcctttaagggctcatgtggtaacacagggtgcacccggatgatccaggataatctccctacttacagtcagccgtttagcaaacataatcccatctgcaaagtcccttcacaacggtacctggattactgtttgatggaaaaaaacaggactggaaatcttgggggacatttttggattctgcctaccaccccctccatacacacataaacagcaaaatgacaaaattcaaggctctcctgagtgactgtttgcagcaaagaaagttgtttccatttcagagacaatatgtgctgagataagtttgtgatatttacacatttggtgtttaatcctcgtggactacattatacatatctttaggaatactctttacataaattaagataattttctctttcctgaaaacataacagcatgccacgcgttctggatgaaaatgaggaactgtttacaccatgggcccaattaaactctgygagaattctgatgtgcgataaaaatgtgctcagatgtatagcatattttaagtttcctaggactttccttgcaagcataatcacaaattaatattaaaaagctatttaattacaatatcaagaatgtatctaaggctccctggcatttaacagagaaagttatgctaaacatacatcattattttcctccatgcagttgtccagggtgacctctcttagctgggattgacaaatccaccccaggtggcagagtggaagagcttggagtttggagttagaaggtctggattgaattttctctttccaggcccctaccgaagtcctgtggtttccctaaacctcgatttccctaatgggcatgataatcctgatttgagatttaatgaagtcatatcaaagaaaatactttgtaacctataaagcacagatgcttgctaaacaactcctgtaaacatacattatcccccttccccccaccccccscgcacacacacacacacacacacacacacacacaactggtgattgtaactcactcatctctctttcccacagttgttttgaaaacttctgggtttctgaaatgaaggttctttgcagaggacaatcttggaaaaaaagatgaagtttgatttcccttttttctttgcactataggggtgttcactgaggttgcagagcaccaaccatgtctgcagaggagttcacacctcactggtgttcattgtattgcttcaccgttgagagcctgaatgtgaaccttgttgtattaaggtgatattcttgtccttcatgtgttagaatatctatttgctttgaagagagagtcagactccctgccttttgggacatggctttgagatctgcctttcagtaagtaagacgctatcctcaaattgagctgggctacctctctacatgggaaaacctaagtacttcacagaaagctcggtgacggtttgagtttcccagaatgccgcactcatccccaaggataagtcacgtctttgggggatgatggggcttcgacactggacacgtggacactggaccggaagttagaatccagtctcccagccctcaaccccatgctcctttccatggcgaaggaggagaagctcgccgccaccccactggcctgctctgctgaggttgtggagcaccgggaagcaggggccgagccttccccgctctgtgcctgggggctctgggcactgtctacacctgggaggtggtcagcatatgtgcgtgggaacttgctggaaggaaggaatgacccttctagccatggaacggtggtcatccgtgagccacggcctcaggaggtgggttcccttaaggctccrgctctgggggcagcgycccctgggagcstccatttttaagcctgtgaagaaaggrctgctgacgtttggggcccccgctatgagcatagcctccactcctccccaatccctgtccgtgcctctacatacctctgtggcatttgcaaacccttttcttagcaggtgctcccatctgtgtttgcccttctctcctcccgtttccatggagaggctggcaccaggacgcgtgactgacagtgctgtctcccccagcagtcccctctgagtctgtcgggtgtgggctccgggctccaccctgcttcttccttagcccgctctctgcccctcccactgcccaggctgccggggcttccagctcccgtggtgcaaacgtggcctttgctggcggcaggatgcggttgcgtcaggagtaagcagagcttttgtgaccaaaatcaaccccggggcatctcaggctctagcgctggtgggcgtgtgagatcatttcagcccaacccacatcccaggcttgaatcccattaccaggggcaaccgatccttcttgtcctttcccagattggtgatggatgtccactgtgtctccatgcagctggccactctgtggacagctgtttgtgactcagctcctcccagcctgagggcatctgggccctgcaactccatcctttgctcccctttcttcccgcggggaccctttcatctccctggcaggaccctgtctccacccgagggcacrttctctgacctcttctgcggagtaccctggcttgatgacgcttcctgttccttcccagggttgtgctgggggcatcagtctttgaacagtccctccctgagggctgccgtgtcccctcagtgcccaggcacatcaagcactgctacaaacccagacattcacagggacccctccacctgaagtccaccataaggtagaagcttccggaaggggtgatgcaaaggggtcaaacattyagactacgcctcagagctgcatgattccttcctctaactgtgaagcaaatacagcgatttctctgggtctgccatcgaggccttcttccctctgctctcacctcaggtgccttcctaatgtgcaggtgacgattgcctctgagctcaggcatgcagcttctgggatgcactctcctttcacggcaaagcattctgcataggaaaaaccgtctctgcgtctccaagctgtggcctagcccttcattcatcaaatgggatacaactttcatttcttattaaaatctggaagtcactctccatttgtaagatatcccaggggttgatgtcatcttgtaaagggggacagtgccattttctatcttacactttaaaaagacaaaaccactagctacaaacatcattcaccacagcatgggagaggcaaccccacagcaaaggttatgtcatgtttcataaatgggtatggatttgggggctggtttttttaataaaaacatattttggtactttggaacttgacataatttgagctgtttatgttgtagatgttatgaatagatgttatggtattaattaatagtgtgtattttctatgtctgggcttgcctggaccgctggtccttgcctttctttctgacacagaatttccagggcctcaacctgcttctgtctggaagtgacagcccactccacaggggtcttcagataggggtagaaggtggtgccctgggctctcctggctctagagaatctggctctagaatcacgaagccttccagcatccccagcttcccccttgcagtaatcccataagggaagcgttgtcccattttacagagagtccgtggggctgagaggtgtcatgaattattctaatggtagtaactctattggagaggctgaaacccggggctcgtggatgttgtgacccaccccccaccagaacctcccatcctgactcactgaatatttagtaccatcgtcccctggaggatggtctagttggcaagtagctgaggatttttaattctaatttagtttaaacatggctgtttgttgctgttgctctctaaagggccttattaaagactcttgctgcagtgaaggtggcctgtctaggaatcgatatggatgttgagatctgagactctacaacacccccaatctcagtccttctcgctccataggcagttccattccctgcagatctaactctgagattctcactcctgaaaatgcctggacaataaataaatccaaggtgaaggtgttgatgccagtgacctagctgcatcattttattcatggcatcaagccttcaagaatgtggcttaacttgtatttattcacatgataatggctttttataaatctgcatctcttcctcccctaggaagaaaaaaagggcatctcttcatgagtcacttgattaaaattcctctccagtactctgtaccatccactcatactggaattgttgaaaatcaggtgatttgcaactccacacttgcccaaattaaaccatgagtggaattgacaatatgaatcctgaattttctgagctggaaggaggttctagtgattacccacaccagggatggcattttacacatgaagaaacagaggccccagggttgtttctgatccaggtaggatcaatatctcggtagagaaaagggggaatttttttgcttatactttttaaaataagctacttgtggctgggcgtggtggctcatgcctgtaatcccagcactttgggaggtcaaggcaggcagatcacttgaggtcaggagtttgagaccagcctggccaacatggtgaaaccccatctctactaaaaatacaaaaattagatgggcgtggtggcacatgcctgtaattacagctacttgggaggctgaggtggaaggatcgcttgaacccaggaggctgaggttgcagtgagctgagatcacaccactgccctcaagcctgggaggcaaagcgagactctgtcttaaaaaaataaaagtaaaataagctactcgtaaggggtgtgtgtgtgtgtgtgtacatgcatgtgtgtaatctctgtggcgtgtgacctggatatattcataaaggtgtaagaataattcaagtaggtaacgctctctcacattttttaaaaaaagaaagaaggaaaatatttattccttatatttcaggatggcagtcaattagggtgtgatgtgacttaaaggtcacaggagaccttgcctcttgccaagtgctgccacgactgtgtggaaaatctcttgtgtactggggacccagtttctttcctgtgaagggagttgacagaaataaaaaagatcactgaatgagataatcrttgtaaaggagccagcatagcagccccttaattagggggagtgtgctgtgtcactgaaacactctttgtttccaatcagggagctctcactgatcagtcaggactctaattgttggatagagtcaacaattagaaaaaaagttatagtctcctaggagacatagacaagtgagctgacagggtgggctcagctcaccctgtcccagcaccttgggaggagtgtcaaggcaaacgacaggcagctgggtgcagtggtgtgagcctgtgattcctgctacttaggaggctgaggtgggaggatcgcttgagcctgtgagtacaaggctagcttgggcaattttggggagacagaataaacaaaaattgactttttttaaaaaataagtttgtattttcttcaattcaaaacatttttagaattgatattactttttatagctttaaggcatatttcacatcgatattacttcttaatatatatatttttttgctacagatttggagtgtgtaaattgataaaattagtatcaatgctattgtaactacctggaattggttaaatagcagcagtgccagtcacctttcttagagtagagattgccagcaggcaatatcttcatcctcaggacccaggtctctcttctctgaccctgcctggaccctgacaatcccagggcgctctgcgttggaatcartttggatgtgtgttaccagatcttcgctgaagcagggcactctgcattggagtaaatttggatgtgtgttaccagatcttcgctgaagaacgcaaggaacccagcatgcaaagctggccactacagttacatttttccctccctttgaaaaaaattttatgaatgcctttctgaacaaagaatatgaactaaccctcatcattcattacatttaaatagcataacatgccattgaaatccttttccagacgtttcagcaagtgaaatcatttgtggttcatgttatagctttttcagtaacatgamttgagaaatttttcttcttactaataaaagggaatcattcccgcagttaaagaattcatcttggaatcctctggtttttcatcatgctttacttttaaaacttcccgttctgctgtagcaaacttcccattctgctgtggcaaacacgagtgyatattagttttcatctttggaagatgaatgaagtatgtgacttttcaaacagggatctcacattttaagtctagttattccagaataaaaacaagccagaggcccaaacacaggattcttcactgtcgttagcaatttgggcacaaatctgaagggccagtttggtgcaggtgtgctggaggatacatggagraaaaaaaacatgttccagtctagttctgatacacagaaattgaaagagcaacccaaggagttgggttgctcttccacatggtcaggatgagccaaggcttcsgggtagggcttttagggcaagtgggcccmagctgagcccagcaggggcagggccaagatgagcagaaggaagagataggctctggaaggagaggcaggaggaggcaggtgtgggcaggtgcaggcagatgtgggcaggtggaggcaggaggagacaggaagaagcaggtgagggcaggtgcaggcagatgtgggcaggtggaggcaggaggagacaggaggaagcaggtgagggcagatgcaggcagatgtaggcaggtggaggcaggaggagacaggaggaggcaggtgagggcaggcgcaggcagatgtgggcgggtggaggcaggaatagacaggaagaggcaggtgcaggcaggtacagacagatgtgggcagatggaggcaggtagaggcaggaggaggcaagatgaggtaagaggagccaggtgcgggcaggtgcaggcagatgtgagcaggtggaggcaggagacaggaagaggcaagaggatgccagctgcctgaggtggctgacagcttcacccagctgaggttcttgcccatcctatacacccatcccaggacctctctctaaacactctgctctgactttggcatttccttgaataaacaccccagaagctcctcgtctccttcatacaataatccagtctgcctagcccagtgaatgagggttctaccagagcccagccaacccctaggacagctcacatcccaccatccctgaggtactgcaggctcacagccttcctgatggaccacacctgtgcaccgggctggtcccctgcatgcacctctcattcaagttgccttcctctgggaagcccccagggacttcttttctgtcctgcactggcagagtccccctgcttcccctgcacccagcacattccttccttcwtcaggtgttgctgcacctctgctgctgggcaggcttggtgccaggcactgaacacacagctgagtcccagatggatgtcttagtgtcaggagacagagtaaagttctaggcctattgtccatcgtttcttgagacagggtcttgctctgttgcccaagctagccttgaactcacaggctcaagctatcctcccacctcagcctcccgagtagtagggattacaggcttacaccattgcacccagctgcctgttgtctgccttgacattcgtcccaaggtgctgtgacccagttcatttgtctgtgtcccctaggagactatgactttcctgcaggcagggttgtaccttctcatctgcaccctcagtgcactcaggcaggtagtgtccagaaaatgcttgaagacaagaaaggttcccccagtgagtccatgcagagcagaacggcaagcagggcaggaggcaccaagctggcagggcagggtcttgtcccagatgtactgtgtcctggagaatgatgtgctaaccacatgcaggccgcctgggatggagaagagcagtggagtgagtcttccctgcctggtgggaggtggaggccctgtggcatctgaggtcaaggtcactgccactgggctggcagggctatttctccaaatgttagaatcaagaacttcagattaaacttcccctctgcctactccttccccatgtcagcattgctgaacagctgccatttagcaattgtgggagcaacacctatttattgagggtccattctgttctgggccctgacacagtagccccaggaggtgtcacaaatgcaagagtcaggcaggtgtcatcatacatgagccaggggagccaggtgggcctgagccgaggggagcaacacctatcccggccacaggggtgccctgctcaggctcagcccgctgtgggctcacaggagcacrtcttctgatttttcaagagaagctgagcacctagatttttgtgtgaaatgctacaatttaaaaatataaacaatgaatgtaaacaaatcttacaccaggtaggctaaataggagccatttcctagccgcacttggtttctggacagccagttttccaccttgattgataaaagaaataaccattcttggttttttatttacttccagatctccattcccctgctctttctacaatacaactcccaccccstccatctcactaaagctcccactgatgctcctgaagccttgatctgtacatccaggcttccttggtttgtggccacaaaccccgaatccctcactctgatttgcagagtaggggacaggtgagggctgggcccagggcagagccaccagtgagaagttgggcaacccttgatctcatcagtgtggcccagactgtgtcactggtaagggaaaaggcaaagaaaacaggcaaaatattgatgtttatctgcagagctgaatgtctttttatctcatagaaaaaaaaaataggtcagcctcccctgaaatgcagggcaagcctcctatagtccagtcaagagcatttcgagtgtcacttgccatggaaggaagctggagaccacgatgtcagagaaatgagaatgagagaaacagaaggagagctgtgatatccaggaagatggtttaagcacagggaaccaaggaatctgtctccatctgctagcaaactgaggctctaatcactatcagaaacggaagaatgttgaggaaaggtgatcagaggtttgggtgctgttcatcaacctgtctaaaatgaaatttttaaagtatgtttttctttaaattgtacgacatcctcgatttataaagcaaatcaactracaaagctatgcctttgtgggcactcaacttgatcctttgtctttaggttaaaaaccaaatcctacaaaatgtccatcaagggatgaatgaataaccaaaatgtggtcatacatgcaatggaatgctgttccgtcctaaaaaggaaggagctcctctcatttgctgcaacacggatgaacctggaagacgtactgagtggaataagccagttacacacagacaaatactgtatgattccactcacatgaggtccctagagtagtcaaatttgtagagacagaaagttgaatggtgggtgtcaggggctggagagagagggatggagggttatgtttaagagggacagagtttcagtttgggaagaggaagaagtactggggcgaggtagtgatgatggttgcacagcagtgtaaatgcacgtaatgcccctgaactgtacactcaaaaagggttgaaatgttcaatttcattttacacgtacattaccacaatttaaaaaactcatacaagagcaggaatttcagggccgcatctgttatcataaaaccatggcactgttgagactcggaagcaattttaatcacgtgggccaggaaaccggtgactttcttatctctttgatctcatggaaacaccaacactgttttcatgtgttttattcttctcttcccagctctgccagacatccacacatcctgtctaatgaaaacwgtaagactgtttaaactccagaggtcatgtaaggaaatcattcctaaatgtgtagttcagagtaaaaagtgctcttgtygatagcaacttttcataaatttgtttttctgagcgtcacagtggtrtttgttcatctctaaaaatctggattgtttcaagatgatttttaaaattatttataaggaacccccaaacttgcctggctgccagtctctcacactccctgtaaccctcgagttgaggagtaggttgctaatcctctcctagagtgtctctgccaccagcctggaaggcactggggctccatgagttcctgcagctctttgtctgtgcatgcgagaactttcccgtcgtcttctcccatgcaggagggagacggctacctgagcctctgagtctaggttgaaggaaggtcggtgaagaccccacccacagtgagacaatgcggtggtcatggggaagctccacccaccaacaccccaagccccagaagttctgctgcctggaatgcgcaggaggcttccagggcagctgaggtgactctgatttcatttgctcaggcagatggtattggagagactcagccactttattctgcagttggtcagcacttcccaaggggattttattggtcttctccaaactctcttaattccagaccttcccagcctcacatttgctagtctcagaacagagctaaggaggcctgttcctcacgagctggacaggcagactggaatgaccgtgcccactgctggggtggcagtattgggcatggtgtatgagtgtgtgtgggttgacctggctgtggactctgggtggaaggaggaggaagtagttcctatgggcattggggctgggaagtctaattagaagcaatagtgttggcccaacaagtggggcatttgtgcacgacagaacctaagggcacacaaagttgctcctgtcagggatgtgagtcagccaatggccaagctttgactttcggccagggtggagagtggcagcaaatcatggttctgctgctggaaggactgaagtccagggaatattactgctcagagggcctgataagaatccagggaccagaactggggtataaagtaggactgagaattaagaggaagaccacagctgttgtgtcacatgcagcatgatagtcagggatggatgagcacctctgggaggtacttgataaatattgattgaatggctaaatggtgggtgggtggatggatggatggacgatggacagatggatggatatgtggatggatggatggatggatggatggatgcatgcatggataagtggatggatggatggacagatggatggatacatggacagacggatggatggatggatggatggatggatggataagtggatggatggatgggtggatggatggataaatggatggatggataagtggatggatggatgggtggatagatggatggataggttagtgaggttagaaaagtaggcagaaactggatcatgaaggccctataaggaktttgcacataatagaaggtcatttgaggagattgagcaggagagtgacaaatggaactgtgtatttgaaagatctctgtggctccacgtggatagcaggctggtgtaggtacaagactggaagcaagagactagctagggggttgttgcagtgaaagaagatagtggcataaaattaggtaggtggcaatgagatggagagagtgggcagattccacacatttttagaaagcctgaagatcaggaatcagtgactgttctttagatgtgtggggaaaaagagggcggcatctagagtgacccccagtgggctggacagctggggggatggtggcaccttctatcaaaataatgggggaaaggaagagaaggctagggatggatcgttgtgactgtcatgggccaggagtgccttgtggcatggatctgtttataagcctatctccttcattggacctcaggaaagaccctccagcttcctcacccttcccctgcacatccagagcttagtgcagtgcccagtacctggttggttttcgaagttattggactaaagagtgaatatggatctgggattagacagtctttaagatcattccctgcttagttgtgctgctgtagcaacattcatacatgggggtgagaggggtgacttgcggaactggcaactcaatgtggagaatcttccagggcaagcaggtagaggagaaaaggcctctgtgcctgacctcatatctgaagcccaaggcaacatgccagccagactttgggctccttgcctgtggacacctgtgtcttactgtctgctctgggctctcctttgaggaggcctctgtctcagaacaaatgtcacaaacaatgaatgccatgcttcaaaggaagctgatgtatggagcgtgtgtcaccttcctctacaggaatggggtttggcagtgatccaaagactcactgttatgacatgttctcagggaagtaggtcatatgtccccagggtattcagagaggcctgtgagtgtgagatgtttgggctgagcagggctttcttcctctcaaggctccaaagggcgggccaacaggtcatttggtttttctcagtgatatgttttcctcctcaagattcatcacccctctctcctcctctgcttgttctgaggcaaatggacacagaaatacattctctgttttatccttcatcgttgctaacccctgtggggtcgctgacatcatggagttctcttctggtcgtgcatattgtagctcatgaagaaaaggttgtaaatcaccatttcaggatgttctgcctttgacctactatgactccatggagtatcccctacagagctctctgtgggtctctgagaggcattggtgtgtggctgcatctggcaccttgaggtgaagatgggccaggagtagatccaggaggagcacagcagagcataggaggtggctggagaagaaggtcagatgctgtggggtcaggaagtgcctgtcagagaagcacctgggagtttgtttctggctgaggccagcaaggggtgcaggctgcatgacttccttcttctgaatcttcctttcagggcccaagtacaaagagaaaacacacatcaaaatgcttggagaatgaatggctattcgtgtatataccatttcactgatattgataacttactatgtggccgatcctgctcaagggcctaggaagaaaaagaactctcagccctcattttggggcaaataagtaaggatatatatacaaggatgtttattgcggcaaaaaataaaacactaaatttataatggcaaggcctgtcaacagggaaagattgaaaagagattgattctgcatctgcatcatggagcagtctgcagcccctgggagatattcatcagacctcgcaggctggcagggagggatttccaccccgcattggtaagagagaagagcaagatgcgcttgcacattgcacctgtgcacacttgctcatctgtaattgtgggtacagggacaaaggtgtgtgcagacacactgcaggtcacaaagactgcatagaggcatagagtgaaagtgggtacagaaaaggggaggagtaggaagaaaagaaacaaggaatcacaggacacggcagctcgtgyctgtaatcccagcactctgagaggctgaggtgggaggatcacttgagcccaggagttcgagaccaacctgggcaacatcgtgagaccctggctctgctaaaaactaaagccagatgtgatggcttgtgactgtagtcctagctactggggaggctgaggcaggaggatccctcgagctcaggagggcaaggccaccatgattgtgccactacactccagcttagatgacagaatgagaccctgtctcaaaaaaaaaaaaaaaagctatatgtttttaaatatcatttatagtgtgatttgtgtaaaattgcatagacacagagaagggtttacgccatgggacagccacgaaaatgtgatagcacttcagtttgactttaaaaaaaatactcttgtgcattgttcaattgtttttataatacagtgatcacatttatttagtgattggaaaagaggttatattttagttttggaaaattaaataagtgtagatgtgaaaacaaaataaataamaattctcagaggtatstttatctaaagtgagccagattcacgtgcattcaaaactcctctcctaggaaaacctcccctgattgtcttcttcaactgttaggaaatagtgttgaggtgttgccacaccctgaggcccattctcccctatgctgtgtgttagaagtctgtctcttgctctgaagaattcaggtttgtcccatgggtttacattttatttatctcttaatgcttacatcctctgatgcctctgacattttaccttgtctttggacaaattttcacaatgtttaaaaggtatgctttaaaaagatatgctcttacataacttttctgtgccyggctattctcccatatgttaaaggaggcctcctttccctggaccaccatgaccacccgagggacttgcaggttgccagggcatcacctgtcatgttcttttatggaaagaatctggactggagcacatgagctcaagaaaaatctcggacttaaaattcagtctacaagasaaactgacattgtcctggacctgtgtaatgggcaaagttcagagtctctggggtacagggaagtaggtcagggagtggggaaactgaggcctgttgtgggacttctcagcccaccctaattagaggggttgagccaaccccccaataaataccttctcatgtgacagcatgggacgtgagatgggaaaggcccatcagctaaatgcgagccacaccgtgaaggatgccccatgccatgcccaagggtttgggttttctcctaggaggggtgaagagctgctgaagcttttgagccctgtagatgcttagatgtgtgttgggccactccgttggcccccaggagagcagatggggaagggtgagcctaggcttagaagaccagcacagagtcctgagcttggggatgtgcacacaccatcaccccctcctttttttttgtttaagagagactttattttagggcattttaaattcacagcaaaattgagtggaaggtagagagatttcccatatgccccttaaccctacacacacacagcctccccactctcattatcctacacgtcatcatcacccagagtccatagtctgtgttggggctcactcttggtgttgtacattctatgcatttggacagatatatgacatgtatccaccatggccgtgtcatatagaatrgttttactgccctaagcatcctctgtgatccatccatttattctccctccctgtgaacctggcaaccactgatttttttactgtctccatagttttgccttttctagaatgtcatgtggttggaatcatataatatgtagctttttcagattggcttctttcacttaataatacacatttaaggttcttcccaggcttttcatgagttgatagttcatttccttttagcgctgaatagcattttattgtccggaggtaccacagtttatttagccagtcacctacattgtgatggttaatttgaggtgccaacttgacaggattaaggaatacctaaaaacttggtagtgtagtattttggagtatatccttccagaggaatttagcatttgagcctgagtgaattaggtggagaaggttcaccctcagtgtgcatgggcaacatccgatctgctggggacccagacacgacaaaaacaggaaaggtgactgtgtcgatctgtctgctggaactgggatacaccctgcctctcctgaccctggacaattccaggcttgtcagcctttggattccagaacttacaccagtgccccaccctcaatccatcccctggttctcaggcctttggccacggactgggaatttcaccaacaccttcgctggttctgcagccttcagacctggactgaaccatgctgctagtgtgccagggtcttcagcttgaagatggcctgttgtgggacttctcagccaaccctaattagaagggttgagccaaccctcaagtaaatcccttcccatgtgtctatctagctatgcatattctattagttctgtctctctggagaaccctggctaatacagattttggtaccaggagtggttctagaggaaacaattttaatttttggttttggagtttctggaattggctctctaacctgtttagaactaaaaatgctggagactctacttctaatagcgcagagagcactgatagatcaygtgcttactgtttgtaaatatgcaaaataaatacatccatactcctaattcaccacttataaaaggcaaataatttagagactttatacctgatacgtttgaacatttgaggaaaaccaaagaatatgccacgttcattggttgctcctagcacggctraaccaagtgatgagagaaaggggtgagctccggtattcacataaatgacctgagtttctacatgtgccctgggtcagaatcttctctcccgtagccacagggctgaaattgctgaaaatcaaacacaagcctttgtccctcgattgactgaattaccgcgaaagctgagtctcagctttgcggaaatttgggatggggaaacgtggggagaccttgatgaggctagagacattgagctcagaaattctgatgagtcttatttgctaaaagtgacctcccctatcccagaaataaatcccacctctgcctgaggggattaactctgatgggactcacagcctcccctgagccagttgccaggcaagacagtgctgaatctctggacccgcccccaccaaccctctttccttctagacctactgtaactagactgaagtcccagcagcccctacaggtgaggtacacagtgtgccccatgaggaggtggttacactctaaaagaactactttggttttctaatttatacaagcagaaattcggggaacatgtgtgggagtggatattaagggtatggactaacagagacataaagggagccgactgaatttattgatatggacccactgagcagagattctgcagttaatgctgcagcgcagggaatttggggaggggctcagtttgttttattggttggctgaaatgtgggtcaaaagatggtccaccatgactgagttggagatgcctgatctcctttggtttactttaaaggaagggatccagaggcttagggaggctggaatgctagagtggatttgtcacttaaaaccaactcccacacactaggagggtccagaagactggtctttcaccaaaaccttgagaaacagatttctggggggagtgccagcatccctgaagagctccgcgattgctcttctctgtaggctggactttacagtgggaacctcagtcactcaattaggaaacttaaatgctrtggggataattggatcctggggtggcaggggccaagtggcagcactcaactgtcaaaggcaaggtggatgtagttactgtaaggtacagcagagcaaagcaacaatcaaaatggtctgactcgtgtagatctatggcactggctagttaatcacgtgtttctaaaagtgaaatagggtcgggcaaagtggctcaagcctgtagtcccagcactttgggaggccgaggcgggcagatcactaggtcaggagatagagaccatcctggctaacacagtgaaaccccatctctactaaaaatacaaaaaaattagccgggcatcgtggcgggcgcctatagtcccagcttcttgagaggctgaggcaggagaatggcttgcagtgagccaagattgcgccactgcactccagcctgggtgacagagggagactccatctcaaaaaaataaaaataaataaataaataaagtgaaatagataggaagcctactaaattcttacctgatctgtataagcataaaactttcaggtcaactgcacaaaagtccaactcaaatcataaaaactgagagtcgtggctcctcaatgaattcccagacttgagccagtttatagacccagaaccccttgggtgaaggagaggctgggttccctccaggaaggactctggtagactacaaagaacgtatactgttcatctttctcccatctttccctaaagggatctatggccttttaccatggtaactgtgtgctggggagagggaaataaacagacaatttgggaactactggacactggctctgaactgacattgattccaggagacctgaaatgtcaccatggccccccagttagtgtggggcttatggatgtcaggtgatcaatagagttttatctcagatccaatttacagtggactcagggggtccctgaccccatccagcggtcattcccccagttccagatgcataattggagtacacatactcagcagctggcagaatcctcacattggctccctgacctgtggagtgaaggcaattatgatggaaaagggtaaatggaagctattagtgctatctctacctacaaaaatagtaaatcaaaaacatgacctggagggactgcagagattagtgccaccatcaaggacttgaaagatgcaggaatggtgattcccaccttcaactctcctatttggcctgtgcagaagacagatagctcttggagaatgacagtgaattatgataagcttaaccaagtggtgacgccaattgcagcagctgtaccagttgtgatttcattgcttgaggaaattaacacatctcctgatacctggtgtgcagctattgatctggcaaatgcctttttctccatccttgtccagaaggcccacctgaagcagtttgccttcagctgacaaggctagcaatataccttcactctcccacctcaggggtatatcagttctctagcctatgtcacaattgttttcaggaatcttgatcacttttcccttcaataagatatcacactggtccactatattgatgactgaaggaacttatgtatacagtgatccatttccaagacaaagtgccttaaatcagcttaggtcagcaaaactacagaagaaacaggatgtaatatgcccctgcttagatagccaatgcctacttgttgtgcccaccccgcccccccagcccttagttgccctcacccaaaccaaaaaaagtttagtctaagatgaaagtttattagcctgcaaaatagctccctttttctattcttatcagcctgcccagctacttaggtcataagtcaaatacttaaagagttaagtattttacttataagctcaggggagctgacaaggattgcagtgcattgtgggctgcmacaaaatgcagcaagacaaccctaataaaaatcacctacagcccctacccaacaatcaataggygatgtccaggaagattgtaaacccatagtactcagcctatagggaaccrggggagggacctacacactaggggataaagtgcttgttaaaactgtgctgggtgtgcctgcttatcagacactcaatcttgcaagactgtcattaaaagtctcacttttgctattccttgggtctctgagtccattctttgggtttggttgggtaagtttatttctcacaatgacaatatgctgattgggcctagagagcatgaagtagcaaccactctggacttataggttagacattcgtatatcagagaatgggaaataaattgagcaaaatttaggtgcctcctacctcagtgaaatttctaggggtccagtggtatggggcatgtcaagatatcccttctgaagtgaaggataagttgttgtatctggcccctcctacaattaaaaaagtgcctagtgaaactatttggattttgtaagcaacacatttctcctttgggtgtgttactccagcccatctaccaagtgacctgaaaagctgctagttttgagtgtgtcagaacaggagaaggctctgcaatagatccaggctgctgggcaagctgctctgccccttgggccatatgacccagcagacccagtggtgcttgcggtgtcagtggccgatagggatgctgtttggagccttcggcaggcccctataggtaaatcacggtgaaggctcttaggatttttgagaaaggcccggccactacctgcaggtaaccactatccttttgagagacaactcttggcctgctgctatatcttagtagaaatgaaacacttgattatgggccaccaagttaccatgcaatctgaactgctcatcatgaactgggtgtgatctgacccaccaaaccataaagatgggcatgcacagcagcacactatgataaaatggaagcggtgtatatatgtgattgggccagaaaaggtcctggaggcataagtaagttacatgaagaagtggcccaaatacttatggttcctactcctgctatgctgccttctctctcttgcctgcaccccatggtcatttgccagaggaagagaagaccaggacctgctttataggtggttctgcatgatatgtaggcaccaccaggaagtggacagctgcagcactatagcccctttctgggatgtccctgaatgacagtggtgaagggaaatcttctcaatgggcaaaacactgggcaatgtacctggytgtgcactttgcttggaaggagaaatggccagatgtgcaattatatactgattcatgggctatagccagtgatttggccagaaggtcagggacttggaaggaacatgattagaaaattggtgacaaagaaatttgaggaagaggtatgtggatagactgctctgagctggcaaaggaagtgatatttgtgttccatatcaatgcctaccaaagggtgacctcagcagaggaggactgaaataatcaggggtagaaaatgacctgttctgtgaatatttgtcagcctctttccccagccacccctgtcatggactcgtgatctaagtggtcatggtggcagggatggaggctgttcatgggctcaacaacatggacttctacttaccaatgccaacctggctacagccaccactgagtgaccactctgcctgctgcagagatcaacatggggtccccagtatggcaccattctttggggtgatctgccagcctcctggtggcaggttgattacaatgcagcaccttcattgtgaaaggggcagtgttttttccttactggaatagacactctggatatggatatgcttcttccacagctaccatctgtggactcatagattgccttatcaaccatcacggcattctgcacagcattgcttctgaccaaggaattcacccaaagccaaagaagtgcagcagtgggctcatgctcgtggaattcactagtcttaccatgttcttcatcaccttgaagcagccagtttggtagaacagtgaaatggccttttgaagtcacagttacagcaccagctaggtgacaatgccttgcaggctgaggcaaggttcttcagaaggttgtaggtgctctaaatcagtgtccaacatatgatgctctttctcctatagccgggattcacaggtccaggaatcaagggtcaggaatggaaatggcactactcaccattactcctagtgacccactagcaaaatttttgcttcccgttcccatgactgttagctctgctggcctagaggtcttagttccagagtgaggagtgcttccgccaggagacacaacaatgattccactcaagcagaagataaggatgccacttggccccttggggttcctcatgcctctgagtcaacaggctaagcagggagttayggtgttggctgcggtgactgatccagactaccaatgggaaattggactactactccatagtggaggcaaggaagatcttctggaatacagaagatcccctagggtgcctcttagtactaccataccctgtgattaaggtcaattggaagttacaacaaaccaatctaggcaggacaagtaatagcccaggctcttcaggaatgaaggtttaggtaactccagataaagaaccatgactatcatatgatgcagagaataaatacatgtgtacatacatacatacatacatacatacatacatacatmtatwcatacacacataaaatcatgaccagtgaggtgcttatcgaaggcaaagagaatacagaatgggtagtagaagacggcagtttatcaataccagctatgcccatgtaaccagttacagaaacagactgttatgagtatttcctccctattttgttaagaatatgtccatgtgtatagatgcatatagtaagcaaagatctttattttcattcctctcttattcttttatcatgtaacaagattttctgaacttatattagtatttaagtgttgttaattttgtatcatagtatttaagtcatgagatataaggagaagagtaaacatcatgcaaggactttttctgaagaaggaattatattcatcagttttcacactactgtaaaaaactacctgagactgggtaatttatgaagaaaagaggtttaattgactaacagttctgcaggcttaacaggaagcmtgactgggaagcctcagaaaacttacaatcatggaggaagatgaaggggaagcaagaaccttcttcacrtggtggcaggaaagagagagagaaggggaaagtgtcaccttttaaaycatcagatctcgtgagaactcactcactatcatgagaacagcaagggggaaatccatcccatgatccagttacttcccaccaagcccctcctccaatttgacatgagatttgggcagtacacaaatcgaaactatatcagggattaatgtgtttttggttgtacgcaggatagctgcatcctgtcaggtgaaactattaccttattattatcttatctggaaattaagtatgatttcaggagttgcatatatataggtgccaagttgacaaggggtgggcttgtgatggttaattttaggagtcgactatattaaagaatatctaaaaacctggtaaaacrttattttggggtgttgtctgagggtatttccagaggagattagcatttgagtccaagtggactagatgagaagccacactgccagcatctcagggactccaccttgcaaacggcttctcaagggactcctcagccacaactgtgtgaaccaatctccctaataaatcccctctcatatgtctatatattcattgcattgatttttgtttctctggagaatcctgactaatacagacatcttggttgcttccaagtttgggcaattaagaataaagctgctatatacatacatatgtgggtttttgtgtggacataagttttcacctcatttgggcaaatgccaaggagtgcaattgctggatcatatgttaagtgtgtttagttttataagaaaccactaaactatcttccaaagcagctgtaccattttgcatttgaagcaataaatgagagttcctgttgctccaaatccttaccagcatttggtgttgtcagtgttccggattttggctattacaataggtgggtagtggtgtcatattgttgctttaattagcaattccctaaagacagatgatgatgagcatctttatgtatgcttattttccatccatatgttttctttgttgatgtgtctgttctggtctttgcctgtttttttaatgggattgtttattttcttattgtgagttttaagagttttttttgtacattattgataaaaatcctttatcagatatgttctttgcaaatgttttctctccagtctgtggcttgtcttctcattaccttgacagtgtcttctgcagagcaggaagtttttaatcattatgaggttcaatgtatcaattctttcttttatgggtcatgtttttggtattgtatctaaaaagtcatccccttatccaaggtcatctagatttttttctgttattttctagagttttataattttgcatcttacatttaggtctatgatctattttgagttaattttttgtgaagggtataaagcctgtgtgtagattcattttttgcatatggatttacagttgtcccagcaccgtatgttgaaaagaccatcaatctttctgcctttgtattgccttcactcctttgttaaacatagttgaccatatttatgtgggtctatttctcttccattctgttggattttttccttcagatttgttacatagataatcatgtaatctgtgaacaagaatatttgcatttttacttcttaatctgtataccttttattttcttgtctcattgcaacagccatgacttcctgtatgatatcagaaaggctctccattctgttccaatgatgttgattattttactgaagctttatagttaagtcttggggtcaggtagtgtcagtcctccaactctgttcttctccttcaatattgcgttggctattgtgagtcttttgcctctctgtataaactttagtatcagtttgttgacatccacaaaataacttggtggagattttgactgggattgcattgaatctgtagatcaagtgaaagaactgacatcctgacagttttaaatttgtttatccgtgaacacggaatgtctctccatttatttagttgttatttgatttctttcatcagagttttaatatagatcttgtacatattttgttaggtttatgcctaggtatttcatatttagggatgctaatataaataggattgtgtttttaattttaaatttcacttgttcacttctggcatacagaaaagtgactaactttttgtattaactttataccctgaaacattactatagttacctattagttccaggaggtttttttgttttgtttttattcttccaggtttgttacatagataatcatgtaatctgtgaacaaaaatatttgcattttttacttcttaacctgtatatcttttattttattttcttgtctctgcaataaccataacctcccatatgatatcagaaaggagtgtcaagagaggacatccttgcctcgttcctgatcttagtgggaaaatgtctagtttcttaccattaacgtatgacattagctgtaggtttttcatagctgtcctttatcaacttgaggaaatttccttctattccttgtttgttgagagttttcatcatgagtcagttttgaattttgtcacgtgcttttttttgcatctgttgatataatcttgtgattttcttctttagcctgttgatgtgatggattacattaattgattttcaaatttgaatcaaccttttatacatgggataaatcccacttggttatggtgaatacttatttttatacattttggatttgatttgctaatattttgttgaagattatgcagctaaattcatgagagatattggtcaatagtgttgttgttttttttcttggaatgcctttggttttggtattgagggtaatatgggcatcatacaatgagtgttccctatgcttctatcttttggaagagatcatagaaaattgatttaatttmtttcttaaatatttggtagaattcaccagtgactcatctgtgcctggtcctttctgttttagaagattattaattatttatttattttcttcaatagatataattctattcaacttgcctttttttttttttttttttcctgagacggagtttcactcttgttgcccaggctggagtgcaatggcacgatctcagctcastacaacctcctcctcctgggttcaagcgattctcccatctcggcctcccgaatagctgggattacaggcatgcgccaccacaccccgctaatttcgtatttttagtagagatggtgtttctccatgttggtcaggctggtctcgaactcccaacctcaagtgatccgcctgccttagcctcccaaagtgctgggattataggcatgagccaccacgcccggctgaaattgcctattttctttttttaaacagaaatccaggttaacaacaagttgggacttgaggggagtggagaaaaacagtgcaagagtttcctaaaagcttacccagttcatgcattcactcattcattcatttgtacattcattcatttggtaattcactcaatagcctcctactgaacccatttaccagaaataagtcctgcctcaagatgatagcatatgcctttcttatgccttcctgggcattttcttgaattacttttttgtggttgtttttaatgtgtaaatatacatccccaataactcagactcattaatttatgtttgtaataattgttgaaataagtttgacagaaggtgacctttctgaatttgcaaagaaagtgattrccaggcaaatttaaagcagaagtccattgtggggaagatgttgtgtccaaagccacacacttttcaacgagctttaagcactttctccatagtgttgagggcacaactgtggagtcagaccttccccagtatgatcctgggtcagctacttcccagcagggtgacttaggattgtctccttgtctctttaattctcctttccctgactgtaaagtgcaaataatatgacccaccttgcaggctgcttgtgagggtccatgagatattatgaagcttctagcacagtgcttggcaggrcactgatgggagctcttacctttattattaattcattcaaagggagatttactgatactctctttagtgctgtaagagatgtgacgatatcaaagctagtgcctgtcctcttggagaatgtaaytctttggggaagctaggacagatgcagattattactatgtaagatgggaagtaataaaagacctgggaaaacaagtgaatggcagacgcaggtcagaaaggagaccaatccctccagcttgggcatgcttgctggcatgcgggtgccccagggactcgagatcctgttgctgaatgatcagatggtggcatctggggtggacactgaaggacgaggctggctgtgtgtgtgacagcagacctttctccctgctgcctgtgctgtgctttcatactgcagacacccagcaagtgagcgctgagttagattccagagagagagttcaagaaaatgcatagcagcagacaaacccctctatcgttaatagcaaagatttcttatttgttcatttgcaagatcctttgtcaaattcttctggccttgggccctttgatcacttctgtgtcctgtgcacttaagtctggtggattccttcttgcccctcagcactcagctctggcagccgtgcctcccccgagtccggtctgaccgttccctgcagctttacctggttctctgtgagcctgagcacttgggctgctccatctttcaacagccccaggagttggtctgagtcatcttggacctcctagctcaataaatgtgtaaacttgccatagcccagatcttgctctgatttatcagcatttagccattagtccaaatacgtgaggcttttcaaaaaatacagaaacagccgggcgcggtggctcacgcctgtaatcccagcactttgggaggccgaggtgggcggatcactaggtcaggagatcaagaccatcctaacatggtgaaacccygtctctactaaaaatacaaaaaaaattagccgggcgtggtggtggtcacctgtagtcccagctactcrggaggctgaggcaggagaatggcgtgaacccgggaggcagagcttgcaatgagctgagatagcaccactgcagtccagcctgggccaaagacccagactctgtcaaaaaaaaaaaaaaaaatacagaaacaagtagttcccactcacccttcctctctgctgttagtgtgcattcagaygatgccaaggaacgggcttctctgggcagagccggggctttgcgaggggtctttctcagccacacgtgtccagcatgtatgtggccttctcctggggcatagaagtacttatttcagaccacacaaatgaaaacgattaacattcagcaaaatatcccagctgcagtctaattatttcctatggttgttggtgacagcgtcccctttttggagcagggttggccggaggcaggatgagaacagtgtgggcttgttggggaggtgttgtaaggcacccagcacagagaattgaaaagccttctttagaagcttctctctggggcagggtgggggtgggagaggaaacggtaaagacccacagtggcctgggctcttctctccagcaagatgcaacaggacagggaaggagggcccccagkaggcccctggggtggcctggaacttgagaatgaactgatgctggcaggcacagccttcttcacttcttcacaagggtgggccccgccttagactgctgggtgacacctgtgcataagygctccaccccccagcgagagaaagcgggccgctaggactggctgtcctttactgtgtgactctccccagcgtcttgtctgtcccttcctacctgtcactgcacttggtagtcacatatttatttgtaccttggtgtatttattcctgtctcccccacaagactgcaggcagcactgagaacccaggctgtcttgctcatgctctgccgccaggactagccgggccgggtacccctggggtactccccaggtgcctgtggaatgaatgaatgagtggatagatgagtgagtgaaagaatatatgaaattggttctgcaggatgtgcggcctgcagttaccactcaggagatgctggctccagggtaggagagagactccatttttctctgggtattactgggctgttttaatttcatcaaacaataggaatttattacctgttttcttaagctctaaataacaaagggaagcacagtaagtattctgttcttcttctttgccagggcccagaggttgagggaggagcagcccatggtgctgggtgccagtggggggtgaggaagaggctgcagaggtccctgctgcctggacacgtggctctagcccctaatggaggggcagccccaggtaccactccctgaacctgcgggaaggctggcacagacggcatgtgagtgcggcacatgccaggccacggggctcctttcttgtaactctcaakgccccatgaggcaggccaggtgaccgaggctcaaagggcaaagtcacttgttctgatggctcagctgcaggacagtgactgtagggccagtgctctgtgcacccgcagctgctccgctggacacagacctccccggggaagcagagaccaccctgcatctgaacggggaggggtcgatggagtgtgccctggtgacatgggctctgcagggcggggtcaggcctcccgctcagttctgcatcagtacttgcaccacagaggcctcaatgaagccgagggagctcaggggagcaggagtctaagccggaggccctcagcggggcggctgtgccctccccaacgcccaggacatcagcagtgtctggagacaggttggattgttatggccaaggagggagcagtgtcattggcagttagtgggcagaggccggggatgcagcggaacagcctacagtaccaggcagtccccagcccccgcaatgtccacggtgctgaggtggagaaatcctgggcttaggtcacgcccaggtgcacaggaaggatcttgcatcccaggaaccaggggctgggagagaggagagctgggctgggggctctggaggtcccaagttggggtgcccttggattcctatgtagaggtggaaacctgggtctataggccttgactaggggtmtctggctgagaaacactggctgaggctgcaggaaagatgtgcctctgaggagcaggcctgtggaggccagacactgaggcagctcggtccccctggggcctatggaaatgcaggtaacccatgatatcctagggtcctgctcccacccaagagagggctggggtgagtgatcacagctgagggcctgcaactgtatggacccattctccacaccacacacagaccagcagaaacatctggcatgttcccccagcacccctgcatctcactaactcccattcctccctctcctgtcagccaaggccactccctacaggatgccttccctgactgctgctctgggtcaggttgcatcttctcaaagaactgtatgtaatttacatcctttgttaatatgarcatgtgattaactggcttctgggtggatgcatcctggtgtcttcagagcccaacacatagtagatgcccagaaagtggtttttaaatgattatgctttgtctttgataaataacataggcgtctttacagtgtgtataggcagagccgagttgagacatcgaaagtgggcagggaaattgtctccaatcctggagttgtggggaagcaccgtaggcgagcctgtttcctccgatctcacctggggtggagtgtgtgtgtgtgtgtgcatgcatgcgtgcgtgcacacacacgtgcacacacgtgtggaacccacggggctggggatagtctctagcagtgtgagacaaccagcacaccatcctggtgctgagcacagctcagtgtccctgtctgggaagcccatgacccttggggcagaagttctgcacagggagtccgcagtgggccaaggcagtggtcttcagcccatttgcagagctaccttgaccctctgtgcctgagataaaaaagatggtttctccttcatggagaaggagttcagttttattaatactttcttaaagtgagccacaggattagtgctggcccccaggttttgaaatcttccatctgatgttcagcctctttcctgttgagaccactccttgcaaagatgattgctcttgaagttgaacccagcataactgcagtccgtcgccccctcccagctggcagagtatcctttgctttcattttatttattgtttatttatttatttatttttgagacagagtcttgctctgttgcccaggctggagtgcattggcatgatcttggctcactgcaacttctgcctcccgggttccagcaattctcctgcctcagcctccagagtagctgggattacaggagcccaccaccgcrcccagctagtttttgaatttttggtagagattgtggtttcaccatgttggccaggctggtctcaaactcctgacctcaggtgatccgcccaccttggcctcccaaagtgctggrattacaggcatgagccaccatacccggcctcctttgcttttatcaaatktaaacttctaggaatatattttcataatgtgtttctagccgtccttaagaattaatgaagttcttagttccattttttttttttcgcccttgactaactgtggacaattctcaattgtaagggaaagatttacttctgtattaataagtctcactgtctccgaaactcttcacattcaaagggcactcgcattacctggcaattactctttctcgatgagacacaggttggtgatatttgggaatatgactttggggaatacaaactctgtttaagtaatgattttgaaaaaaatctctctgcaccagtgaatgccatgaacagtttcattttcagtaagcgcttgcagccagttgtctagttgtcagaagccgagctcatcagcgggctcctggtgtcggcgttctgctgctggaaggtcagggagttccctggaccccacggaagaagctgtctccatgaaggacagggaccgtgccgtgaaccttttattctcccactgacatggtatgaaggcatttyggttttaagcatcttttttcctaatttctcagaaccctttgaagatcttgcacttgacttctaaaattcagtccaattccttaataagtacatcattattacaagttggcttttttacttcttaagaagcatctttaatttgaacttccataaccatatttttgtaattatcaaatggcaggaaatagatgctgactcccgtaattttatcattctaaatgtcacaagaatggcaaggatctttaaaagacaaaagaagttcttcagttaggaattcccatggtaaccaatatagctcaatcttttttttttttctttctgtggctattttaagtatttaaattgatttacatccctgtggaaatgtgaaaaaagcctggatcccatatacatccattccacctggagtttgggggttttgttataagccatgttcttcttttgattccttgccagtgtctgcagtggaaggtcagggttcgtccctaagcaaaagccttttaagtttccttaacttaggaagaagtcgtgatttacctttgtattccttttgcagtggatattaaaacataaacatataaattatctcattttgaattgctcttttactttatgttgaacaatgaatataaatgtattttagcggccagatgttagaggataacactggcttaatttgtgctgagtgtggagccccttctgggtgcggtgagggtctgagcctgtgaacctcgtatctgcccagctcctgctggacagcatcagagatctgctggctcagggtccagccagtctccacctctttctggagcagaacactgcacaccaaattcactggtactgcagccacaaccctggacacctggacatgtgcattttcccatcttctgccacactggccctttgcctgacctcctcctggccttcagtctgaggtccgctgggggccatgaatgcctctgcaaagttgcaggtcctgatggtgggctatgggtgctcccagctgagcacagtcatgactcccacactcactgtacaaggaagtgaacacagtaagtgtggatctaccagatcttcactaagcctcagggcaaccctaaagagaggacaggcatgtttatcctcatttcatccatgaggaagtggaagctcaaagaggtcmkatgctgcatctggggtcagtgtggttttctgcctctgggaccccctacccctgaggccagtgtccatccccctcagcaggtgtgtggagccctccggacacaacatcttgctaggaattgcatgacagttactgatcatttatcttttaaaatgggtcaataggctgaaggaaagatgggaagtttctcagatatcacatattggcagatattacagccaaaatacacatagagggaaacattttggggaaggttgtggccatgataaaaatcagtatttattgagcctgtgatatgtggcagacaccatgaagggtgcattgtagacattaccacatacaccccatgcagccatagggtgaccagccacctacttagccagggactgaggggtttgctgggatgrgggattttagttttaaaacagggatggtcctgggcaaagcaaggtaagttggtcaccccacccgccaccccaaggttaagatggacttaccttcattttgtaartagaaaacccatggctcagagagttgaggtaactgcccaggctgctctgatggcaagaggtgcagctgaggcctggaccaacacctgtcagaacccaaagccacattttttgaccacgacacctttgtcatggccatgaagagcagtccctcctgcgaaggaagtctcaaggtcatccatatgaccaacaccttgaaaagatttaggtgataaaattgagattcttaattcttttgaaaaaaatgattaaaatcagaaaattattttcagataaagtttatgccaaaagatacaaaggcttgctctgtaagagataaagcgtttkgtggcaaacaaacaaacacttcaagggcaaagtcaggccaaccgtcctgctctctgccatccggtaagtctctccatgctcatggtcatttgtcgcccagtgtgaagactgctaagggcagatgacatgctcagtgtttctcagttgaccgtattttttaattgagtttttagacaaattaaattaatgaatttgtttgcttattcatgtagagtaaaaagcaatacccactctactccaaaatagtagctcaagctatgattttgcaaattgctatggtttggctgtgtccccacccaaatctcatcttgacttgcagctcccataatccccacgtgtcatgggagggaccctgtgggaggtaattgaatcatggcaacaggtttttcccgtgctgttctcgtgatagtgaataaattctcacgagatctgatggttttataaagggcagttcccctgcacacacactcttgcctgctgccatataaagatatgcttttgctcctccttcaccttccaccatgattgtgaggccttcccagccatgtggaactgtgagtccattaaacctctttttctttataaattacccagtctagggtatttcttcatagcagtatgaaaatggactaacacacaaattatattaaaatgcagcatccttacagaaaagtctgcaccagtcataagcacacagagctctgaactttcaagtgagccagcacccagatcaaggaatgtgacaggcccattcccccagcccaatccccttattgctcttccagtcccttcatgcctcccttccaggggtaaccattgtccccacttctgacaccatagattagtttcgcctgctttcgaactttctataagctggatcatagattatatcgaagtatttttatgtttattgaatacctactatgtgcaaggccttgcctagctattcaatgaatctaaatgacttggttttgaatgcctcccaggttgctctataggtgtgtgtgtgtgtgtgtgtgtgtgtgtgtgtgtgtgtgtgtgtccctggatataggtcacacagttgtcttagccgtcagccctcaaaaggcaggttcacatggtggccagctcacatcctgtgtgtgttcaggaaggcactgctgccatgcaaatgtcatttaaatgtggcatatctatgaattcaacagggtaatttggttcctatgttgttggaaagttatctgaatgctgaagtcaactgcactccaggctygagtaaacaagtcaggacaatgaagagaggcagttgctgttaggtttggtggggggaggggaaggtgactttcacaagtcctcttgtacaagggccaccgtgtgaaacctgatgtccagtgaagacacagcaatccaaatagatcactgccttccagccccagggtctacgcaacaaaaagccttccccattgaggccatctggcgagttctgcctccaatgtcctgggagcagtcagccagagctcagggcagggggcctccccagcctccattctgcagatcgttctttctgggcaattcatgctcattcccacacagaaaggtttgaggcaatttgtggaaggagcgttgtatcaggatggtttctaattcaggtggattaaggtatggatgctgtcttcactgctcacttgtcaaataactgaactcctgacttctttgaactctgggcttctaatctgtgaagtcagaataataataactgggtagttgtgagcattaagtttaaaaatatgttgtggcagcactttgcatgagcagaccatagtataaatgccagctycctttccctggagataagaagtgattgtgattgtgcgttaagttctgttttaagcttcctagctgacaaggcaaaaatgaaacacaatggcttatattgttctagtctgattcaaagaatgtccctagtttttcaggaaatataaacactttcctggtgttacattctaagacaactttattttgcaagcctaaatgattcagtcagggtttccaacaatggttttcaccccaaaagatggagaattcccctttctatttccatagcatgtatcaatcctttaaaaaatactaatctggggttatgatagtgcaacactaaattcggaaggcgaacgccatggagctggaattgcattctgttgctccatttctttcaccgtctctttttactggacatcttatgataagaacgtaaatggaaagggcaagcctggagtgacaaagggaatcctccattcactccayacagtgctgttgctgggctcgggacgtggagagggcaggggccgtgaagacatcctggtgcctttgcagggtcgtcatgaggataaaggggatgggccaggtgtgacagctcaggtttataatcccagcactttgggaggctgagactggcagatcacttgaggccaagagtcccagactaccctggccaatatggtgaaaccctctctctactaaaaatacaaaaattagctgggcatggtggtgcacacctgtaatcccagctactcgagaggctgaggcacaagaattgcttgaacttgggaggcagaggttgcaatgagctgagattgggccactgcactccaccctggcaacagagcgatactctgcctaaaaagaaaaaaaaaaaggggggcggggggatgatgcagacatgagctttgtgtgtgttcttgtcatatcacacgtaaaggagacggtcagactggggctcttttctgttacaaaattatacrtctggagaatcatggtgaacgtgaactctgtgtgagatgctggcacgtgcctccggcacttcatgaaggaggctgttggttctggagcatccgtggctttgctcctcaggctgctggccatggggaccctgagtcacaagctcttcagaaactctggtgctggggaggcaaagctgtctcctcctctctccctttgcacagaaattccagaatttggattcttttgtgacctcgagctgaatgttcaaaatgttgaagctgagttctttttttgtttttcatataagtacttacacacacgcgtaaaaaaaagagccagtaaccaagggcttttcccaggcccccagtggcctggaagtccagcccacactcccagactccagctgggagacacaagagggagggaacttgggtgggggacaccccacaatgatgaggtccttaggagactccagggcctccaggaacccagctgccacccaagagcaccctaaatctcagaagctagccaatccaatggaaggacggtaaggtcttttcagtgtaagcacagctttgcggatgaaagggttgtatttgcagaattcgttggaatcagagctccaagcctagaatgtcctcccaccctctacccaccccaggactggattcctgtcctgtaaggccaactgagctctcctccctcattacctgtccccaggtacagaccttcccctcacaccattggtaactcatctgttgcgttttttcatgtatcctgaagcacctacacagtgggcattcrataaatatctgctgagccgtggattacacagtagagccaccgatgaaatgatgcctacgaacctcctacaaaactcctgttttattatatcaaactctgaaaactgacagtttggactattcttttgttaatcctacaatgagttaagctgactaatggacactcaagtttccatcatggctgcgctcacaaaaaagatcacctgatattttccccttgttactatggaagattttaggtggatcatattcctattcgtatcataggaatcatttactggggaagggtcacttcatttcaattatgttttgaatgattagtcatttcaaaaataaaccatccctccaggttaaatttatctgggactcatggttggataagcttctatgtcattaaaattaattgatgtagcaaaatcagctgcagtcattatcctgtcccatatctgtggcagacccaggaaggtgctcactgtctacacacagcggcagaggtctctgtgtcctttgtcccatgcagagaccctgcctgtaagtctcactgaactgaaagttagatcgggagtctccatrtgacctgactgagagcttcatgttgtcaagtgtccatacgaggctaatgtgacactcacgctggggctggcgcattggaacaaatggttcacttcaaacattcacatcccaaaaaggaccccagtgggcatagggagyccagcccaagacgaagtatcagggagctgttgggagcatgggtcttacgtaagagacctggagtagggtggggattggcacccccctggagggcgtctccatgttctcgatgcctctgtttcctcctctggaaggcagggagggcccttctyagctctccacactatgtggaggagtcggtgagatgaagcctgcccagtgttttcactcggtgccgccctgaggtgcgagagccccatgcatggtgccctggccttgctgtcctcgcaggtactagcgcattccacttcctttagagaatgagcactggagtaaggaaggtcagatgtgtgcccatcccggcctgcagcgagtgcttgcccytcacaaggcagttcctggggaaagcctccagcgtgcgcgatttgcagtttagtttaaacggaaggaggtttattagaatcttggcagctctagaagaagactcttaactctccattggctacagatcccggccagccatgtgggtggctccctcaggccggtcagatgttcctgctgggatggccatgggcaccaggagagctttcccttagcactttcagacctcagacctcctggcagattcaggtgcagcattgaacttcatgccgttttcctaaattcaacttccggagcttttaccttttcagagacccagcctagtttatagaagcccagcagaaacttttcttcaatttgctcgtgactcttagatgagtttggagccgggtgggaagatggtatttcagcatcctaggcaggggcacatcagatgaactgtgcacttcgaagccatgatgctgcctgaccatgagggtaacatgggggaggaggaatccttgtcagtatcctgtctgtggttggctgggcagtgaccacttcccctgaccgctgcctggggactgctcctccacacacaacttatctcccaggaagcaattccaggcccaggcaccaagggcccagggttttcctaatgttgaggacattattgcccagtggcatagaacatgggatttggagtcagatctggctggatttgatttctggctcaacctcttattgaccacgtgacttcacgcatgttacttcagggtggccgtgaggatcagacaggatcctgtatgtacagtgtctagcacgtgcctcaaggaccatttgtcctcataaatgtgattattaggtarcaaggcagtgctacatgtggccccacccacggccaaccccacggtgcraagagcagcctttctgtccttacctgggctttaccctcctctatttccaagctcgtccacccaacattctctcactggatcattaccatgatgccgtggatcatcagcaagtatcggtgacctcatgtgtagtggccattgaagcacagagaggtggaggggctgaccaaggtcacccagtgggcagggatctggctggagagcacacgctgctgcttctccctcccttggactgtggattacaggagagaccagtagccatgcaggtggcaggtgggaggcctagggttctgcaggtatgagcagacacacatcagccccctctaccaccggcctttaatgtctccacatcacacagaggcctgggactgtccagctgtgtggtgcagcggctcgagcacatacactttgggatgattccttgagttgtaaagaaagaaaataaatctccttgagaatgatggatgcactgcttagcagtggaagaggagagctgacctttctaggtagacaaaacagaatgcctgtcaaacattacacttttgttgcagtatattgttccagaatggagcactgcatatttttgctataatgctgtttttgtttctaaatgaatactgcagtgttcttttatgtggaggagggattcattactggttcacagaactttttcagtggtggggaaaaaataggtgcttgtcctcagcaatgcgtatcaagcctagacacatttctgttaggagcacagtgatttgtgaattccctgacagcttaccttttattatgagctctattttaaatagagacatgtagcttttcctcttcaagacaatataacagatacctagaatcttctctgttatctctcatttgttttcaagctagcctcttttttgtgcattttatagggattcttatttatgaactagtttaaatggttcagatcagccagttgttgtggggtggaggatcattaaaacaataatatttacaaatgtttcagcaaagtggctagtcgattggcagatttttcattcatcagctttcctaattttcagaatcttcctgaggaatatctaacaaacgtctctgctctgagtaccatattcctgaaaaaaaaaaattgatctgttttcaggatgggtctccccttttctcaggctaatatattttcttagtctctcgctaatatcctctgcatgcctgtgaaggatgcatcattttctgatagctctgcgcctgaacgccacctctgtcgatggcaacgcttcacccaggcccccaagccaagcccacggtcacgcttagcttccttcccttttccccacttctcacatgcctccaaagcttgtgagctctgcttcctctattgttaaatggctgccccctccccggccgcccaccactgcccttgagaacacctgttcatcctgcatctggaccacaggtgtggcctcattagtcaggaatccacagtccacacttagcatggtcctgccccttattcttctctgcagccatcacagtgacctactttgcagagagcagaatgggaatgcccaggcttgcagacttctgcagcccccttgtggcttcagcccaaagccaaaggtctctgcagcattccgggatctgcccaccacacatcccaggctcacagcagtgatttattgggtccaggccttatactgagttctgcgtccggtccttacctcctttactaacccagcaggaaattttattatctctatttcgcagatgaagaaacttaggcttaaaactgttgtgacttgttccaaggtcaaagccaggatccaacttatttgccatttccagaatgttccatacactctctggcttcccggtttttgtttatgtgttcttcctgggaattttcttcttgagaaagatgacctaactttagccaaacacaggttagtgttctgcttccatctttcatggcccctgggcttgccacgacctagcactgctcacccctgcatttcaacgatctgtttataagcctgtcctctggacttcttttagggtaaggaggctgaggttctgtccatgtattttttttaatctctaaatcctaagcaattggcacagaaatagcacatagtagatgctcactaatgttaaatggctggtttagcatattgatgtactcattcaactagtattttatgagtttctggtacatgcacagaacttttcatatactgaagatgttcaagctagagatagcaggttttctattcagaaatcaccaaattagccacagatgctctgtctttggggagggtctgcacctgccttcgtcatctgtaaaatgtggatcatacctccccacctcatagggcagctgaaatggcagcaaatatccttaaygttaatccagagtcctactgtactgtgttgttgtagagacgtgaagacacataaagatggaaggggcgggcggggaacagctaggcaccaggagggatacaaccagggcagcccagagggctcagaaaagatgtcaaggagagagtaggacttgacctactggatcacctggcgtctagtgggtttgggtgagactgaggctttgtgggacagggagcagcatgagggaagcagggggactgtgctgtgttggagccccgtgagacacggttgtgtgagtgagcggcctctagaaggtggatcaccgtggtgtctgcccgacttgatgctcttcctgtgagcttccaaacctgttaagcaatccagagggctgtttaccaacacacgctactcttcttatccgtgccaatctcatcagcaaacatgctatttcccttattcgtgaataataattattattatttcataataaaatgatctttctgaataattatttaatgccagagctcatccattctgccttagtgaatattgctttgccctggcctctggccacaggttaccgtggacagccgagtgtcaagatcatcaccaaccaggcccttcacacacatgcttagcctcatcgcagacctagggtcacctggtgaaaggcaggtgtgtttccaattggcacgctgaaaaagaaaacctgaaaacactgatttaacatatctgagtattagagatcaatcattttctctggggctcactgaacaggaattagctcaagaaaaacatctttagcgtgttcagttaccattagcgtcaggcacccagcaagcttgtcctgaatacatttcagagtccgagcccaattggaggagygaggcaggtagaggggagtaaaacaggccttgttttcgaggactgctgctctgaagtcccactgcactacccagtgtggggagtccttgtggcaagctaccctatatctctgagcctcagttccccctctgcaaagtgggtctaataacaaactcctcatatgagtattgagaggatgcagtgatccctgttgggtgcttggcggggagtctggcatgaagttcctgtccttacagtggctgtttcttctgcaagggtcttctcttggtggcagttaacaccgtccatccctgtcctcaaacactagatcccctgccaagaagctactcatagggcaaagatttttttaaaaaacatgacagtgactgtcagtatctgagaagtgtccatgcccagcgccaagaggtgaacaaattcatagctctcccctctggggcttggagggcacccctacacctcggaagggagcctggaatcaaattgccatgtttccaaatttgatactgataataatggcatagacagacgaggcagtatggaaaccagcagacactcgtacttgcaaaggaggatttgtctggctttctaatttgcatgtttcctaatccaaagagggtgcctcaaccgtggagtaattagagagtgtgtgccttggtcgggggaggagggagtttgagaggcaggcagggatgcacgtggatctgtgctgagcagctgcccatgaataatttctaaaagttgccaaatatttagaagtcctgctcgtctgtcatagactggcaaaaaggatggttgagaaaaatgggtctttttcttcccccaggcttagcaacattgttttaaagatttcatctccttttcaaggtggtttaacgctgtggggaaggcaggataagattctactaaactccttcatgtcagggagggctccctcccccaagttcagtagctccttctgtcctgtctttcatgcattagaaaatatagacattaacagctttactgttgcctggaaggtaaacaaggaagctgtgagtatgatatcagtgcgaatctgaagcctagatgattcagaaacgttttgctttcttccatcatttgaattacccactggaagcagaatgaagttgtccgatagaatgcagagacagccgcaggggccgtggctgcggttctgtccattccccactacacttaattaaagtgatgaggtctctgttatttttttatttggagtaatgatcctgctctttgaccagtccatctaaagtaatggtcatagtcatggtgcttaagcgttactgtgattgagggtgaatgacagttcttgctaccccagtgccctaattgatcaggacagctcagtgtcttttgggaaaaactggagtccaagagaaggcagccaggattgaggaacttggctccgggagctggtcattcacagtaagactgcttcaaggtcagtatctctggcatttaactgcatgaagtggagttttattccatatcctttctttataaaattttaatacatcatgaaaagttcacattttagatatactcatagaaacatgtatgtaaacatgttaaaataaaatgtaaatgcacttccaaaaaattcttcaaggttgctactcgtttaaaagactagcttggagatacgcatgctacacaagccactcagcaacctacattctgcccactcraatgcttgtggcgcyttaagccaaggttgtgtgtaaaaggcattttccttttgtccgagtttggaaagattggccagttctgttcatctcagaagtaatttgaatgtttcccttaaatggaatagttccgagggactgattctaaatgctgtagttttattttcttctttgcaaggttaggatgcacaataacgtcgctccgtctttccatatcttgtgagtaatcaggacccaacccagcagcctggccacttcctgtgggcgccctcactggcctgaccttgcctgcccctgccccccttcctaagggtggatttcccctgttccgatgttgtcaccatggctttttcccagggccttgtcgggctccctccctgcttctgttccctggaagcagagtggctgcagctgtgagctccagggactcaccagccaaagctccagccaaagctccaactctgtggccaggctggtccaggcctctgtgggccaggctacttccaaagacccacttctcccacagtaaatatatggccatcccggggctttcctttctggaggagagaacataatggagcatcctctaggacaggaaaatattttaaggaataatccagtatcattattgccatctgcagaatgcctttcctacaccattcctacactaaaggaattacagcttcactgggaggaaggagatatagacaaaagaagcaaaacaaaacaaaaacaaaaaaaaacaagcagacaagcctgggtatagtggctcacgcctgtaatgccagcactttgggaggccaaggtggctgggtcgcttgaccccaggagttcgagaccagtctgggcaacatcaggagaccctgtctctacaaaaaatacaaaattagtgggacatggtggcgcacacctgtagtcccagctactcggggggtggctgaggcagaaagacggcttgagcccaggacatcaagsctacagtgagatatgatcgtgccactgaacttcagcctggactatagagtgggaccctctctcagtttaagaaaaaaaataaaataaaacaagcagacaaacatacattgcaatgtaggatggcttcctccgggaggcctagccaggagtgggttcagcagccccgggccggcattgccgctgccctgtctcctcgctctgtgatgctggtccagagcctcaccaagcctcagtgtcctcatctttaaagtgggtctcaccggccgggcttggtaactcatgcctgtaatcccagctctttgggaggccgaggagggtggatcacttgaggtcaggagttgaagaccagcctggccaacatggtgaaactccatctttactaaatatacaaaaattagccaggtgtggtggtgtgtgcctgtaatcccagctactcaggaggctgaggcaggagaatcacttgaacccaggaggcaggggctgcagtgagccaagatcccgctactgcactccagcctgggttacagagcgagactccatctcaaaaaataaataaacaaataaaaatttaaaaataataaagtgggtcttgccttacctactaggatagttgttagatgtgggagagatgccataagcagtgcccagggcactccacagcccgagaaatctaagctcatctctccttccccttgctggaggacaacaacgttcaagagaacaacaggaagctttcccatgagtggaaggatgttgtgtcagcttctcactgaccccacttcacggatctgtctgctcaaaccaacctccccaacccccagcttttaaatgtgcctctttcacagtttccaacttgttgctcaatattacagtagccatcagcgtcgcagtgttggcctaatggaagtcttcacttggtaaaggtttactttagagaacattatgattggtttttgctctaattctttaagaaactgatagttgtggtttcctactatcatgtgtgagccacaaaccaataaaatacctgatctatttgtagtacaaaaattagcggaatgtggtagtgcacacctgtagtcccagctacttgggaggctgaggcaagaggactgcttgagcccaggaggttgaggctgcagtgagccatgattgcaccgctgcacaataaggcaagagttcagtgtattcttgccttattttttaaaaatcagctgcaagtttaatttcaagttatgatttgtgtttgattggggttgtcaatcgtgcaaccattggcaaagtgccaacaggttctaccaaaattggtcttttcccatgtggttttagtctggtttgactcaagcctgctgccactgtctgcagccctgctccagaaacttctgcatggcattgggttttattttacattaaaataaatcagcattgcattggaagattgatcatttctatcaatcctcttgagatattggaggtataacttccattcctggcttcttcccttgcttrgccccagtcaaacatcacgagtcactctttttagcatcttttctggttcattttggggagtggaaaggatggactcttgtaataagttattcctacaaaaaagcagttcccctatctgcagtgatcctcaagtaatcatttcttgcccaaaaaccaatgccctctcagtcccctgccatcrtgctctatgtaatactgggttccactgcaccctggaaaccctctgtgctttaatatgttactcaacagattttccccggttgttttatatagctgccccagtaggtgctttggcattatatagactatcttttaaattttatttataattgttgtttccatatacaaatccttttttttttttttgtattagtaactttataccttgtgaccttaactcatatattgcctctagtggctatttttgaatcctttgggattttctacatagactattatgtcatttgagaataaagttttatttttttcttttcaatgcttatgtcttttaattctttttcctaacttattgcattggctatgatttccaggataatgttaaataggagtgggacaaatccttgctttgttcccagtgctggggagaggtattaagtctttcaccattaagaataatttgagctgtagatttgcccaaatagacttaaaattccttagttaccagaagtattttttctgcttcttgggcttcaaacacacctcatgggtcagcttttaaatgtataacaatatacatttaaacaattttttaaaaatataacaatttataacaacttttaattgtgtgctgtagagtctttatttgatatgatttaaaatatctagttttgtcaggactaagatagcaagtagtctattttagtggaaaacatcatgtactgcattcactatttaaaaatagtaacaatcaaaacatgcttccacccttcaccagtgcagacgtgcagtgacgactgagcaaggtctcattcacaggtagatagcagcctaatcaataatcccagtgtgaggctgccatgctgaccactcagaacaaaacaagcgagctaaattcatccactgaagaatgggtcaacaaaatgtggtatatccatgcaatggaatattattcagccattaaaaggaatgaagtactggtacatgctacaatagggataaatctcaaaaaataatactattataagtgaaagaacccagtcacagaaggccacgtatagtgtgagtccatttatatgaaatactcagaataggccaatccataaagacagaaagtagattggtgttgccaggggctggggacaggatggagcttgggagctagtgagctaatagtgggtgtggggtttctttttgaatgatgaaaatgttctaatattagattacattgatggtttcaagctgggtgaatatactaaaaaccattgaactgcacactttaaacaagtgaactttatcgtatgaaaattatgtctcaataaaactgtttttttttaaaaaataaaataacatgagagctaatttaatgggaggctgggcatggaggctcatgcctgtaatcccagcactttgtgagcccgaggcgagcagatcacttgaggccaggagttcgagactagcctggccaacatggtgaaaccctgtctctactaaaaatataaaaattagcagggcgtggtggcacatacctgtagtcctggctactcaggaggctgaggcaggagaatcgcttgaactgggaggcgaagtttgcagtgagctgagatcactccattgcactccagcctgggcgacagagcaagactcactccgtctcaaaaaaaaaaaaaattaattaattaatggaattgatcaggctagataaagattaagctagaaagctggagaaagtgagctgccccagaccaggttgtaaaaggctcttctggggggaggatgggctaaaggaactacttgaaggggagggaaccctataggccacagcagaggcagctgactgatggagcatcttgggggctaggtcagtggccacaccccaccatcaactgatcattagaggttgtattaaagtgtggggtaggacatggttaaaagctgatgattgcagccaaaagaagtatcatctagataaagaggtctccagaagaccctgaacaattaagcaaaaatgggatagtcgactagtgctgtacagaaggaaatggctagaattagcagccaactcctgttaaccagaaaactgactttttttttcttctttcttcttcagactatagccttcactttccctcggtgagtacaaaactttttaaaaattatttttgatgtacagataactagtttaaaataatatgtgggatttaattattagaagagcattgttttcttgagaaagaaagccatatggtcagtgtgttatatwtgaattttatgccttaccttgcttgagcaggctcatatcacacctttttgttacatcatttgcgtgtgtgtgtgtgtgtgtgtgtgtgtgtgtgtgtgtgtgtgaaatttggctcagctgcttggtctcctgaaatgtattgttgaggacacaatttctacatgctttcctttcactgacgtgtcgttgcttttaaaagggcctagccttatctcaatggcacacatctgaccagcgttcaggagcgcaggggcacataattgcattgatggtaactgcttcttaaattgatctgctctagagaaaactgctgaaaaggagcttctccggattgcatgctcagtaaaagcagtgtcagtggtgtcgcataattttatgccttttgggtccaggcaatggcaaaattccatgaccttgatgtccttagaaaaagaaaactttaaacaacagagcccttttgcagtctacttaatcaatttaatgctgttaaatttcctaaacaaatcgaaggaagaaaatctaagagctttcgcagtgtctgcagcgtgcaggtgagtggcacgtggacttctgggtgtgcttgcttttagcgggcaccatgataccggtcaccaggaagctgtatttcctaaatgtattgccttgtttgaaaggcactgactccgttctgaaatcattttcaggtcaatggatcaattattgttccctggctggccctcttttttaggcagggtgccctttgtggcactgttccatctgggcataaatgcttatggtcgttcttggtgtgatgaaatgcattttgactgtgtggattgtttctttctttcttgataaggaatgttaaataaaagtaatgattgattaagctagagaagagggatgccttcgtttgccacctaccaagttaattttgttgtctatgttctycattgcatcattataagacgttgttgattctgaatggggaactcttcttgggtaaatgtcagcggtgggatcaaagagaaggatcrttactggaatcatattatgggatggaggattaactatatgaaatctacaatccctgatagcctcagaatcctatacaaggggtgttggctggtcgatactggtttgaacgcttattaaatgtggctttcttcaaaagcaatgcagctgcgtgctttatcgaatgcaaatgtgcctaccgtgctagaatgaaatatttgagtgtcagatcccacagatatagctccttttgaaatacagggctcagattatgatttgttacaagtgtgtgacctttgcaccccttgtctctccactcagtactggcccctccgcaccccattttgccttctgccgcttccaaaatttcctattcctcccagcaagttgacctgctccccatcagtgagtcagcagctcccgcagctgagtgatcctgtgacaggtgcttccggggctcctccacctcccggccttgtctcaaaaccggcaagagattcagaagtaggtgccccacccgaaggtcactgaacgtgtgtgcaggagctgacttcctgtcctccctgcatccaccacgggtagttggcggccagagccgcttcagggggcacctcccttttcctggccccacccttcctttgcctccatttctttctttcttttttttttttttttttttgagacagagttttcctcttgttacccaggctgacgtgtgatggcgtgatctcggctcactgcaacctctgcctcccgggttcaagcgattctcctgcctcagcctcccgagtagctgggattacagacaagcaccaccatgtctggctaattttgtatttttagtagagacggggtttctscatattggtcaggctggtctcgaactcccgacctcaggtgatctgcccacctcagcctcccacagcgctgggattacaagcatgagccaccgcgcctggccctgcctccatttcagtgggaaagtaaagctctgcttcaggaagatcctgagttcctagattaagggtacttctgattccagaaatctttctcttgacacgaggaaagggtatttgaagcctgggtctcctatctgtgctgccttgtctgctgcctttgtttgggacctgcccactgggccactgatatggtttggctctgtgtccccacccaaatctcatcttgaattgtactcccctaattcccacgtgttgtgggagataattgaatcatgggggcggttcccccatactgttctcgtggtagtgaataagtctcacgagatctgatggttttttaaggggtttccacttaacttcttcctcattctcttctcttgtctgtgccatgtgagacgtgcctttcaccttcagccatgattgtgaggcctccccagccatgtggaactgtgagtccgataggcctctttcttttgtaaattgcccagtcttgggtatgtctttatcagcatcatgaaaatggactatcacagctgccaaggtagaataccagactgatctattagcctgttgcattttcactgctaagcatttgagacgtgtacagagcttcaggatatctattaatggaagggaacttattgctcacttgtgggattcagagacgtgcttttgagtcagttagaactaaaaagatagtccaccttgggcagggcggctaagcccactaaggctggagatggtgccacagccaccgcccacactgggcagctgactgcagaggaacctagtcacacgtgctggatgaacacatcagcctgtgcaagccttcttttctctcatctatccatcacttcctaggatgtgatgtgacatttaagtgagatggcccaaagtaagcatttaataaaagctagctatgggctgggcgtggtggctcacgcctgtaatcccagaactttgggaggccaaggcaggtggatcatttgagatcaggagttcaagaccagcctggccaacatggtgaaaccccgtctctactaaaaatacaaaaattagccgggtggtagtggcacacacctgtaatcccagctacttgggaggctgaggcaggagaatcgcttgagtctgggaggtggaggttgcagtgagccaggattgtgccactgcactccagcctccatgacagagtgagaccctgtctcaaaaaataaaaataaaaataaataaaagctagctgtggttatcactgctactcttattatgatcatcatcgcagaatcatggcaactgtttccaacttttaaggaaggcatttaagtggattgtaacatatatgctggtactatagtgggtatcaaaaggagttccctttactagcagtattccaatttttcacttaaaaaaactatattaatatttgacatctaggccgggtgcggtggctcacacctgtaatcccagcactttgggaggccgaggtgggaggatcacctggggccaggagttcaagaccagcctggccaacatggtgaaagcttgtatctactaaaaataaaaaaattagctgagtgtggtggcgggtgcctgtaatcccagctacttgagaggctgaggcatgagaattgcttaaaccttggaggcggaggttgcagygagccaagatcacaccactgcactccagcctgggtgaaagagcaagactctgtctcaaaaattaaaaaaaaattgacatccaaaaaaatgagtcaagtcttttttcctgttaagctggattaggaagggtctcttgagtggagtcacccattcccatgttttcctttcctttttrtttgtctttaacaatagatttatgaaaataacactgtagttcgtatcagtgatccaatatgaccaaagttccttcaactggagaaagcttgcaactctgtgggtctctcgcatagtatttaatgcaatggaatttcagaattaagaatttataaaagacgtatcgttaaggtttaaatattttctccagactctttgaggtcttatattgttatacctaagggtatccactagtaagtaaaattaaatgattctgtaacttgactatttcactttggttcatggaaatacccaaggaataaaagaaaacaaaattaacgtgtgaatattcagcaactgtgagtttcaattttaaaatgtacttaggcttcccttcactcgcttgttcttctttagtaatctctgtttcctcctctgtcacttttaagaagtgtgattttttctcttctgactcatttgtgtttcttgatgttgatttgaatggctaccatgacaggaaaaaaaaatctgttcgttttaaaataaagctcagggttctgacaggcagggggaccaccccaagctggtttctggctgcatccgctggggtgacgtttccagcagggcaggagctatatgccccgggccggccttcagaatcccagaaacaagtgagaagcctggtgggcagagcacatataaaattaaaactttctaagacatgtgattcctatttcccttcttcttcttatactggggttttttatgagcaccaatggattccacgggtttctatccaagccacagcgacaaattattctcctggtgactgaattagaagttgacagtaagttggaagaatgcctttggatctgacatgacaarcagattaatccttcatttatttccatttccagtcctccctccccccggaaagtttccacattctttcaagaagtgcctcctaaaagagcctagtaggtaatcctttgtcacagagcaaaggcatgggcgttaatcagtcacagtttcccctaagaggaaataggaacacagatttcctatataaactcatgtctcgtcaccgtgttcacagcagacccagttcaaagttggaattcttctagaaatcctttctcagctgtcagggaaacatggattctccaaggccaggatggtttcccagcgtcttcccaggaagacaagaggtaacggggagctcagaggggtctttcttgtctctttggttttgtgtcatggttgcttctaatataatttctaaagtacctaaaaatcaggctaaagaatattaccaggaaggcgtcgttaaatgaaaatttggcaagcctcttagttacctttwtccagctctgtgcaggaaatctgggatctatgcttcaggaaaccatttccagtccaccacgcctcagtcgatagtgcactggggatggcatggaggcattgtctgtttgggcctggtgggttgtcagacagccaagaatccaaggtgaggttcacctttttagaaaaacagtccctaacaattgctggggacataggccggctcgatgacatgggaaaatcccacccattgtaaattagacattttgtatctttgtaatcaaaactgccctcttcatttttcatttgaagtggcattttaattaagtgacacacagagcaagtgtgagggacctggactgcaggccaatgagcaggtcttcaaggagcttgtcttcaggctcctgaggccagggccggcactctgtgtgtaagggtttcctgcctgtgcagttcatgttgcgatattgtcggctgcagatgagtgccaactgcctaaggggtggcatcattcatattgggagaaagaagacaagaaatgtataaatgcttttgggtgtatgagttacagagagatttctcagacccggcggtgcatcaggatgaggtctcgtgccaaatgcaagggccgtgggtggaccagtcctacctgatacaggaactcaccctcaactgcagcaccatcccctgggggtggccccctgtggattgagcaacaggaaaggagatcacattctgctcaaaaatgaccatttgcagtgactttttttcttttctttttttttttttttttttgagactgaatcttgctctatcactcaggctggagttcgttggcacaatctgggctcttcgcaaactttgcctccagggttcaagcgattctcctgcctctacctcctgagtagctgggattacaggcacctgtcaccatgcccagctaatttttgtgtttttagtagagatgggttttgccatattggccaggctggtctcgaactcctgacctcaggtgatccgcccaccttggtctcccaaagtgctgggattacaggcatgagccaccctacctggcctgcggtgactttttaaagctgctcatacacatgaacataaagatggaaacaacagatgcggggaactccaaaagggaagagggagggaggagagcaagggttgaaagactctctattgggtactatgttcactattggggtgataggttcaatagaagctcaaagcccagcattgtgcaatgtacccatgtaagaaacctgcacacatactctcgaatctacaataacattttttaaaactgcttattatgttgcagagtttggtaaaaattatttaaaatggtaagaaaggaaggatctctgtggaactactgaacaaaaacatgtcatgtaatagattttctgggtagcttttctccttgttttgaatagaaatgagcataagcaaaaaaacgaaaactggatttgtgtttattttatgatgagggctgtttcagttctaacaacttttaaaaaatatgttgatagtatttaactgatttcaaacaactctaccaagattcatctgctatcagaaatggtgcagatttcatgttcaagtgctataacatatacatatagatagcttcttaaagctatatatattatattttacatatacatattatatatttaaagctatcatgttagcatgttgctgctgagaaatgaatttttttaaatctcatgtttgtgaaattattatttagaaaaacaggatttgctctatttcctgtttttccagataacttacatgccttatgcttaaacaaaaattgcatttctgataagacacatacatatggagcacttatttacaaagcatgctcaaattcatgatctcaagtgggccccctaaacatgcagaggcagcagtccaggcatgccttgtcacctctcccttaaagaggggaaaacagagacccaggcaggctggataagtgagttgtaggacagtggaaaggaagtgccagtccccagcggtgctctctcggactgaaacgctgctcctctccaactgaaaaaacagtcggctctcattaccaccaccaaaggtgaagttcaracctgccaaaagaaaaacttttccgttatgaaaaatattatttgacagttatgcaagtgacagagaacattaacaaataagaacatatcctgtggattctgcaaacggtttgctggttgataattatattttggaacagttttatgatcacttgagttgatcttggccagagttcccaattatttctgcatgttatctgctgaccaaatccagctttctaatctcttttcacacacttggcatgtttccttccagcacagccagtaatttgttcattcgctcactgagggtttatcgggtttatcaggtatctcttgcaagcttataattgtgcaagatattgaaaaatgaagtggttgattctagttctaatttcaggaaatattgcttagagagccaatgtttgagtcctttctctactaagtataaatgtgtgttttgcccaggagcctagaaaaatgattgattagaaagattttagttctggaaagttgaatggcctctgtaatcccagcactttaggaggctgaggtggttggatcacttgaggtcaggagtttgagagcagcctggccagtatggtaaaacctcatctccactaaaaatacaaaaattagccaggcatggtggcacgtgcctgtaatctcagctactcaggaggcagaggcaggagaatcacttgaacccaggaggcggaggttgcagtgagccgagactgcaccgttgcactccagcctgggkgacagagcatgactccacctcaaaaaaaaaaaaaaaaaaaaaagaaagaaaagaaaagaaagcggagtgacttagacttgtcacttcatcactctgagtcacaccttcttggtctaaaacataaagggctgggtgagaattgtttaaagacatcttcaagacctagagttctatgctctagggtggtgctggtctggatttggagttagcaacagaaatccccagaaagtaactactgcatgtgtcggccatgacggggaccagccgcactcatccccttgtcttgcaggatgtgtctgcatgttttggggtgaatgttttgtcatcttcctatgagaaagcagcactggcctaggggcttcctcctcctgcctcgctcatttgtttttgctctctcactgctctccaaaagaagcaagaacatttttttaaaaagcattttattaatggaaaatttttatttgaaatatggtcatttcctttttataatgttgcttctattcaggaaggaaaagctgagaatccgtgggctttgattttaaaactcaaacagaaatgttagttaataaaacaaaggtatttttcccactgttctgagggccattctggcaaatggttccgggggccgcgtgatggtttatgttgctagaagaagtgattcactgggaaggtgaaccacttcatctcgtcagaaaccatggaaaccctcgatatcactctgttcccctcttaggggagttctcaacagaagacacactggaaagtggatgtcaccgggatgaagttagaaatcccaaaagtagactatttgagcaagatcgaattcaaaggcatcactattttcaaaacctgtttttggcttccttccaatctgaagccaacaccgacattctgttatgctgtttcccgttgtgggcggactgacttaatttttaatgagtgattcactacccacggctgtatattttccgcctgctgagctgagaattaagtcattttcctttaaaaaattctttctgataccagctgagtaatgtggttctcagtgtttgagacaaggaggcatgttaatatcacttaagagagggtgtttaacctgacctaggctcttaagacacggcaagcatgaygccatcatgaatggaatgctctctagaaaaggagcctgtctcattcagctttcaaaaacatttctttctataaaaatattttccaaagttgtgcaattttttgaaacattttctgggggtaatacaaatccaatccatttgggaagtcrcgtgggaggtttcctaatgggaagcctggtaatatcaggtgtttccctacagtgttcgcagggtctcacccctgtccactctgatgactctgactggcctctgtccgtccagcagggatctggcaatcctttctgatccataatctttattagaatagcaccggaggtacttgtggccaccagagctatgtagctcctgtcttgggccccaccccttaccaaactgttccctctcctgggcccctcaacaccactccttcaggatgactctgaagcacaggccgccctatctttacagtgagtccctcctgcctgtcctgagcactgaccagtgagcccaccgggtgagcagctgaagctcctccctgtgcccagcacctcggggcccccaggatcagattttacccagtagaacccaagaacctagaggatgggaaacacagctagcaaggaggtggcaggaggggtgcagatcagaggggtgagaaagggaggctggaggggcaggtggagcactcaggagttagtcatggggaaaacaacatgaccagaaaaggagcagaggtggggcctgtgaggctcaggtaccgaatgtctgtgctaagcaaccacgtgggggtcagcaggtcacccctcttctaaggacatccgtctccctagctgctcagtggagtcacctctgcaaggctctagggttctcgccatccaggttgggccctcagaagaaactgaaaagttctcgcacgaaattcatagcacactgaaaatacaaagggtggcagctgggggtctctttctttgggaatgatttgctcttagcccagcatcttgggcctcagctcggggcttcctgaagccgagcttccctggwgaagaggccccctattcagggcagctgctcaccaaygctcctgggcctcggggcactcaggaaacacccgagttaccctcagggccagaccgcaggcctggagcctctccttttgctgatgcacctgcatcagaaagccagacacctgctctagaaacctaggtaccaggtctaaaatccaaatacagcatcaggagcccaaatacctggttagaatccaagtccccattcagaaaactaagtatcatgcaacaaatccaaatacctcttcagaaactcaaatatgtggtcagaaagccaggtgcgtgcccaggcatttgtaataaccgcgtaagtgggagtcttcatttttctccagaacaagtagcccctttctgaaattcatcataaagctaaaaaataaataagaattgttttatttcagtgaggctgtagtgcatttttttaatgtgtctgctgtgtatatcacagtgtgcctgggatatctgaaaaagtttgaagttgccccggtcacagaatctagggtcctgattgaaaatgagcagagggttgaggaaatagactcactgaaattgcgtattcaggtctatgaaagacagagaactacatcaggggtgtcacagcaacccaggggctcctcttctaagtttcttaaatccccaggaaagggttttcttctaagacgtggttagaaggaaatgaactactaatcttgagaaatgaaaagtcaagttcggagaatggcctgacaattcgcgctatcagagagtgcatgttttctctaactcccattttctactttatccataatttatatgatgtgtgacacataacttgaagctaatgcgtggtggggccaccgcagagggacagaaaacagttgatgtggaagccatgcctgactgtcacagacggggatggggggccagggtctcagctcctggagggggcgagggagcccattgtcctgggatccccagggttcacccagcatgcatcgggtctcaggaacctgcgttgctgatggatatgtgaatgaggggatgaacaggcgtggaagaagggggagtagggagaagacagttgtatctttgcattcttcacagagcctggggcagcacttagcacaaacagggctggctacttaaaacccggggtcactcgttcaaaaggcaggaaaaaaagctttttcctttcttcgtgttctctctctggatctttcatagtggtgtgtgtgtgtgtgtgtgcgtgtgtgtgtgtgaccttctatttaatgtcacattcccccaggcactaggatactctcactgccttcaactgggcaggtagaaggcatccatccagcccccatcctccctgttgaggagttgggggagtctcagttgctggtcggggcaggaagtggacagtcaagaacccagcgggatggagcagaaggtgggccaggtgtgagttgaggggtcataccccggcacatgtcccattgccccaccagagttccctcacaaaacacaagttcagagataaaattcttatgacatatgaaggtagcagttacagagcattaaaccccaagcatgaggggctctcttctgagtgagggcctgagcactgctctgctctcgtgttcccgaagcccaccctgagtacgagaagtgagggtcagagccctgcagggtcctgcccatggtgactggcgaaggactttcttttccgggggagcacagccagagctctcttctctgattccatcattagtttctggaaaggccttccctgcccactctatctgatgttacctatccaacttccagccccaagttactttctgtacccccgttttactttatattgtcattaaagcacttaccagtatttggaactgtggtatttacccattytctcacccgcaagaacgcaggccccataggatagggatcccatccctctgtccccttgcacaagtgctggcatgagagaggcacccagtgaattttaggtgcatgaatgaatagtctttacgtgactttgtatccttttaggagcaagctggatataaataaatacatgaagtcaactaacacctccaagtggctcagtcaattttcagtgatttttctctgtccaacaccagactggcttcagtgatttctttcactgatgtggccacatttgttttgttttattttgtggccatgcagcccgatgtcgcaggggctgttggtcctcctgactccctgctggaacgtaaggragagcctcattccaggtctgcactggccccaaactgggccaagactgcacatttcagttcactttgggtttctgatagcagttctctccccagcccccatccctaggattcctaagagctaagggatgtacccaccaatccaagccacctactagcattgaacttctgtgtcttgaaaagggattttgttttgaaccagtcactgggagatgcgttctaaggtgagggcttccgggtcaataaacctgtaggtgtcgcccaccaaaaaaagtaaatctgacctcagcccagtcccatggtggtgcctattccatcagggcagagagtcagcagctggcaagagaggctcaacccccaccactcctgagagccaggaggccctggcattcaaactcaggcttcacagatccacacatctttgttctcagagaggagaacccaaagtgtgtctcccagtgagttctgaggatgagggaattatgaaaggcaccgtgtccacttgtgagataaaccgacccacctggttcctcatagtgggaggtggctcaagtgtcaagtggcccatgctacctggtcttcttggttttcttccatccgcgtccctggagatggttatgtgctttgcttcttactaaatgtatccagaagccaaggcaagctaggaggaggagtgggatctggatctgcagatccagaatagcaccgcaaaattacccagctggggcttagctgactgtccagaccctgacggtggggtttagaattggatagcatccaagcctttctgtgatttcatcagcaccatcatgcaataggttgtttaaacaccgatatgaaaacctgttttccaacgatgctgcaacatttgattaattcttctggatgggatatcaaggtggctaaagcaagcattgcttgcagttatgatgaatttgctgagtgtcagaggaaaattgtcaggccacaaactaatcattcttaggtgcctcatttagcattctgtccatgtttataccaactctacacgagcacacacacacacacacacacacacacacacacgcacgcaaagtattggagaccaccttgaactaaatggatttgacctctatttgtaaagggtgcattagcgtgaaatggaggggggctttctttgagggttcagcaagccatctagcctacatgctgctgtcttagatgccagccttggtcttaaagagcctggtttctaagggaaaattcatttcatggacatcttgttgccaggaatcagtgtgattcacttttcatttcaggatgatgttgagtcctctgtgttattcccagtgtggacgtggagtagtgactgatgtctaattatttggaagggagagagcttctctaagaaggacatgcaatgtcagaagcttccgttgcttggcaacacgtaactttacctatgtttcaccaaaggcagtttaaagggctaaagatgcccattcaggcaatagtagattacaaggaagatctcgaaagctggcccgtcaaaatcgctttccaccatagaaataaacacctaagagagggtttgggacgtgagtggttgcgtgttgcacaccagcaaacagggtgagaaagaaggcagtggkgccatttttccagaatcatactgtgtacatgccctgttaaagttgattcaaattgctcattccttacagtaaaacctccaacctgagactccccttcagaatgtatgcccctgcagcttccccagtttttatgactgtggcacctcactggaacccatgccagccccttcccatccagctagtatgcctcccggcattcggcttcagcctccagccttgtttcatgtcagcagctgagctcatgaaaactcttctttccaatgaaggaggaggctgagaggtgcaccaatggctggatccaggcacacgcaggctccgagttcacagaagcagggccatcatgtcccggctgttgggagttcctgtgaatgttgcaactctcatttctttttgaagtgggtgtgtaagaagcatgtctgttcattgtggcagcctgagttttggaggccccacaacattctttcctatgtggaaagagttttctttttaattcagaaacaacaaaccttctcagcctcaaaccaggccaatcttacagtgtcatggcaaaacaaagaaagaaagaaaaagaagaaattaaaacatgcaaagcaaaaaacaaatagaaaaaaaaagaacacagtgcaacagtcaaaatcaggttaacttaatgaatttgggccgaacttagatttaacatttccttgaagtttggctcccataaatcacctgtctttttcaaacagcagcctctgaagtacaatccagattatttctccccttttgatcaatgcttttcccgggaatcaaacccagctcttaagagcatttataatgaaagctaaagacagctgaccactaactggccctgaacacccaggtaaactctgagtttgcccacaaggaaaagttatggcgtccacatgctccaaaggggactccatgttcaaggtaatctcccaagtccctctgctgctgctggctgtgaggcatcaacatcctcccccaacctggactcaggggctgcagcctcagaggaccagcgtcgtrgagttcaagttcagttcagcacttgaatagtacatccttcaggaagccagggcactgaagactgaaaagcagaatcctaacattcatgtatattttaaagccagagttcacaaatcggagaccttaggaattaatataagtacatgtacatgtatttgtggctatgtgtactagttacaaataagagacaagaaaggagatatacaaataggagaacaaagcatattcaaaaatgaatatggcaaaagttcaaatgaatgtgaactaacaacaaaaaaatatagtttctcatttctaggcatattacttctgctttttcaaaaccatttctcaagttattgataataatacgaattctgtccttaaattgctyagtgaaggagagtaaattaatgtattttaagatgatctttctgttttgaagtcctgctgcttccgtcacatttacaccagcagacacggacacttccatctgtccccattcgtcatcactgtgagatgaagctaagagttcgattcactaagttttatatagccagtaccatgtgaaacacaggatttgatttaagtgtgtggtgtgactgcaatgggaagcagtcgaacacacagcagcaatactgcaccatcaccatgacaaccagtggaaataatggccccctttgggaataaaagagatctcaaatcctgttgcagtcagtagcgctggctgtctgcagtagagatggttttcaatgattgtttcagaaattccttatcaacagaaaatgaacgagacggggagttttcagaaaataaatggatttgcagacaacttaacgtcatcatcgaagtcaccaaagaaagcaaagcagcgactggggaagctgaggctgaagtagcaagggcatgccacccaggctgctattccagtcgctgtgaaagcctggtcactgtctttgccacgcagaacacatctctgggaatgctgtcgatctatgcctccatcttttaaaggctttccatttctgtctggattttttctttatgggaggcagaaataatagtgaattgaatgaaatggagtatataagtgtctagcacagtccttggcacatagaaagtgctctgtaaacagtacttcgcatcaaattcttgggatgaatgaaagtgagtgcctggcgctgcacataagaaaagacgtggcagcaaaccatcctcccgacatgacgtgctgcgttggtgcgtttacgtccctgttccttctgaaagactcaaaattgtgttggagctactggtgcacctttgtaagacctgcactaacgaccgcgccactgggaagggcacttctttatgaagtcgccgtattcccagggagactggtcaacccatacaatgtgaaaaaaaaagaagctatgtgaaaaaatattcccctttgtcatagagaaggagaacttggtgaggctgggcagctgcaggagcctcagtttttcagataacagaacagagtagaccttgagggtccatttccctttttgttttaggaagtgctgtagaagggggcaaagagatctttgatatgagaaggtatttcttcaaagcagcatcgtgcctgaaatagcattgttctttacgctgagagaggaggaaatgggaatttggtgttcaacgggtttaaagtttcagttacaagaaatggacaagtccgagagctctgctgtgccacatcatgcctaaagtcaccgagactgtgttgtacacttttttgttaaaaggtaaatctcatgttaaatgttgttactacaattaaaaagaagccctaggctgtgtttgcagaaaggcactaaccatacatgtgctcaagagcccttttgtgttttcttcacttcatgttgtagttcaatttagttttgctttgcaaggatcctcggaaagtgtatcatcagcaatgacttttattttagaactaaatgtgaaccacggggggaatcatgatcgacattgctcgttgtcctttcttcctccctgtgggctgtgaatccaactcgtcctgggagcagggcgctctcgccttctgttcctctccgagctcagtgcacagaagcattctgcttacccagctgggactgctgactgcaccatcgagcacgcaggttgcactgttctcagcagctacactggattatatgccgcctttcttactgactgattatgaacttaaaacaaattcactctgctgctgtgaattatacatttatttttaagcatttatttcaactcgagatgagcggtctctcctgtaaatttctccctgctggatctttgctctggtttctggtgacatagtgtgagtgccggcagccgcgagcctcagaaggaaaattacaaagggaatactcagtaaatgatgtattgcctttcgcatcagtagcctgcttggaaatgttcaaattatcagcccaggagactccagtgctgtggacatgggtctgaacgaattgatcacctaggggctactgagaacgcggtgctctgtaagtatccatggatgcacagcgcagacgcggaaagggatccccagaatgttccttctgttgctggtttagattgtgaggaaaaaatgcattttccatgagtctttaacttagtattaaatgttgttactggttgataatttaggaatgtcacagcagttctattccttgtcaactctgcttgagcctctctcccggtttctaaaatgtaacatccattagttggtggggtaacagtttggttcaaatgattttctgcctgttttatgtcttcattaaattgatacttaacgtataagtaatccctctttcacctaaaataaaagagctaaattttctttaagcaaacagaacacccttagaattttggacccgcacccttcaactaacatgaaaatgttagattcattttgggaaatattttatatggaagctgactaaccaatgatttgaaatgtcacaacacaaaattggaggggagattttctctagctgcgtttcttttctctctctctctttttttagaagcatactgcttatagtttaagaccatatcctagtgaatgaatagcccaagttctcagagactgtatatttgataaatgctcaaattgtttttaaattgctaatgctcccatgtgggtaagctcagatatattatagctcacctatgaattggttttgatacttatgatgagaacagacttcctgctgagaataaatattagatttcattctatgtggtacttcgtttaaatcagtttatcccygaaccttggtttctttcctacaaagtgaaggaggccctacaagctcttgcactgcactcagaggaagagtcgtccctggcactgtaagaattccaccaagcctcactcacttgggcaactgcccagaagggctcagcagtgttcagacacctcatgtctcagtaggtgaccgtgcccwtggacaggaagctaccactccagggccgtgctctctccattcagagtcatggatagtaggagagtctttataaatctgaactctgcatgtaccatcatgagtggctacagttcactctcaacatttgctgtattttgttcacactaagagagaatatttggctatttcatattagagaaactaggctaaaacaactaatcacgttttacctgtaatgtgaaagggcttccattaccttctaatcaacttatgttccatcccagttactctgtgtgcagagagatctgagtgtgtgtgtgtgtgcatgtgtgtgtgtgtactatgtgtgggacatcacatggaaaccagggaaggaatgcatttatagaagtgggaagttctcaggaagtcttcagctttggatctgctttcacactgagcacttggtgtcagtgtgctggagaaaggctgatagtaagtaaagtgtaggcacggctagggcgccggaactttccttgcatagtattttatcccagtcacgcactgggggattgtggacattttgtcagacccccattttaatggaaatttaaatccttccacccccggaattgcttcttcggggctgttcagtgctgctgtgtggttcagtggcctgccctcgtccccaagagtgcctcctacttcaaaaccccaggccgacccccagtacagtgcacaggcaggggctggcagctgctcaggtcccctgttcctggaggaaactcctcatagaggcaaattaaggattatgccctcgcttttctgacctaggggtctgccatgggatgatgacatgttctgggagataacgtatgggaaggttcttagtattaggagctgcggaaaccaggatgctgtggaaaccagccacatgttagctgggcaaacgtaagaaagcacgctgtcatctggagtaaggggcactggaaacatcaccggggccctatgggttgagaaggctgtgggctcacctggtttctcctctctcccgtccctcatcagtaaaccccatgaccctttggcagcagcaggggagatggcagtgttgcctctcgcctgatctctgcaggctggagggctgttctgtcgctggctctgctcgtacttggtagagcacagccactgcctcgggagcacagatccaggccgtgccgaggcaggactgtgagccccagttgtggggacctccggggcagccacggtctcagccgtcgcccccgctgacagccagagcctatgtgtctgtggagggaagagcaaagctgtcagcatgagtatgtgcatattcagctgaccctggactgctcctgcctgtttatttctgctgtgacctcagggtgctgcgggcatcgagggggaacaaggccatcaggaggaagtgggcaaggacaaaattatttccggggagtttgtataaaggtggtcatttgcaggggagctgcctagggagggggcagggaagacactgctgttcaggaggaagtcagtagtggggagcaccctctatctaattccaggggccctaccaatcagaacaggtgccaaggaaggaagatgcagcagtgcgtaggtaggcaggaaaagtcagtgataccagaaggatggatacaggaagggccagggcctgctcctggctgctggagccctgcgtggcacatggygcaggctcaggcagccatgtctgaatggctgaaaatgatctgatgaatgatgcaatgtcaattgtctttgcagtgtttgggagtcacatatctttttttttttttttttttttttttttttttttttttgagacagggtcttgctatgttacccaggctggagtgcagtggtgcgatcacggctcttgacctcctgggcttaagcagtcttcccacctcagcctctcaagtagctgggaccacaggcgtgcaccaccataccggactaattatttttattttttgtaaagatggggtctcactttgtcacccaggcgagtcttgaactcctggctcaagtgatccccctgccttggcttcccaagatgctgggattacaggcatgagccactgtgcctggcctgggagtcatatgtcttatggatgttgggttttgtgcctctgcagatatgcatgcacagatagaccatttacagtcctgaagagcagagtgggctgtggctcagacactgggttcaaatcctggcttgtcacttccttcctgacctcgggaggtgacttgactgctgtaaggtagtatcctcctcattggtgatgagagacatagctgagatgattcttataaaccactcagcacacgcctgcacgtgagtgggccccatagagtgtagctgctgctgttgcggctgtttccctctctgtgttctcctaatcacactgggtggttgtcattttttatttcactgggaaaaaaaaatttaagtcagctgtactttgggaaaagagatgttaaaaaatgttttccaatacattaaaaatattagcactgttgattcttttagaatcatgctgtctaactcttactttgaaactatactctgttacattcatcctggtgatactgtttaacaaaaaggaaaaagaaaaaaaagaaagtagcataataatatccataaacagtttttaagtgtgaaataatcctgaatagctagaaaattcagaggacattttgcaccatgcatttgtggcagttcacgcgcggacatcaggctctggaattctgccagtgttttaaaattagaactaaagaaatgcgccccaacttaattagtataaatgttgccgtgcaacttctaataatgagtgtaatttgcaatacatgctcaccatgtaatttagcacaatggggcccgcagactgtaggactagtgtttaatcaagagaaatgattaatacagaaaggaacaaagtttagcaattggaagcctttgcaggggcctcatggatgcccattcrgatgctcccatttatatcaccccattggcaacaccccacccattcccaccccagcgcrtctgccaggaccacagagaggaagccatgtcatctacttagctgtaggacaatttacacatgagtgggtgcctcagtttccttctctgtaaaatgaaggtgataatggtcctaacctcttattgttggggggattaaatgggtcaatgatgtgaagcacttagaaagggcaaaatgtgctgcgtgcaacaaatgttaggtgttaataacgatgatactacccttatgatcatctttcaagagtcattctccatggggatcttggatgccaggctgaggagggtgcccttcatcccaaagcgcagtacatgttggtcctggggtgatttatctttattgaggtaaaattcacataacataaaattcaccgttttgtacattcacagtgttgggcagccatcrcctctacttagatacaacatattttcatcatccaaaatgaaacctgaacccactaagcaatcaatctccatttcccccttctcccatgctggcaaccgccaatcagctgtccatctgtattgatttacatattctggatattttccataaccatccagtatgggaccttttgtgtctggtttctttcatgtagcatttgttttgaggttcacctgttcggtagcatgtatcaatatttcattcctttttaggctgaatcatatctcattgagttactgtgttttgtttactcattcatcagtggatgaacttaggttagtttctgccttttggctatgatgaattatgtgctattacgataatcatggatgagtttttctttgaacacattttcagttcttttggatatatacctaggagtggaatttaaacatcattttatggttaaattttgaggaaccattaaatctttccgtggtggctgcaccatttgaattcttaccagcaatgtctgggggttctaattcttctacatccgtgccaacactgggcttccttttatttttttctaaattatagccatcctaagagatgtgaagtggagtgtgattatggtttgggtttgcatttctttaatgaatagtgatggtgggcatcttttcatgcactttctggctgtttgaatgacttctttggagaagcgtctattcaagtccttggcctgttttttgggtttatttgtctttttgttgttgagttgtaagagtactttatgcattctggctactacgtccttacgacataaatcatttgaaaatacgttttcacattctgtaggtcatcttttcactttgctgacgctgtcttctgatgcacaaaagtcctgagatgattctagacagagactgagcatagtgatgaaaaacattgcatcataaagggaaagactccttcctctcttcgttctcttccacccttccgtatacccagagagaaaggctcagcttggtgctggtgtggccttaacacccattcaatccttgctcatctacctttttcacaaagagagaacaggctctaacccaagagccttacacagggccagccaggaaattcatagtctgtcttccccatcttcactggtgatactcggcctcctatttatactaatgacaaagagttttaacataatgtatttgatgtctgaaaaaatgggtgagtgatatgataaggcttgtgagggtgctaagagaatagcagagtgtgagaactgctgctggacacctctgggcgtccccgagcaggtgacagatgggggatgcccaaggaccctcagtctggtgatgggatgtggggcagagggaggacgctgggcaggccggccataagccagcagtttactggaaatgtaatggctaaaacaatagaggtgtgtggtcccgcagttccggaggctgcaagtctgaagccaaggcgtcggcagggctgtgctccctttcaaggctctgggagggattcttccttccctcctccagagtccattgggtcccgcagtccctggcattccccagcttgtggttgcctccctccagcttccacctccatcttcatgtggccttcctctcagtatacatgtgtgtgccacctcctcttcttataaagacaccagtcattggattagggtccaccctaatccatgatgacctcatcttaactaactacatctgcaatgaccctatttctaaataaggtcacattctgaggttccagatggtcatgaatttgggggacactgtcaacccccagtactgcattgtttgcagctggctgatgacccattcccactgaaggtcttgaggcatgactgacaccactgagtttcccaaaaccaacctggtgcatccactttcactctgaagttctgacctaaattggcattggcaccatcagggtccctgggtatttcacagaagagcggggaagcagattttcacagacaaggttcaacctgagcacaggaattgtacgcctaatcacctaatcaacttgtaggtgcctctcaggtacttaacgttgacttgaaaatcattgcttaatttaggtctgtttcctgtctgaactaaatagagtccaggaggtttatagtctttcatgcttgctaaattgtgttttacttggcttccaactaaaaatgagagatcaaactatacttacgctatgttgatacagagttccgtctttattgcaaacttcaccacgtggagctggaagacgtctgagttcagggatcatgtttttgtctttgtttgcctgactctgccagacctggggtacagcagcaaggagacccataaacatttggggggataaaagaatagagaaaacatagtccgggtgaatgaaggggcctttcctgcaccccagagatggtgtcaagtcccacaaaagactcttttataccagaagaaaagtatttctgtcatggctctgccataaagtattctctctcctccttccaacctccccattgtcactgaatttcaaataaaatgatactctttgctcaaaaacgacaccagagtttgatacagctcaagtacaactccacggctcctagtcaggtcaactcttatttgacctgaacattgctaagcacaattgaataaactcaaactctcactgcctatttcctattttcccattacctgattttctagaagattgtgacatatatttattttgaggtttctctctctctcttttttttaagtaaccaagcaaggggttctctctcaaaagacatacaattctgtggctctacattgataaatatttgaggggatgtggctgagtgtttatagagacctgggtgggggaaaaatactgctcaactccaaccttttttcataaaccttttggctagttcattcactccttgaacaaatatttatgaagcacttattttaatgacgcaagggtttttccaggtaggccagaattaaaattaagttctgagtggagatgtttagaatccacaaaccacacagtattaacctctgttagtgccaaaataatccatggatattatttgggtagggggaggagttaaagtaaatatttccaatggatttctggaatttacaaaatgtgtgtccatttatcctgaaaggggatgtttgtctgtttcaatagagcttcccatacttgtcccgataaaatcttacaatgtttcagaataattcccacgtcttatgagctatgaccctggagatgtgggtttctgaagtctggttgctttcacactgctgggatttgaattcaggctctgccgttttaccagctgagaagccttaggcagattacttaacctctctgatcctcagtgtgcacagctggaaggcaggcaccatgagagtcttgtactgtctcagagagctgctktgggatcagatgtgttctgtagagaaagcgccatgaagacatcatgccctgatcagcatccgcatcttgacttttgctcatctgtgcaacttgctcggcttctgtacatgattgtctctgaaataagagggcaccttctgcctcacacaccttgttcctacattgataaaccctcctacatcccaatactgacttagggatggaaccccgagcttctcatcacacctgctgcttacaggggttgcactggggctggtagtcagcttcctccaggaagaaggcatctctcaccactggggaggcacaggaggcaccacgccacgtgtgcctgtctgcagagtcccctgcccagggtacatgcccctgggaaaactgcccaagggaaacagtgcatccaccatctctgtctgcagccccgctggctcgtccgccctcgcctccctccctccctttcaccctccctccctctctccctcattccctccctccctccctccaggtgcctttgcagcctcagggcattcacactgcacctctggcctcctcctggagcttctggaaggtgagataaagtccctgggatgccaagctctctctggacctgaaaaagcctcccatcaaggagagaaatcctagagatgcttagcaaaagtttcagtagccagggataatgtcaaacagccagtcccgggtttctaaacccagttgatcaatatcccctttattctagtaggtcaggggactctggagttgggggtggtatttcctgggagacagccagcctgggctagtggagcatcccgcctttgcttttggtrtgggaaggagcccgacacacctggtctttctcaactcctgcaagtcacgtcttcccagaatctactgtggtaattccggccaggactcaaggatgtaagaagtaggagacgcaggatcaggggcacagagctgccagccctttctcagaagcacatcagctgaataaatgcaccaaagcctccaggcatccagcctgtgtcctcatcctgccagggcccctgctcctcctgtcactgatgaatgcagccagtcagtcaatcaacaaacctgcrtgaattcagtgcccagtgctaagtcccagaagtgacagagagacagagagaggagtctctggtctggctggggctgggttactttgtttcctgcaaatcttaccaggagtgcaccttgtcagtcaggggttgcttggaaactcagtcctggaggcccggccagctacagtgtcacctccaacatggtgctggctgtcaccgcaagccacagaagcaccttttctcctggcagctgggagctgcagcatccaggaggggtctcactgtccagcagcctgcacattctggaggttcatatctttgggactgaaaattggggtcccctttaaatttccgtctcctgctcaggaatgtcagtgcataataagagaaataaaatggattttgttgccttctcgtttggttgcctttgagccaacatattttaaagtgtttgtttacattccagaaaagggtraaacatcaacggcaggtgagcttgatgttctgttaattcctgagagatcagggatgttttcttgtgttcgtgaacaactcggggagagctgaagggtgcggcaggttctgtgagacttggtctctgcttcagggcacggagctgacatttgcaaaggccccctgtgtgccagccagtgccaagggcatgcttcttccctgtggagcttcccccgaggtgcagcgaggtcactattgtgcctgttttactctgagccggaaagagctggcccagagctacacggctggtggactggagctcgggtcgtcctgaacttgtggcccaggctctttgcagtgcgtgtgctgcaaaggacagccctgaaagatgctgaaaagaattcagtcatttaggttttaaaacttgggctttcccagctccttcattgtttaaatatcaccaatgaaatggaggaaatttatttagcacataattgtagtctcgtttcatatgaagacaacaacatttctctcttgtttctgagtggtggcctcacccccctccatggccaggagtcagggggacatatgagtcaccgtccaagccctgacccttatgagagaaagcaggcaagactgataattgcactgagcaatgaccatgagctgagatggtctggaactcacaggggcacgtggtcaccctatttatagaacatcttacagtgatgagggccattcattcattcactcactcacttattcatccctcaagtccttctgggcagcccctgggtgccaggccctttgctggccgtaaaccaggccgacttgtccccagcccttccagcctggatacctgagtgggggtggtttgtagcccctctgttctcacaccagagattacttcccattttataggttgccaaatgtacatgagcgcccacacacagaaaatggcagagcccagggactctgaagcctggtggttgaggtatgcccagcctttgctaaagacagcagagaatagcttggcttggggaattgaaattttttcttgcctgagaaatatgagaactcctccctttgccggggcacagatcccatcaccaccaggtcagggaagagaccatgcggttcccagcccagtgctctctgcctttttctctctcctacttccttctcctctcaactttagatccccagccacaaccgtcaaaccctgttccttttcttttcttttcttttcttttcttttcttttcttttcttttcttttcttttctttccttttgagatggagtctcgctctgtcgcccaggctggagggcagtgagggcagtggcgcgatcttggcttactacaagctccgcctcccgggttcacaccattctcctgcctcagcctcctgagtagctgggactacaggtgcccgcggacacgcccggctaattttttgtatttttagtcgagatggggtttcaccgtgttagccaggatggtcttgatctcctgacttcgtgatccacctgcctcggcctcccaaagtgctgggattacaggcgtgagccactgctcccggccttaaaccctggttccttaaacagctggtaacccatccattaagcggaaggcaggcagaaggttcgtgtcccaggagccacccgtcttcctgaattgccacccctgtcctaagcatgacacttcatttgtacatacttygagttatagtctccagaataattaattttaatatttatggaagaatcgattccgtgggaagaaagccaatttcctgaacatggcatgcggtttaatgggtaattctctctgtcattctaggcaagaaaagtccatttgggtgttaaatttcttggctggggtagagataacagacccacagattgtaaaattccaggctgggacatgggtgtgaggatgacttttgggaattcagatgaatcttagaatgctagttcctaattaatcactgtaacacggcgagtgaatggagaggaaaagctatttaagaacaaatgtttgggcattggtgaagtggttacgtttctagagtgatcctgcaaggatactggttgaggtgactgggggaccccggaggaggcgcgggttaggaaggttctgagcgtggcctgggcgcaccaggcgggtgcgcggtagacgttcctgtggcttacccgacggtgccaccttctggtcacctctggcatagcacccgggcttcaagcttggcgcatgcgcggaagcgtccccgtagcccgaccccatccctaatgcttccaaattcaggtgctaagttgagcccataaaatgcaaagttataacaccatttcactagaaattccttttaggacactcctgtcactctatgcttcctctatctgtcctgttgggctgtgagcatcctakgggctcccccctccaccccaagagggtgccatggctggtgcccagccaagctcagcaactgtgggtgcctcacacgtgccagttcacaggcggtggcctaaacacctggaatgtggctgtcactgtccccctcccaccagctcagagcagaacctgggccagagagtccacctgtgtcctcacccatcctaagggcggaaactgtcccaagatcagagaagggaaaaacctctaagagacagatgacatgcccagggtgacaagatagacagcccaggtgtgaacccaggtccacctgtctcctggctcagagtgacaagattgtgagcctgggtgtgaacccaggtccacctgtctcctggctcagagtgacaagattgtgagcccgggtgtgaacccaggtccacctgtctcctggctcagagtgacaagattgtgagcccaggtgtgaatccaggtccacctgtctcctgtgttggggctcttttcagagtgctggccgcctcctggagcctcccaatgcaactcacctttgcaactcaagggtgattttagggcaataaaatgctccaggatagatctgaccttgtggtcactcaagagtccagcaacttcctggccaataaaccaaacttctccttgccctgcacctgtgaggtctggcccatcctccccatgagcctgagctagtaaatatccagtgtcacctgctacccttgctttgctgagaagccccagatgaagctcctcaccatggcagcgaggcacccacccagccttgggagagaggctcatgccatcagctttgtcctaacagctgtgctgttgaacgcctgggtttctgctcagctcaggagtcattaaggtgcacctgctacttgctaggcatggacgaggcatcatttcctgtccttgggagcttcacaagagcagaggtgggggctagctctggtggcatattcagcacctaggacacctatgtcaaatacaaggattccagtaatttttcaaaaggttggcaccagccactccccacaaccctaccttgaacccactgaagtctttttcaggggagtgtggtctcccagttagactagaaatccctggaaggcagcaaggttgtcgaatctggttaattaaacaaggcctccttccctgctctgtatccagaagacagtcagtaaatatttgttaaacaaataaacacatttctattactggctcttggtcagtaaaatcagcatttctttaaaaattcatgagcgccgtagtgcttcccactgtgagagcaagccatgttatgaaattggcatgaattttctattaaagagaagagtctatttaataaaatactcccaaagggtagctttttgggttactgctgtgctgcattataattttctataattacatgctgttgactgtagtttaccaacagagtgtcagtaaagaaaaacgtaaccctggaactgtattacttcaagtgtgtagccttaccaaatggaaactcatcggttagctgggtcgagggtggcaaagagagtgttctccgaagtcgtgagtagaggaaacataaagttgccctgcagctctcaatgtgtgcggtcaaaacaaatagctggggggatctgttaggaaacctgttgggataatctagaaatggagggagaatcctatcttggagcgccactgggggctgctagtagaaaggagtttgatggacagcagctttaaggggcagcacctgctgagaaaagcaatcctttaaacggtcacatggtagacagaggagggatgtgctatgatctgaatgtctgtgtccccccccagatttatatgctgaaatctgatcaccaatgtgctgggttgaggaggcggggccttgggaggtgattaggtcatgaaggtggagccctcttgaatgggattagtgcccttacaaaataggctccaggggacctatttgttgaggacacagcaaaaaggtcttgaacaggcagagggccctccccagacaccacatccgctggcaccttcatcctggacttctcagctttcagaactgtgaggagcttctgttgtttacccagtctaagatattttgttatggcagctgggctgactaagacagtgtgtagagggagtttcccgaaggcagggctgtgtttgttgtgttcacctttgaatgcaagtaggtgccagtaagtagtggaatgcatgcatgtgtgcgtgcaggaggctaccacggaattagacaagacccaatgtgcccctacctctgccattctcttgaagtgtgcctcaggccaaattgcctgtcctctctgggtcgtggtcatctctgttctagatgaggattctgatcctccgtcccagactggctggcaaagcaggagatgcaccaccctaacaagtctgatgaggaccagggctttggcagggaccccagctccacaggtcccctccaggcactggcagagggtgcgtcccctcacagctggggtgtccagggaggttgtgaagcagcttctctgagttataaaatatggagcgttctctccttagttgcaatttggggtcaaatgttctcccaaacaaccggaggagcagttataaataatgcatgcacattgtttggcccaattaacattcttcagaagatgggggcaattctttgaagtctcttccttcaaacggcgtgtatcgagggggacattgacacacccctgttgggctgggccaagcttttgccctaattagatatttacacaagagacccatgcgaggagggcggatttatttttaataaaagaagattaaaatctgtgtatctgcagcatattaaggaagactgaacyaaattaaaaattctcccacaactttgaatagtgggggcctggaaaaggaagcatttcacttggaatttactaaaagttgttgctttgagtcaggaagaaaaaaaatcagcaatcccccatcccccgtctcaaccccagcttcaccttggcttgttggcgctcccagtgagggcactgggggtggtcagcggagccctctgcatttgacgagccactataaacccaaaccctgtggctgggcgtccatttgtggaactgcagccccaggctggtaggaaggagacagtggagatgacatggctgggaatgggatggggtgggggccatgctgacactctgcaagctcagggaccagcccagagggtcacacaagagtgcatgccacacccggtcttcccgagagaagacagatctccagactttcatgtggactcctctgattctaaatatttcaaactaatttaaaacctttgtaaacatatatacttcctcttccaacctagaaattccacttacggttgttgaccccaaatacatgaagaaatgtgtccacaaaaagacctgtacccaagcattcatagcaaagacctgtacccaagcattcatagcagctttgtttataagagcaaactaactgaaacaactcaaatgtgtatcaagaggagaatggggccgggcctcgtggctcacgcctataatcccagcactttgggaggtcaaggcagaagaatcgcttaagctcaggagttgaagaccagcctggacaacataggaagacctcttttttttttttgagatggagtctcgctctgtcgcccaggctgaagtgcagtggcgtgatctcggctcactgcaagctccgcctcctgggttcacaccattctcctgcctcagcctcctgagtagctgggactacaggcacccgccaccacacctagctaattttttgtatttttagtagagatggggtttcaccgtgttagccaggatggtcttgatctcctgacttcgtgatccacccgcctcagcctcccaaagtgctgggattacgtgagctaccacgtccagctgagctcatcttataattaaaaattggccaggtatggtgccacatgcctgtagtcccagctactcacttgggccctggaattcgaggttacagtgagctatgatcttgcaactgcactgcaacctgggggacagagcaagaccctgtctctaaaactaataaataaaaggggagagctggagagcagatggcagcacaatcacatgactgtatgctgttctgcagtccaaaggaatgggctgcggtgcccatgagaaagcggatgggccttgaagcctgtggcactagagaagctttaggacacgagctgcgtgtttccacttagaggaagctcaagggcaggcaagggcatcttctctggaggtggagatcagaatggtgtgggcttcctggggttgcaggaggggactttttggtagactgaaaagggacaagaaggaggtgtctaggatagtgacagatgttcctccaggggaccagggcatggaccatatgggggtctgcagcagacatttgcccaaactcatcataccgtaggcttaaggcccatgcacttaactctatgtaattacagcttttcaaaaaatgtaaaactttcaaaacacagaacaggtcaaacccagtaatacaggtcacatttagtcagcgggacccaatttgcagcttctgttacagtaaatttgtactcttatgttaaccaggcacccccagcccccaggtggagaaacatccttcaccaccagccatccatgtggtgagaacctaaaactactctaaaagcatgtctatttttttagaccagtgccactatgcctggccaattttttttttttttttacttttttagagatggagtcttgctatgttgcccaggctrgtgaggagacagctcagggtccagggaacagcgtgggccaggctgacggcggtgagcagagggcagttcagtggcctgggaacagcacccaggtggccgagatgtgtcggtccctgggaggttggcacagctcagaggggaccacagggacagccagaaaggtctcatcccaccaaatcactgcccacccagtggccccagtcatgctactgttttggatttgttggtatgacttgccttttcacacaggtgagaggaacagactcaccttgtttagcccaacgtggctgaggcacagcagcttcctgccttcctgccggggagacctgtggccgctgtggagccggtgccgccctggccttggctccctctgccccagaccaaatactcaggggtcctgtgaggtccctcccactcctcctttaccttagaagagtttaggaaatgtgggtggaagatgaggcacatcttggaaagtgtaaggcagacctcgtcatgcacacgcattgagcacctgctgtatgcgagtcagactgcagaactgaggggtcagaatgctgggaggagacagcccagcatccagtgagcagcgtgggccaggctgatggcagtgaaaagagggcagttcggtggcctgggaacagcacccaggtggctgagaggtgctggtccctggagaggttggcatggctcagaggggaatggatcaaaagagtttggcggggcaagtggggcgggcattaagaacattaagaagagctgagagctatagaaattggaggtaagaggcctggcacgcttgctggatgggccagtgtgcacattgtgagggctgctgcccgagctggcctcaaagaggagtctgggttcaactccaagggcagtaggacagggtgagaattttttttctttctcacagacattttttagaggagtttcaggatcacagcaaaatggagtggaaggtacagaatttccatatgccctccccacacaggcacagccttccccaccgacaacatcctgaaatggaatgggacatttggtaattggatgacctactctgggacaacgcagtcacccagagtccatactctatgccactctcagcctcggtggccacattctgtgggtttggacagatttccggtgaccaggacccgccaatgtagtatccaaggggcttcactgccctaaaaattctctgtgcaccgaggcttttggaggcgcagaggctttcactctgaaagctgcagggggcagttagaggggtcaggctggaggctgtggtacaggaggtgggtaggcctcctcccccagcctggctcagacatccactgggcgtccttccacaaaacgaccttctcggagctccactcggactccactcgggcrtcctgcatgcttcgcatcacacacagggacaggtgagggataaagtaccyggcaggagcccacaggggctgtgacacaggagggtctggcacaaactcgctgggcttctcacgcccacaacagatccagtgcctgccctgcagagcccagcagcccgggctgagagtggaaattcccagagcaactgagaggggtgcctgttccggaggtggtaggagctttggggctgggggcgtgggaggtaggagctttggggcggggggcatgagagtgacttctgaaactcggcatcctctgaaacctcacctctaaatcgcacggcacattccttcttgactccagctgggccagaggctccctcccggctgctggatgctgctcctagcagtgctcatcacaggcaccagacccccaggggctggatggacccatctgcacagcagttccaactgcatctcacacacgttaccatcatctcgcagatctgtgtcatcctgacgcttaaatttcctgtcttgtggtccaatcaaaataggtcttactgacccagccaaaatctatattcgtgaggctttgacgatgcagatgtttcctgctattcctagagcaggaggcggtgttggccgaggccctcgccaacagctgttcccagaggaggggggctgagagaractcggagggaggagaggccgcctccccacagcctccatctcctctgcgaccagggaccctcactctcctctgctgaagcctaaagctgctcccggccagttctcccagatcagcaccctcaggaaacctcaagagttgaaaaccaagacagccagaaaatgggggcttctcagcctagtggggagtactgagccctgggctctccaaccctccaagccactccagtccccatctctcacactctctgcatctctgtctctctctctctcacacacacacacacactcacacagcacatacagatagacacacagatacacagtgtttcagcccatttctacagaaatgactaatgtgcacactgcaccagggaaacaccacattgaaatcaaggactccagtgggtcaggagccgagggtgcatccacattgaaatcaaggactctaataggtcataagctaagggtgtattattttaccccaggcattggggcatcccctggtccctgggccccctctcccctcccagccccagacaggatcgtgcagcggttccatcaggacttgggaagctgagaggcccgacttccaatcccagccctgccccttgctcactgcatgacttgggcccattgcttggcctttctgagcctcagtttccccagctgggggagtgaagatggcagttcccgcctcataaggttgtgaggacaagacaagaaaacgcgggtggatcgtgtaggctgacgcccggcactcagaagatctccacgcgatgctgtttttgcggggtcactgccctcctctcatcccagcgtggcctcagccaccaggaggcctagaactctgggaaaggagcagtcaggaccggacatggctctaggcttttcttgtttctctaaaatactcagagtccagggtccttcgtgggatctgccttgagtagccagagctggcacaaagggaatgggaaccctgaacacgggtttgccattccggggctctctggtggtgtgtcctatgtcagcccattcattcattcattcattcattaagcacgtgttcatcagctgccccctgagcatccaccatgtgcattaaggttctccccaggcctctgttgggcggggagctcagcctgaagccaggctgtgagtgggatgggagggggtgccagacagggtcctgcgagaggtgttgggcccacagcacccacggtgcctctcccagaggacccctgcccctctcatctgggcagtgaggatggttggggtggacggcctggctttgcccaagcccagagcaatggtcccggtacagtgattgttattaagttctcagagaaatgcccagagtccctcaggttggtcgacatgtgttccttggactcctcaaaggctttgccagagggtggaggctgtgtgtgtgtgtgtgtgtgtgtgtgcacgcgcgcacgtgtgtgtgtgtgtgtkcgtgcacatgcacgctggacacagggctgtggcgtgattgtcagatcggaggcagagtaattgtgctcaaagcaagaataattaataagcccacacttttccacagcrgaccttcttattaaagtatcagaatttaagcagcccaatgttgtacatatggatgtaaatgagatacacattgtccatttgaacagctctaactttgtttctgtctcaagtggtacatctgcactaacacaaatccattttttacttgactttgatttgctgattaatattatgacgctgagttcaggtatatgatcaggttacaaatataatcagtttttcactgaatggctgttatttggtttccaataacagaaacctgtttaaggatatttcaacaaaaaaacaaacaactgctgagtcttactgtggctcagtatttgggttttagtacaagagtaactagataaccctggacgtattctcttcttggtttatattttttaaaaagaaaagaaaaacagctcggttttgacattaaggaaatggccggtagcttctggtttctctgggcagccctgctgggaaatgctggtccttactcttctgctcactgccctcctggtgtcccagtggtgggataatccagagcccacctcagacaagttctaacccagatgagctcacagtactgccatcctgctgcatcctgagcgggcagtgggtttccagcgtggggccccattgtgggtgatggaatttagaggaagcggtgtgatttgataggggtggttcagccatagctcagccctgtgggtacagtgtcttttttttttctttttttttttcttgagatggagtctcactctgtcgcccaggctggagtgcagtggcgcaatctcagctcactgcaagctccgcctcccaggttcacgccattctgcctcagcctcccgagtagctgggactacaggtgcccgcccccacacccggctaatttttttgtatttttagcagagatggagtttcgccgtgttagccaggatggtctcgatctcctgacctcgtgatccacctgccttggcctcccaaagtgctgggactacagacgcgagccaccgcgcccggccgagtgtctttttttcaggtgggatggtggtgaactcaataagagataattttgcacatcaggctagaccctgcatctgaagtggcagagggcattcattctscaggtgccacacaggcctctgaagggactgtgacctcctgggggcaggggtgtgctccccgacctcctgcgagcctccttagcactgagcaaaccgcccccctccccgtgttcagggatattcgctgaaatgagccaggtgggatttaatggactctgagtacaactgtgtagcctcaggttgccttcagcatccaggccctcggggcaccgccatgctccccagaacatgagctctcagaaaatgcagtctgtacccagcattagcacaatcagagccctggtgagaaggtgaaactactgtccttggcctccaaagcatagaatgcccccaagccaatgagtggtcatgaaatttcccacctcctgttcttctcaccagtcagtcagagacagcgcctgctgtgagactgtgccccggagtctcaccacagcaggtcacgggaccacaggtgcctgctatgaaggagggaagacaggccaaaaggcacagaaaaaataatcttgcagttctaagtttcttgctgtatctcttaccacgtgcttcccgtgaggctgcttttggctggagggtcagcttctttgactctgatggcgagtcttcattcctgttcgaggctttgatttccagtagttggccgcaattttcaggactgatcctagagtatgcattcaattattgatcatcaatagtttattgtcccatcactgcgtctcccctggacgcggtaatggaagtattggtttattcatggatcctgtttgaaggacgtgacaaattgattttctgacacagcccagataaagtcaaatgaaagtcacaaggtagaagaggtggtcttgacctgatcatcacattgaaagtgtctttaccatgttcggaagccctggagaatctcacagcaccacccaggcccctcctgagtcggcagcactgagtccccaggtgcacctggcaccccgctccctgagaaccactcagacaggacctgagacaatgcccagtgaggaaacaaggcagggccagggctgcccccaggccttgtgaaagtgggagctgtgcttctcacaaccttcctgtccctgaagggggaatcccaaggccccactgggcattgtccaggcgttttgtgaagctcgggtccagaacaggagttgcctggcagctttggaatcgacggcccagggcctggcctgccccgtgctgactcccccagtgagagggaggcacacacctccctgtgctcctcctggtcaccctcccacartttcaytggtgctgctgctctggactctgccctgcacctccagaggcccctccagaaagtgcaagaccatgagagggccctgactcacaggagctcatgttcaagttcagagagaaaagcagacagggaggcacacagcgcagtggatggccagccatcatggccagcggagacagctagcagggcttcccaggcgggcacaggggcctgggaggggcgctggaggcaggtgtgatgccagagcggagtcctgtgaacaagggccaggagatgacggtcgattggaaagaaaccgccatygctgctccaaagtcacccttggaattgtagtaattttgacaggctgtggcagctgaacatcttcattaatgtgaagacaatcatgaagacaatgaaaatgactctgaccacctgtcccagggagtagagagcgccatctgcatttgctacagtggcccccgtccgtggttccacttccacagtttcagttacccacggtcaactgtggcccaaaatacatgagtagagtgaacaagatagtttgagagagaagagagagaccacattcacgtgacttccatgacagtatattgttagaattgttctattttattattgttgttaatctcttactgtgcctgatttataaaataaactttatgtaggtatacatgtataggaaaaagcatagtatatatacattatataggaaaaaggatagtatatatacatagtatgtataggaaaaaggatagtatatatacatagtatgtataggaaaaaagatagtatatatacatagtacgtataggaaaaagcatagtatatatacatagtacgtatagaaaacggcatagtaactggtctaaaataggtgagtagagtacaagatactttgagagagaagagagagagcacgtttacatgacttccatgacagcatattgttagaattgttctattttattattgttgttgttaatctcttacagtgcccaatttggaaaataaactttacgtaggtacatakgtataggaaaaagcatagtatagtatatctgtggcttcaggggctcttggaccgtatcccgcacagataagcggggaactgctctacataaatcgatggtgctttccattagagccacggcagtttctaaaggaaaaagtaacaagactgcaaaagtattgagggcagtgtccttggtgtctgtgaattgtrgtttacttttgtctgtggaggttaaccttgctgtcttcagggcacgctttcgtgatcataaatagtctactctgtaataatattttggtcttggtaagatccaaagactatcccaaacacaattatcttgtcactgcttaggtggcaatttttaatgagtaaagrattcaaccggtatcttggtattggtggtattagtggtatatattatttgaaatgacaatcagctactacaaggatgggaaaaattaattattggtaatctttgaaactcatgaagaattgtgagacattgtacattgttctcaaatttgagattaggtaaggaaacctttgtctttcatctttggttttatgtgacccccattcaggaacgaagagttatcactttaaggctctcaagggcttccttgctttgttctttcaagacaagaaggataatttttctctatagggaggaaatgtatacagtaaaagtctagctatatatagtccattctgtcttatttggccccagctattattgtaaggttcacttctttaaatgggtaattagccattgggcttgttggttgttgattaaatgaattcaagtatggctttagggtctgagaaagcgtgctttcgagaaggttccttgtgtctccagctatctgtgggtctgtcatctttattggaatccagatagacttaattctcacaggataagctctttactttttattcattttcaagaggacactatgcgtaattggaattacgcaaattagaggattagagtttggcacacaggaaattgaaattatcccttaacagacttgctgactcgccagcgttcttaccggtccttggcctgggtggagtgctgttgcgtcctcgggcagaccctgtgcctgtgctggtcccacccctcagcatctgggcctgcccagtccaagccaggcagggagccccaggaggaagcccatcaggggacttcctgcggctttaaaatttcttttgctttttaaaaaattatttgataaaataaagtttggtgtataatccacaggtgtgcacttggggcttctgcagtgtttatataagaaagcattgagcagtggctcacacctatatttccagcactttgggaggccaagacaggaggatcacccgaggccaggagtttgggatcagcctgggcaatatagcaagaacccatctctacaaaaaatataaatgaaattaggcaagcatgatggtgcataactgtagttccagctactcaggaggctgaggtgggaggatggcttgagcccaggagtttgaggctgcaatgagccatgatcatgccactgcactccagcctgggtgacagaatgagatcctgtctcaaaaaaaaaaaaaaaaaaaaaaagaacagaaaaaagcactgaaatgaattatgaagcattgttaactcttagacataatggattttttaaattcttttatgacaaattgccacttgctgttactctgccagcatcagggaatggggtcagtgctgtaactccccagtgaggacccacggcttcagcttctctgtcttagctttgctggagcttcttcttcactcaaggaaaccccatctgcagattccaagcctcccactggagaggtgaggtcaggacgtggtcatttgagtatggaaatagcgatagattttattgccccactttacagacgagtaaactgcagacatcacctccgcagtcatccacacagtcaggagtaggcctgggcgtcagagccggaccctgtgcccccatcctgagctcctcccagaccctgcagcttctccatgcagcctcatgtggagggagcccagtgccaytcttcatccccccaggaactccccaaaccctggggcctccctgcctgcactggattcgggtctgagggcagcactgcccacagagccctacatgtcgggctggactttgccaccaggacctgctccaggggacccagggaagcagcccctccccagctcccagcagcctcctgggtcaccccctttcccagggcactgtctgttccccagggacctcagatgcctctgaacacacctggcttgtgtgtatagggtgcagggggcatgtttatatggggagggagacaaatatttttgtccatggctgcctttctttggcagccagagccaggtacttccagaagtacaatctcccagggtgtgctcagaattcactttccagcaccccgagagtctcccatgtatctccagaaaccccaaaacaacccatccctggcaggccaagcatgcaggcatggtgggtggctatgtggcctgactctgcacggcccaggtgggccccaggctgcagaagaaagaacacagcacttcctccctcaaacccccagcgcctctctggttggccagccaggtgcggtgggcaaatgcttcaccatctctgacctccctgtcctcatccatctgtgttccaaggcaaaggggcactgcctgtctgggctactgtcaggggagggtctggcgagaggccccctgcacgcttgccagccagcacaaagcagtatttatcccttcctcctttccacctggctggcacctgacctctccccagtctgtcttcagtgaaggaagatatagaacaacgcccacttccagtgggtcagctcgggcttgtccggagcatggctggtcccctgcccagacccctggaggacactgtggacccattcaggtccctgcagtgatagccagaccagggacaccaccaagcccctcatccttatttctctgcctgtttcccctcccactttttctctcttaacactggacttctttgccagtcttttagtagtgtttcagtgattttacatttagacataggcaattacttttgttcaaaacattcagctccaaccttcaccaactgagataaaaagcaagccctttgcatccttttctctttaacaagcaaagctgtctccaaagaggccagctcaccgtggctacatctgaaacatgctgagtcaacaaatttttaccattaagggttttttattgttattctttaaatctttcatccatgtaagtatattcacacttgaagcttggaaaatgtctggattttgtttctccttcagaaaacatactttgagcttttgtttttctccatgtgtaacaaataatcattttgccctatgaatcatattgtcctgatttcatagaaaacaggtgcagtattagatacagacgcagagagggycaacccacagctgtggttttcatgtctgtgggcaggacttatagtagtccctatttcctagagrgggtattagcaggcaatgaggtgacgcttaggttagaagcgcttagcacagggcctggtgtgtactcaktgcccagaaaggttgatttgtattattagcaattattctgagaaattaactctggccttgctggcctgtgcttcctgcastgagaggcctgatggagcccagtggtctgtgtggctgtctgcttcctagcactctccctcctcggctgcttttgtggggcctgcatggtggagggatgcctagcaccccagaattcagcccctactgaccagcaccccacaggaggcaagtcaaagtgaggctctgagctgtaggttaaaggaggtgcttgtccactggccaggaatgccatttccctgctgtaatcgtccttgttgaggctgttctgctctcgggtttatcagaagataaaggggtcagcctccgcctcctggcctttgctttccttcctaatccagaaacatgtgggtcagcgcctgcatgaccaggatggatactggaagagtgggcyatggagcctttggaaaggtatccgggcatcatttccacaccagcattcgtgttatttctccgtgcatgaatggatgggccttgaagagcccgaaaaagcaggctgagctctcctgaaaggggataatccttggtctttctctttttgccaaaagatcctggataaatgaaccgagagagaccccaatctggaccagagatggtgcccctgacgtttgagcccacctggctgaaagagggcaggtgacagtcccaggacacccacaggaggctactcaggagcctgtattttgggcagaaacaaagaagctgagaggcacagtgaggtgggacaccagcacgccgagggtctccacctccccaaggcaggacaggccatggcagaggcttcaggggagggtyccggctttggctgggggcgtgggagtctccagaggcagcgagcccaggacactgatggtgcagaccrctggatttctggagaacactgtacttcgccagcctgcggcagacacattattcacagaactttctccaaaggaggttagccatgtttgtcaggctcagggagaagtgaggaggcctccttaccatcaattaaatatgggatccggatcaccctgcgcctgtctcctccccagtcctttctgcgacctcaggtggcctcactcctggcaggcagaagggactcgggtcacacacagccacactcggggattaggacctgaaggatatcattgagcccgcgcccgccccaggctggaattgctgggccgtgatctcctccatcttttctttctccagctgcctctgaaggtcacagaatctgcatttcttaggaaaaatggggcaaaggtgagatggtacacagcacacctggccctggctcagccccccaatgtggacaggttgcagaaggccactgcctcgctgcaggaggctggccctcagcgcccagcagaagcggcagccccatctgtccccgagaccccaccccctcaggcacagctgagcagcccgccggggcccagggttccttggtcttgggttctgatgccttcattcccagaacacgaagccaaggccaggagtcgggatctgctcccaggaagaagcctccatccctgcggagggcttgagaccctctgggatgcgacccagtccccacccatggccactcacttccaccctgccccggcccagccctggccaccccagacgtctggccctcgtcccgaatgctgtcccctctggcctcagctgtcctcctcgaggagcgctatcctgctccgtctctgctcagggtccccccagaggcctcccgctgggatttgtctccactttgcagttgccttttgccccacatgccccgtcctgtggttatttaccttatgggggcatcctccctcttgattgcgactcctcggaggcagataagagtgggtggctttcatcttccagctcccaactcccagcccactgggctgctgtgctgtggtgcacgtgagtcatcagatgccccaggcggaaggctcgtkggggctcagggccccagctgggggcagagcacctcaagaatcctctcaactggctgcaggctcctagttcttggtgacttagtggatggaagacccacctacaggtttccaagctgctgcctttctctaacacatgggcgggtcctggctcagcactattgttctccaccagccctgacccagcacccactgtgagccaggcctgtgggtgtcagcactaaagaccagaagagtcgccagcccatggggcgtctgaagcaggtggcacaattgaccctctcagcccagacaccacccagggccttctccctgacctcggctacagcagatgagaaggacactgtgggagaaccgagtcaggatgcccaaactggatgacttccctgagggcggtgcactgctgaaggcccgtgggtctccrttctctgggataatgccagactccagcagaagctttagtctatttctgaatagagaaaatctgctgaaaaacgtctattttccagctgaataaacaagcctttcaagaagaggaggatgaagaaaagacggcatgtgtccaagttgagctgagacggactgtaarcccaggcctgcctaaggcccccacagtgggcatcaccagggctggggtcttaggggccgccagcttcctccacccacctgcctgcacagacagctcctgggcatcaatgcctcagcagtcagatccgcccaggctgcttctgaaagagttttgtagagagattgctcttctgggggcggggacaggacacttatctccatccccccaccaatcatcacaggaggatgaaaaacctcaaagaaagacccagggggcagacacaggcacagatcccagtggagatgcaggctccggaattgcaggctcctttttggaaacggcagaggctccccatgtgggcttccctcacccctccgaggccttcccaggaagacttggtggcagagaccgtgtccactcagcaaacaccaccgttcgctttgctgagtttgcagtttcccgcagcatggctgctgccctggcgaacaacggggccacgccgttacaataaccagcccttgcctgatgagttacagtttacaagactcactcatttatgatttcgtgggattctcttgtttcactcattgggaagcaggcgcagagaggttaagtgttctggaaaaggccctcctctgggggtagagggaggggaaagagagagagagagaaaggatgagagttaatgagaaagagaggcagagagagacgtcgaaccagctgggtcttcaggctccgtggcccgggcccttcagaaagtgccgtgagttgatgtgctggagagaatccacgtgtcagtccccgacaccttatttcttcatggcgattcctttaaaaacacccgtggagcacctcctctgtggcagctctgagaaggcaccagggtagagacctgcatgagagttggcctctgctttgagcagtgccgcgtgcatggataatcctgccggcaaggtcttcctgracatctctgaacactgagggttggcgttgccaggggagactcctggtcgcccgcgtcctattcaggttctgtgggttcccagggccctgtgctctctgtcccctgcargcctccctcacctccccagcctccttggaccrgctgactccctttctccccaggcagccctccagacccctctagacaggggcaggcaccctgcagggcgcccctaccacatcgtgtgcttcccccgcctaacacatggcagttgcattctagttattgaagtcttttctctctctggctgaatcgcaagctttggaagtggggaggtgggaggaggggccaagggcagtgttggtcttgtttagttgtctctccacatcctggcagtcaactcttagtaaccaatgctgaatgaatgcatggatgaatacataagccaaccagcaggtactcttgagtctacagtctccctcaactggcagctgatggatttctttgaaatcaaaagtgtagcgtaaacctacccacagaagtttagtccagtcatcatcacttttggaggtctgatccagggtgggctgtactcagcgaggcctggggtgcagctggccagcgtctcctctgtcagccacacccctgagcggaggctccgtggaggggctgcaggcctcagctccgggtgccctcttctcagtgggagacagcgggagggctgtgctgtttccaacattcccaacacttccattgtttcacaccattactgccgagccccaagggcggatgggtggagccatgttgtgtgggccctgctgttttcctggccagggtgttttgggcagtggttctgtttcctatattgatgtttcccacgaccctgccaggtagcctctgataaagcacatctcttctgagtgagcaatggcctttgggggccatgaagtacctgtgagtgtgactctgccagatgacgggcaggtgcagccatcagtcggacctgagcaaggctacattccttacctggctcaggtgtgaatcttcagggcagcaaaatgtggatgagactgagtaaggggagaatcaatatgtgttttgttgagagaaggaaaaatatgagcaggtctcatgacagaggggtcagagatctaaatcttggagggccccagggctcagttccaaccacgccaccccttctctctgcattctctccagggggccgtatttccctcttcaacagagacagccctattttctgcttgytrtccctgtstcctgtccactttcacatttgctccatatttttcatcttagagcaattgaaaattaaacctttatttttttgaaacagagtctctttccatcacccaggctggagtgcagtggcgcaatctcggctcactgcaacctccgcctcctgggttcaagcaattctcctgcctcagcctcctgagtagctgggattacaggcgcctgccaccacgtctggctaatttttgtatttttagtagagatggggttataccatrttggccacagtggtcttgaactcttgacctcaggtgatccacctgccttggcctcccaaagtgctaggattacaggcatgagctaccatgcctggctgaaaaytaaacttttaatgttgaaatgatacttgcattaacagaatccaggaaggttctgtagactgtccacttgtgcctccaagcttctgctgtgctctcctcataggatggagacacctgtgtagggaacaggctctctttaatcatgactaaatccggaagatgacagccaccgtcttctctctcttcaccaccctttcctaacacaatgtcagtaacacttacctttcaaggacaacaggcaggttagaagagaaaaagtgcccttggagaagagtgggttagaaccaactcccgttggcctcccagtgtggcgggaggaggcttcagggttgggrctcttgctggccacttgtggcaccagccagttgagctgcggcccacaccatggcctgtgagatgccatggtcatcagcacctatcagaaacatgagaaattacagggtagrggattttgaaatatttgcaggaartcagtacaacttgtaaaaaacaaacagtctgaactctcttcttccatgggcttgggcatttatcrtatggtgtgaatctgcaactctatttaaattatgtttcaatagaactttctgaatttgccttaaacttgtgggtcaggaataattagaaaaggcatatcaagcactgatttttttccagaaagttgatgataatrttggtataatttgtaatttatacaaaatacttataaacatttactaactacctcgggggctgtaatggtgtcgctgaccacgtagaagccaggaagaaataaaaagctactaagagatcatcagtattcactaagcggctgcttgaagaaccctgcacctgaggatgataaattgaaggtgctttgcmaactgctaacaaagcrtgacttttcacttagctcaaacgactattctcagctaattttgctcatcttcaattccaggtttcactgtgtgcttacagaaggtgaagtgatagctgttagtgctcccaagggtagaagaatttcacgaaccatcagatgatgccagtgttacatcagtgtcaytttcaagcaggaattttcaaacaaaatcagtccattcccatagcagttttattttattyttttattcatttcatggaatcccaatacaacttggatgttcctcctgtcaaaggcaagaccttgacttaattactaatgtcacaggaaaggcagtggaagagtcagcatcatgataaaattatttgtgggggaattatgaatatgattatataagtttgggtaaagctcggcatttgtagtaaatgtattgtacttggaattgattatggtgtacacatcatttatttacttatttatttattcargatggagtstcgctctgtcacccaggctagagtgcagtggcacaatctcggctcattgcaacctccgcctcccgsgttcaagcgattctcctgtctcagcctcctgagcagctgggattacaggcgtgcaccacatcacccatctaatttttgtatttttagtagaggcggggttttgccatgttggccaggatggtctcgaactcctgacctcaagtgatctgcctgcctyggcctcccaaaatgctgggagtacaggcataagccactgcacccagcctcacagcatttataattgtgtccaaattggacatctcatcagttaaaatagaagctgttgatgtcaaaatttataaatagttacatgtacacagagtaactaaactgcaaattcctggtaattaggctgatgttgaatttttaaaacactgccgctttgtagtatgcactttctctctcctgctcatcatcaatcagattctagaaatgttcgggccttcaaagaattattttgtaaataaacctaagtgtcctaaaaagatggtgaatctttctgcaaacaaggccctaagtgtgagtttagtttagttccaaactagttggaaatatattatgggaggattcaataaatggagcacccaaaaccctcccctccacaccaccccccccaccgacacacacacagaactcttggcttttgaaacttttatagagttaaaattattgaaaacaaaggttatggctgggcatggtggtggctcacacctgtaatcccagcactttgggaggtcagggcgggaggattgcttgagtctaggagtttgagactagcctgggcaacatagtgagaccccccccatctttacgaaaaaaagtcttaaattttgccagtcatggtggtgcatccctgtagtcccagctacttgggaggctgagatgggaggatcccttgagcccaggaggttgaaactgcagtgagccagtctggcaacagagtgagactctgcctcaaacaaacaaatgaggttatgaacaggaagacactaaaacttatttctacaaaaacaaggaagcaataaagtgaattaaatgatgagagctcacaaaatgctaatctaaaaaaatgcaggcaattttattttaaaaattaaaacatgaataagaacattgaaaaatatattgaatgaaacatattaggaacagataaggctaagaaattgatcagagcctgtgaatgtgtgctgagaataagtattattttacgttctcattttattttcagataatcaatacaaaaaggtttttttcttttatttttatttgttgttgttgttgttgacacaaggtctggctctgttgtccaggctggagtgcagtggcatgatctcggctattgcaacctccgcttcccaagctcaagtgatcctcccacctcagtccagcaagtagctgggaccacaggcacccatcaccgcgcccagctaattttttgtattttttgtagagacagggttttgccatattgcccaggctggtctcaaactcctgagctcaaagcgatctgtcggcctgggcatccaaaaaaagttttcttaaaaacatatatatgtatatatatacacacacacacacacaaaatatgttattttgttttcagaaagattgtttaatttttaaaaatattttgtgaatagaactacttaatagcctcccagcttaataaaatcaaatcattggtcaataaatgttttagagaagcatatattttgaatcattttagccccctcctttgctctccaagaagtcctggtttggatgagaaattacatgggacccattccaggggctctctttaagtgcggtggctttgaaacctgagtatggctcccaaatcattgtctcctgcttccttgagaagaaccctcatctgtttcttagttgaaagccaaacagctgcaggttttgaccaggtaggtgatgggttcgggctgcagagagaaaacactaccctcttggagctgcagggggcagtgtgggtcagtccactgctggacatcctgggccagctggaaagggcactttcgggtttggtagggccagaggggtcagctgggcaactcctgctcagaggcactggcccagggatggccccttgccctcaaatgccctgaaagctccaattattgaggtgccggagagaaagtcagggactgggaaacggggacacaagacagcccctacactctggggtctcctgggctggttgagacgtccaaaacccaaatcaccttacacagggccagacagtgtgatgccaggaaggactccatctcaggtcgctcaacctcaaaatctggtggggtcaagtaaagggtgaggagagagaggggaccactccaaaagaggaggcagggatgttgggaagtggacggggatcaggaaaatccctttcctaccctgggtgtgtacctcgacctgccttctgccctccccygagcccagccaccttttcccagtctcctgccgagctcccttcctckgkccctagtgcagtgacttcctgcagctcgccaccttgaccctggccttcctccccaataacccccacaaggagtgcctcccccacacgctgcacttgcagcccacctccccttctgacaaggccccagaccccagatgcaactcctacagacagtctccccaggaatgttccactgtcctctctaatgcaacctttcatcttcagtaacaacaggacattgctcataggatttcggtgagggttgatgaggtcatttatctcagaacctcaggtagcttatcccgcttcataggagcccagtaactgggagcttatattattgccttatgcctccagctaaaaatcatccttatccccaccctagagcccccattgtccttgtctcagctaatgaatgatgctccctcccaccccarctcccaagatggaaaccccgatacctttgttgccccacttatcacccacatcccactgaccaccactgccagggaccctacctttgaaatccttctaaactccctccctcctttccattcccattgcctccggcttggtctttcttaatccattgcttagaccaatacgtctcaaatattaatgagcagaggaaccaccgaggaatcttcataaaaggtgggaggtctgggatggtcctgagactctgcattcctcacatgctcccaggtgatgctcgggctcctggaccactctccggccgcaaaggctatcctgtgtcaggagctgacgcgcagcatccagggctccctttggaaactttcctggcggctcatgactcgtagccaagattttcaaacttcagtctatataaagccattattccccagatactcggatttcttccatctggagttgggcacaggagtgggcatcattccttagtgcccccaggagactctaataatgtagattgttaatggaaaatgagcccttagggccaagccaaatctagcatagcattgaggacctacccaattcctcttcagacttttcctcctcactcatcttctctcacatgccagagaactgtgaactgcctggacagtgggttctgtctgggctcccttcactcctctgtcccctggcctgcgtctccctcgccttccgtcctgaatgactcactcactgcactgcatttctggggaaggtttcattaactgccaagaggaatcattgctccctcacctttgctccttggcacatggccttgtctccagagcatgggagtggggtatcagggtggctgttcttctgcctgcccttcctcctcaatgagctactttagggctgaaacaagactatattctttgcatctctggggcttacctggctgcctgacctaagaacttgcccagtgaagaatattaaaaagacatcagatggaataaaaagacagatttataatgaagtagatagcaggttgactgttgaggggagtaaatatacaacctgctttatcataaataaactccttttctcatctcagttctagaaatcacatgcaatttgtgctctacatactcagcatttggtaggctcacaacagaaactgatgaaatacaaatccttaaaattctgcatttttttatatgagtctcgctctattgcccaggctggagtgcagtggtgcgatctcggctcactacaagctccgcctcctgggttcaagcaattctctgcctcagcctcctgagtggctgggattacaggtgcctgccaccatgtccggctaatttttttttttttttttttttgtatttttagtagagacagggtttcctgggcaggctagtcttgaactcctgaacttatgatccacccgcctcggcctctcaaaatactgggattacaggcatgagccaccgcgtctggcccagcatgattttaatcactgtttcaagcatcatttggaccaattcatgtctgtgctcaccaggtcacttatgcaagcccactgagagtgaatggccagggactggcaagttgtcattggccttaaaactattgtggaagttagtgtggtgattccttaaggatctagaactagaaataccatttgacccagccatcccattactgggtatatacccaaaggattataaatcatgctgctatcaagacacatgcacacagatgtttattgcggcactattcacaatagcaaagacttggaaccaacccaaatgtccaacaatgagagattggattaagaaaatgtggcacatatacaccatggaatactatgcagccataaaaagggatgagttcatgtcctttgtagggacatggatgaagctagaaaccatcattctgagcaaactatcacaaggacaggaaaccaaacaccacaggttctcactcataggtgggaattgaacaatgagaacacttggacacaggaaggggaacatcacacaccggggcctgtcgtggggtggggggaggggggagggatagcaataggagatatacctagtgtaaatgacgagttagtgggtgcagcacaccaacatggcacatgtatacatatgtaacaaaactgcacgttgtgcacatgtaccctagaacttaaagtataaatatatatatacatataaaaaatggggacagacccgggctccagctggtggacaggctttgaattctgcaggttgtcgcccattgctggtcatgtcaggaaaatcacctgtggctctcctgagcacttccggacctcagtgtctaacagatgaacaaaatgatctttgtctttctcaagggtgtcggcctcctcttagatcactgagcatttggagaggagggttattaaattaatgcatgagataagaaaatgtttcaactaggaattctgcatctctggaattgtattaaaccaattaatactccccaatcaattactctgtaatttactcaagtatattaaaagtattgtggcagtgtgcaataccagatttttaaaaacagtgtgtgcctctgtgggcagagctgcctgtcgtagaagggccagggcagcatgcagcgggggtgagggcttctgtctccagggttcctgggttcaaatcacagttcctccatatcctccagcctgactttgggccagttctctatccttcgggaacctctgtttctcagccctgtggggttattgtgcggataatacagatataaaatacccagcatatagtaggtgctcatggaattatttgtgtatgtggctcattttacaaatctaaaatgtgtgttttggaaataaaaaaaagagggaagaagtaaaagtgctgattgccaccatcgtcgttgttctgggctaattgttataatatcctcataatggtttcatcttaatagtggtgattactgaaacacaattaggatttttcatgctcattcagatgtcttctctaattacaagcattagtgtttaacatgtgagcagccggggaatggatgtttcttggcctcagttctgaaatgggtccatttgcatccctgagggaggcctcaggcaggagggctgctggtggggacaggctgaccttggacggggttcagggggtggggagtgggggggccacacctccactgcatgtctgcattgtcaacagcaaatcccattcagcaggtgccactgcccacctgcacctgccagtgagcctctagtgaggggtttccacagcaccaagcagtcactgccacatttagcgatgctctgatgttttggcaaaatggagtgccaggtgaagatctgaggtgatggcccacaggtcctcagcatgaaagagcctttttctgtgctgagccactttacaatctgcgtctgcccctgggcattcccaccccctacccccaataaatacctgcatcccagggtactcaattggctctgtcaagatgagtggaccgtggctccatcctcgcagaggcagcttacctccacttcacctgagagtttagacatggccatggtcagatgcaagggtcaagctggagccaggcagagcatgctggagccggaccaagcatgtaggagctagaccgagtgtgctggagtcagactgagtgtgctggagcagcgaagaacagagaacttggctgcagctgggtgatgaggctgcatgaactaggccctgaaaggatcgaggtttcccaggcagagtgaagggggatgaagaaaccgattgaaaagcagtgtcttgctgggtgtgaagaggacagcgtggccagagaacagggcttgaatgggaggggtagrgttagsagggcgagtggagggtggatggtagagggtccaggatgccaggctaggtcacccagatgtgatttctgctaagtggttccagggagggcaggggtctgggatgagatcaccctgggttccagtccctgatctgcccccactaaccatcaaccaagcaggtcctttgagtcctggttccctcctttgagtgaatgtccacagtcagtgactgtatccccctggtgttgagaagcctcagtgagatgatccgtgaaagtgacaggcaaagttcttggctcagagaaagccctgaaatgaagttggctcttctcctcatcatcactgcctggcaccggagggtcccacagctgctgctggatgacctctgagcctgtccctgcctctctgcaggtccaccatggagcccttgtgtccactcctgctggtgggttttagcttgccgctcgccagggctctcaggggcaacgagaccactgccgacagcaacgagacaaccacgacctcaggtaaggacccctttccctggctgcctcccctactacctcctcctaagctcctgggaccattcagagggtgataaaggggcttagggtaagagaagaatggtgtggctgaatttcttagtgtgcttttaatagtttgtgcctctaaaaacaggcaggctaaataagctagtttagcatttggttgttcagcaaagcttagtgttctggaggtgacccatctacaaccccagctgagagtcagggtcagccttggctggaggcaggagtgcaaaagggttaaaaatcccccaaaatccccttgtgcagaaaaccaaccatgaacatacatggatgaggcgatgtgacagttaatgataggaactaaagaattattcttaggccrggtgcggtggctcatacctgtaatcccagcactttgggaggccraggtgggcagatcacgaggtcaagagattgagaccatcttggccaacacggtgaaaccctgtctctactaaaagtacaaaaattagctgggcktggtggtgggcgcctgtagtcccagccactcgggaggctgaggcaggagaatcacttcaacctgggaggcggaggttgcagtgagctgagattgtgccactgcactcttgcctggcaacagacagagactacgtctcaaaaaaaaaaaaaaaaaaaaaaagaattattcttaatattttaggtcagatattggcgtcatggttagttttatttttaaaaagaagagtccttgccttttgacatgcctgctgaagggttcacgagtgaactgtgatgtctgggctttatgcagaaaagagcaagagggaagtgggggtgggggcttgtgaacaaagtcacatcaagagccccacatgattccctaaccctggacaaatgtcctgcaaaccctggacaaatgtcctgcaaatgtaccactggccccaggaggaggaaagagtaaagatttctggtgacagaacctctagcaaggagagcagttctgagcgcccacctgtctttttcctcttcatgttgaaacctcagagaaatccaaaaccccaaaaatgagagaccagaagctgcccgcaaatattaacttgcctctttgcaagccagcctttcaggggcaggtcactggtggttcaaagagttatttcaacccacaatcccgacttttcttcccaacgctaatcgactggccacrtagaaacatctgacaaactgcccggatrtaccctcacatccaggagccacaatggcagaacatccgtttgcgcaacagtggggaagaatctgcccgagctctgcagacagtccctcgggtggcactgtgggcaccggcaggatgacgtccactccacatctgaggcttttcagtttatttgaraacaaaattattgggctcacatattgccatagacatggggtgttacttgcaggaggaggacactgtcatgtgacctcagcacccagagcagaactaaatgtgaaactcacaccttggtccagcctctgccagggcctctgcgtgcttagcaaggctgctggtccacgagcaagagggaaatgggcctcgggttataaggcgcagacgggctcgtttgacctagaattgtggaggggaacctraccctgtgaagtgccctttaaatcttcatctgacccctggaagaagtatgaaggaccatttcagatgataacacgtttccacagtgtgccaaaataataggaagctgtttcatttgttcatcgaacaaaatatattcagtactcatgcagacaaattcttttacagaaggaattgaaggtaaatgtttacaaattatgtaataaaatgttatctataaaaaataatacgtaaaagaacacagtcgaaaaatgagtagagaatatgaccaggtagaatacaaatatctaattatgtttcactaatcatgaaaagatgctcaactctctagaaattagagaaatgcaagttaaaatgacatkatcattttacctatcagatggaccaaaatgcaaagggttggcaaaatatcccagagaagagaaactggctccatcgcacattatgggcagcattccgcaacctttgtggcaccagggactggtttaatggaagacagtttttccgtggaattggggtggggggtggtttggggatgattcaagtgcattatatttattttgtactttatttctattatgattacattgtaacatataatgaaataattatacaactcaccatcatgtagaatcagtgggagccctgagcttgtgttcctgcaactagacggcccctctgggggtgatgggagacagtgacagatcaccaggcatcaggttctcttaaggagcacgcaacctagatccctggcatgcgcagttcacaatagggctcacggtcctgtaagaatctaatgccgctgctgatctgacrgggggcggcgctcaggcgataatgcctgctcacctgccactcacctcctgctgtgtggcccagttcctaacaggccacagactgatatccatctgtgtcctgggggagttagagacctccgctgtggatgaatgtagaagttggacacttggggctgccatcttggcaattgtgttaaaatgtaacaggcgtacaggctaacacagaagctgtcctacagaaacacttgcgagacacaaagatatatatrtgtgtgtgtgtgtgttgcagaattgtaggtaatagcagaaaagttggaaacaacttaaatgtccatcctattttggtctatccaaaaagtggaatccaagcagctattaaacagaatgaggaagcttatctgggctgacatggaarctctccaagacagacagccrtaccagaaaagcaagctggagaactgccccgtggtgcatttcatctgtttctttcatatttaatgtggctatatggggacgtgtcttaaaattggtagcacttcacaattataatcagtatcattttttttctttcttagtggttcttaaaataacgatactttttacagtccgtgaagctgtagatgaaacgagaggagtagtatggtctatttatttcccaaacctgcatatttatgaacgtaaatttatagaagaaaatgtcaggaaagatacgctttgaaatcttaattatgtttaactctggcaaagagaacaggttcctgaacattgaaaattttaggccggagtgagttgggaccttaaaccattgtctgcacacctgtccttgagtgagccacatcttttcagtatggacttgctccgcctctagggcccctggggaaggagggcttggaatgaaggtgggagaggaaaagagggatggagataagataggggacacagtgagagcagctgtgccctggggcagaactgaggtagtccctggaagaccccggctcttggccagagctcaggatcagcttcctgagcagagggtgctgggtggctacactccagccaaggttgccattctctttgtctcctccaaagtcacattcaagcctaaggttttcaactttcaggatcagattctatgtaagcaaacacacacacacacaagttgcaagtgtatgtatgtataaaattggtgtgaacatacacacacttcactttgggcaatagctagacagtcatacaggaagaaggctgcttcaggatgaccaccctggggactggccaccctgacctctgtcccaccccgtcagagccacaataacatgaaatgaaaataaactgtgacaggaatttcttctcagatgactccctgactcctggctggaccacattggtgcccagaggacatatttttgttttcttcctggtccacaccatttaaaaaaaatgtttttaaattgaatttcttaccaatatttaaaaatcagaaaatgtttacataaaaatatgaatttcttctttaggaaagtgggaagaactaggcactgtgggcaccccttgtgcttggccccartgggctggaactcagaagtagccatccctgcaggcaggacatggggagtcccaactctcgcccccacctggcctccccacaccacccagggatgttcttacctgccccttgaaggccattgggtttctgatcctgatctctggcctcctgaacagaggtagctactaagaaacaccaggaacagagctggggaagccactggccctgtgacccatcccttctgcccgtgtgcacggcccctttctgggcttgggtggttcagccccgtcttctatggaagtacccatgtctgtgaccgcagccttcactacaggcaggaacgtggaggccagacccacggagggctggtggggcccaggtgctccctcgtgtctctctctgatgagaggaccccatgagttggcttggactaaacttagtagtcaccatctctgcagaagctgagcccagagcctgacctctgtgtgatgcagaagtgggaagtttcattgcctggggccccgggagatgagggcagatgtacctgggtacattcgagagggaggagggggaccgaggcccaagctttctggctgagtctggagtgtgagcagcagccaggccctccgtgrggctgggctccaggctgcccctccctccgtgtcaggggtcttcccactcagcctgtcggagttgctccagggccctggcagagtggagaggggtgctctctggagctgcaagtgtggaagcctcaggccagctcacttccccagggaagctctgctgtgggcaggttggaggtcaaaggcgggggactgtggcagccacacccagccactcatcctagcaccaaccgaaccttgtgtggggccagaaccagctcctctgggccagggtcacagacacctgagtgtgggggctgcagaggacagccaggctgccaggctactgacactgctagccagatgggggaggcacggaccccacctggaaggtgggcacttagtgggtgggccaggtgaacagtgccctctctcacggctggggccacctccgcatcacagaccagctgtttcctctgtgaacttcaacatctaatggtcacccacgtccctaaaacttcatcatttatgagaaacgatggtgcggaccactcatagggtgccagagtcagtgccaggcctgggagggtaggggatgagggaggaaaagccacaccttccctggggagtttataacctagggtgcaaggcggaaggcawgagggtcccttttagaatccagatgaggggtgtgaggtgagcggagcctctggggctgcggagccctcccagtgcccrgagcaccctcgggaggccgtgccagccctcaggaggaagcgcatggaccctgcgctgggctcagggcaagtgattggtgcttctgggaacttaaagagttggaagcccggtcgttgccttcgaggggcttccccagaaacccgggagccaaggcagtcatgctgaggcctgttcactcatggcagagcgaggtttgcgctttgaggcatccagggcccctctgggtccacaagagaggagtccagtgggcttcttggaggtgggggcctttgagattgtcctcgaggagtgggaacattttggtgatgagggggctgtgtggccagcgggggaggagcaggaacaaagtgcgacgttgggagagtgggtggggtccaaaggtggcagcgaggccaccagtgtcccttkgaatttgggctgatgagccaggggtgggtcctgagcagcaacaaagccacttagctgggcctggggctgtgggtctctttctgggtgaggaaggtcaacctgtcaggtacaaaggacacagtaagaggccggtggtggctgggcactcggcctctgacaggtggaatcgggacctggaggctctgaaaggtggggtcacagtgcgccagggccacaggcctctgcccagccccagggccaggccgcctccctgtgcctgagctcctgcccaagcccaaggggccctaagagctgagctacgccgagtcagcctcccgcgctgtcctaggaccctgcagtggacaccggccccttcacccttctccagcttcttagcaggagagccaggcagccaggccgtgtgggggtctggggaactcacccctgtcatgcctgccccagggatcttggacaagtcacctcacccactcctcagtcccggattctttctctgagtcaacagcaacaactaaagtcgcttctctgttacctcgtggggccttttcaggatgatggatccactttacaaamtatagtttggggttctggtgtccaggaagaagggcttatggagggagactcttttgcaaactgtgaagtgaggtcaggggttagggtctttctgcttctcctgcaggccctccggacccgggcgcctcccagccgctgctggcctggctgctactgccgctgctgctcctcctcctcgtgctccttctcgccgcctacttcttcaggtaggagtgtcccggggcactgacttgccccaaccagctcagaggaggaaatgagccttctgatgctgtgggcgtgggctgtgcagcagagggcagctgagaggctgggtggctgggcctgggagacacacagaggccaggccttagcgyggctcagccatgagcaacaggagtagcttttcccggctcacctggtgggtatcactgtgccgagcgctgttggctctcggggaacctagaagtgtggaaacctaacrcatcctgtgtctctaaggttcaggaagcagaggaaagctgtggtcagcaccagcgacaagaagatgcccaacggaatcttggaggagcaaggtacagaagctgctctctggctggggcttgggggaaaatgtgttcttttttagcagacactgaggtgctttctgcctttaacgttcaaagtaaattttgaggtgtgccttgccactttcatctcactctacctggtatgatgctgtcatttagaatttcactatttcaaaactttaaggatcatttttctctcgggtgtgacatggacgtttgagacatttttgtttgtggctttttttagagagactgttcatatcctgtcgttttcacagggtgttgacatgtaacacttttcagtgaggccttacaatcattctcagataagactgtctggctcagaaactattcagctgggtttgtactgctttaggatccagctggaaaaagagactcgctctcctgaagtgcttcatgtttacagagcatcagagtcagctgggagcatttccaacttttccatccgaagtacagtttcgaacttgttgtcgctacttacaaaggaacattgtttttctctccatacatagagatgagatgaccgagaaacgtgtgtaaggcagaggccacaaaaatattgcttcacaccccagtgactacaacttcctggagtcagcttcctacctaactgtagtcagttctatggtttgggggaacacacgtgccgtcagactaaaatagactcttaaaacggacccttagatcattaaaagaatatcaccaacaaggacccagctgaaatgtagcctcccagcgctcgcgggacccgagacctggttagacgataatgtggcaccaggtgctgtcttcctgccctcgttccagtccccggttccctgccctgaatgtttcaatagcaggaacggaagggaggagggtgcggctagtgagtagcagggaagctcagcatcactcattctgatcccatctgtcacttggaggaatgagtcttgggtgaagtttttggctgggcttcagaatggctctgcaggtggggacaggcccttttgcaagtgtgacagctgggttatcatgttgaccttgtcaatatcagctcattctccaggaagagaaagacatgtccataactgttcttgcctctcactccgaacttggggaaggaatgtgtccaagaactcccttataacgcgtacttctccttctcaatgccccttgtcaccctccccagacaagggtggttttcccttggagcttatggggtttgaggaaccaggaatatttgttatgaagaagaaaaggctgagagagaacgttctgagtttgctcccagaagccgtaattactctttcttatttccaaacctggaaagctgagctggagagtgaggccgtcttgaatcctttttggaaggagcaggggctggagggaaggagaggtgggagggtgggtggatgagtggcctcgggagggggacaggctgtctccaatgggggagagcaggtgacactgggcagagggacgcccgtcacttgtaaatgatgtggatgcctcacaggaggcgagtgtttggatacagctgctcgggacccggcttagcccagctatgcgatttgagagaactgttccagctccagcctggtcatttcttcaggaatgtcgttggtcagcttggttactcagtcgcctatccaggaatgtggctaaatggcccccatgtttcttttgatcccacagagcagcaaagggtgatgctgctcagcaggtcaccctcagggcccaagaagtattttcccatccccgtggagcacctggaggaggagatccgtatcwgatccgccgacgactgcaagcagtttcgggaggagttcaacgtgagtgtggggagggctctctgctgggtgccctgtggtggagacctgtgaaatccagtgttagagttcaggatgaattatcccaaagactcagaacccttgcatcagttatgacactrtcccatgaatgggcgtgtgaggaaacctggtgtgtggtgcagtgccctttgccaatgcttatttcctcatttataagatgagacagttgagttagaggtttgtgaagcctccttacacctccccactctgagtgtcaagttctaaaatcaactgtggcagaaacactgttatctcgataacacagaaggctaggacctgagcgcggcacggtatgacaatatcatggggaaagtaacagagccccaaaccatcctttcatggcttctgagagctggagcacctaatcagagtaggcgatgttcctcttctgaaccaccatctcggcattaatgaagcagctgtgagctgccttgagagaacactagctatatctgcttgtgtatcaacatgggtgggtgggtgggtggatggatggataagtgggagggcagagggatggatggatggatgggtggatggatggatggatggatgatggatggatgagtgggagggcagatggatggatgaatgaatgcatggatggatggatgagtgggagggcggatggatggatggatggatggatggatggatggatggatggatggagtgggagggcatatggatggatgagtgggagggcagatggatggatggatggatgggtggatggatgatggatggatgagtgggagggcagatggatggatggatggatggatgggcagatagagaagtagacaaacagatatgaggaagtattgtcttggattttgctattcagtatttatccttggtcgtgttttgaattttatgcatcttcaccttcttgcatgtggctgtgctaagtgttgatcttaaagaggatagattttcagcaggattgctaactggtcctggctatgcctgttgcgtgctggccctggcacatcagttaatttccttgaagctgtcttccaccacctaggaaggggcaatggagatgggcctgtcttaattaccttgaagttggaatgggaggctcagacaatggattttgtaaacaacagtgttgtgcagttgttatatctgaagatggcatgaattctgctgcagaaatgagactttacccagaagcaacgtgtgaaggcatgggaaggtggtggcccatgtaaactgtacattgcttgttttttggtgcaagcctcctctgcctttatcttacttcctttttattgtttccaaatgtgtccccttttttggagaaattaggtcatattgaaagacagcttgaagcactattgtgttgcaatctctcagcctgacaacagaccttaattctcattttcaaaataactatccaagttttcagctagcagatcccctcccccacccttctcatcccatttccccttgcacttttgtttccccaagtgacaggggctgggcttgctgatgggggtgtctgagtcagaaccagctcaaaagagggggccactcccagggagggagtccaggaatagggtggggcaggtgagacactcaccccaggcacataatttaagacagcaccaaaagctcagcagtgggataaattatattttaacataacacttaaaatatcaaaattatcagcaccacaggaaaggtaacaaatacaatatcaaaatgaatacaggcagtccctggtgaagaaaataacacgaccataaaggaagacaggcttgggccgactgattttccctgttgccctgggccctgatacatacggcttgtcaccacacagctactcatcctgccattagttaaaagtttcatattttggtcatcatagattttgtgccttgatttggacttttaaaaatattgcattcgaatattatttcccctggtttctgaattttgggggcaccccattaaattttgcacccagaggaagttcctcattctcttctgccactgggtggcccttggctgaacattggagtccttgtgctcagtgacaggcagggtagagacrcggtggaggggaagaacactggacccaaagtcaggatcacggagcctgatcctgtgtctggggaaccctgggggagctgcttttttgtcatatttttgttttatttgtttgtttgagatggggtctcgctgtgtctcccaggctggagtgcaggggcctgatcacagttcactgaagactcaacctcccagctcaagtgatcctcccacctcagcctcccaagtagctgggactacaggcatgtgccaccatgcccactggcttttttactttttttgtagagatggggtcccactgtgatgtccaggctgtgcttttctgctcatctgtccagtgaagggctggccatgtcctgagtccacgttgatgcagcacccgtcctctgagagcactggagcctgccatggccagctctctcttgggtcctcagagggacatgctcccaaccccatctttcttttctcttgccgtctgatctgagctcctctccccaaaatcatgaaagggagacaccrgagtctcaaagtggccgatccagttgagttttgacatgtgtgcattgccaattcaaagtgcaggcaaacttggtggggatgaaaaggatttgatattggggtcagtacagtgaatgctggagtcggcctgagtgtttgtcccggctcagagagcttgggcaattaacctctgcctgtttcctcatctatgaaatgaggatactccctgccccccataggattgtgataacatggacatgaggttggataacctggacatgcaactgaatccttacgagaccgcactctgcaatctccaccctgcactggtagaacaccatcctaggaaagtctgcttccaggccccagagtaagtcctggaaagtgagcaccactgggccaaggaaaatcccccgcttcagacaggctcgtccctacctccatcctagcaagttatgtcaagccaagtgcctaggactaacacactgatacgtgctgtaaaagtgcagagggaggtgtcaaccgcaaagcttccagcacaacaaacaaaccagaaccattccctggagctccatagagcagctggggcctcttgcagaactgcccacacctagcttcttgtacactctcctgctgcctgcccgacactaccgagcggagagagaaaggaacgtggctcatgagttcattgaaatgaaatctctaggccgggtgtggtggctcatgcctgtactctcagcactttgagaggccaaggtgggcagatcatttgagcccagtagttccagaccagcctgtccaacatggtgaaaccccatctctaccaaaaaactacaaaaattagctaggcgtggtggtgtgcacctgtaatcccagctactcaggaggctgaggtgggagaatcacttgaacccgggaggcagaggttgcagtgagtcgagatcgcgccactgccctccagcctaggtaacagagtgagaccctgtctcaaaaataaaaatgttaaaaaaggaaagaaatgaaatgaaatctcacctcaaacagacaaaccacaaacaatttggacaatttacataatgggacagccaatcacacaatatttattggccagttactatgagcaagccccaagcaagacactgcagggctcatccaggtgtgcagacccctccaggtgctctcctttcccctgggccacctgagcagctcagagatttgagaccccagtagactgacagccagagaaagggctgcagagtccatgtgggtggttattctgtgcacttggatccaggatacatacgtgtgcggtgcacagggcccgatgcccctccccacttcaactttgaccctctgtgcatctgggtggctacgccccatctccatggtctggatctctgcagctgccaggaacacgcaaccgtggggtgtcagagcttggtccatcctcgccatccaatccctccagggagccttctcaatttcttttaatttatttatttatttatttattttttgagagagagtctcgctctgtcccccaggctggagtgcagtggtgaaatcttggctcacggcaacctccgcctcccaggttcaagcgattttactgcctcagcctcccaagtagctgagattacaggcgcccaccaccatgcccagctaatttttgtatttttagtagagacggggtttcaccatgttggccaggctggtcttgaactcctgacctcaggtgatccacccgcctcgacttccaaagtgctgggattacaggtgtgagtcaccacacctggcctaatttatcttttaacagactttattttagagcagttttagctatacagaataattgcacagaaagtacagagttcccatatgcccccttcctcccctgtgagcagtttctcctattattaacttcctgcatttgtgtgtttcaactgctgcaattgatgaaccaacactgctctgttgttactagcagaagtccacacgtcagggtttgtgtgttgcgcattctgtgggttttgacgaatgcacagtatcatgtacccaccatccggtatcatgcctcccgtgtattttcagtgctggggccaaaaaaagcttttgcgggtagaaaaagagaaggctctagaattttaccacagatgtcaggcttagattaggtcaagaaggtcagtattaagatagccctgatgaagaatcaggaactacaggcggcgtaggtgctggtggctggggatgaggccaagaaccacctatcacccttgccacagtgccgccagacaggtccctccacataggccaccctcttgcctctgctttgggaccaacaaaccccatggcctggaagggcctcaacctgtggccatggggtttggtggccccaaagcagaggaaagagggcggcctacggtgccccaccatgagctccagctggtcagatctgagtctgcaattggagaagcttcctgccctcaggagaggaagactcgggacacctgtgggtggcaggtcaggctgtgctctgcattgtgagcaagcccaggcctgcacggcttggatccaaagctacgcagtgaggcctgctctgctctcctgggtagttgcagcgggacccctcacattctcctacatttgaagaagtgaacatcctcctggtagtctgggtgccgctcyaggctcctgccccttgcttgctgggtgaccctggacaaatctataacacctcgctttggctttcagtttcctcacccataaaacggggaccatcctagtatcacctaatgataggtgagttgcaaaggctggggcagatgacccagctccttccaccgtacctggcgcactgagacactcagtgcatattcatgcatgttactggaatcccagtggccccgggtccagccgctggtcgggtgtaatgtcaaaggacaggactcagggcttcaagaggctcttcacactgtgcattgtggggagctcacctgagcagcgagcagacgcaggagacagctggagatgaccaggaatcagagatggcggctgcaggcggcagaaagaactagaatgcaggccaccagagttcacgctcggttatgctgctcagaggggataggggccccgcggcattccttgcacacctgacttccctgactgggacaaaggagttggttagcgtggtgcttcccaaagacgtrtgcactgaagccctggggatcatggtaatgttcgtgctgattctgtgggtctggggtgtggacagagcatctgcatttctaacaagcaccctcccgggagtgcccaagccactggtccacagagcacacctggagtcttaagcaagatcaggactgtatctaaggctgtttcccgccccttgcctcccaggaccgctctattcatccttcagccccaaagtcacagcatcccgctgtaaaccctccgcatgcctgtcctcgctcccccatctcccggttcacagttctgtcgtagtcagttcttaccaaatcataggcacctgctctaggccagggtccatgggccctgagataccatggaaatgcaaaggcaagtctccgccttcatgcagcataggatctggctgatgagaycatcactttggccacaccactgttcaccccacatgaaagagcaccctgggsaaagccagggtctgtgtctccttcattctctgccccatgcctggtgcaaggtctgaggcagagacggactatggacagcaggtagtttgctccacgtgttttcattaattcctgtgctcagtagggaaactgacatgagcatggtgcttgaatccatcacatttcatactaaygctacattttcttccagtcattgccatctggacacatacaaggaacttttgaactggcaaataaagaagaaaacagagaaaaaaacagatatcccaacatccttcccagtaagattttattttatgttttgcatgatyaatggtgtttgcactaaactcagctttgccttgcagctccccrtgactgcaggccattcctggtgctcagaggccccaaatcagtctaactgctcagcatttgcacctaggactccagaacgttcctctttaggtgcccatctccctgcacaggccctgggtaccttggttgctcgtgggtctggctgccaagcctrtgcttactgttgggacctgggctgcctggggcccagcgggtaagggtgctgcttcgtggccatgggtgccagctggcagggcccctcctgtggaactcaggcctggcacccagtctaggcctgccagtggccctgggcagctcccttccctcagactcagtgcttgtgaccacaagctgcaaatccctagagttgtctggggtcctggaccaatgacaaaaataatagaatacgaaatttgtaggtgggcagcagctttgtaggaaggctctgaatcgacctgatttaaccccagcagtacaagtgggcatgggctggggagcgtgggtgccaggaggtggcagggccagagagcagacggatgtgtgcgggggtgcgtctcggtgacctgctccagctggatgggtcgtgacctgggggcagctttcacagcctgtcttggtgccaagacaaaccctgtaggttctgaaccgcctttgtaagagctggcccgggccgggtgctgtggctcatgtctgtaatcccagcactctgggaggccgaggcaggtggatcacctgaagtcaggagttcaagaccagcctggccaagatggtgaaaccccgtctctactaaaaatacaaaatattagccsggcatggtggtggacgcctgtaattccagctacgtgggagactgaggcaggagaatctcttgaacctgggagacagaggttgccatgagccgagatcgcgccattgcactccagcctggggaacaagagcgaaactccatctcaaaaaaaaaaaaagatctggcccagcagcaggggggcggggcgtgcagttggggatccttcacctgggcccctcccatcatctgctttgcccatcaggctaacaaaatggcatcctcaaagggctccactaagttcaggtttaaatcccgaacctgcagcctccgcctggtccacaaagggagtccatcccaccctgccagggccttggtgggatggaggaaggcagcccatgtggrccccggaatgctgctccctgctgcatttttaggactagaattgagttcatctgctctgtatgtcagagcagctatgrtctgtccgatctgtggtctgtccaaactgtgcactttttagaaataattctgtcccattttacatgcgtgggattgatatgtggttttcacaaaacccactgtgaacccatgatccaatgaaaactgggagaaattcatcaaatagtctttcattcaacacatatgtgtaggggtggccaaggcaacaccaggaagatgggtcaggaggtcatgtggtggccacacagctgagccttgacagtggctcagacatggctagatgctgcacactttggagaggatttgttgccaatgggtagaagatatcacagaaagaggggaggcaacttacatggcttgagcagctcaaaggaaaggaaggccgtggcaggaggaggtctgagatctttggaataatgtgtgtcaaatttgggatatttagaaattagtttcactgcttaatttattaccttaattgagtggttttaagttgtgccttgatttgccaaccatatgtgttaagaaaccgctcagtgctaagcacattcctgaattcctcatttctctcaatcactaaaccttcatcccttaaaggtaacatcacattgttaattaagactatttagctgggacctctgtggaagcagaatcatggccaagtgtgggcattacctacacccagtccccttctcaaagtgtgatggcccagggcagagcagtggcctcacctgggagtcccccacctggaagaggccgggcccacccactgcaagtcttctctgagccacgttctcaagtcttctctgagccgcgttctccaggttgtgctgctggagtcagttggcatttcctccaagcctgaaagtgtagtcagattcagaatgggcttttctagattcccctgtaagatctttcccctgctcctggcaggagcaccacaccatgggaaccccagggcccacgcagctgcccgggactgggggaccaggacrtggcacttctcacatgggtggaaagatgggtttacagaatggtggcatggagacgctgtggcctggcaaggatcaatggggtggcatctggcattagccatcaggaagwcttaaggctgaagggacattgggcagggagctctcagggctgctccacccgcccccagggtgacagcccatagtatcacttagggtgggactgagagtcacctgggggagaggagagaaggggcccaacttccccagcccctagtatcacttagggtgggactgagagtcacctgggggagaggagagaagggacccaacttccccagcccctggcaccttccctgcctttcccagtcttttaccagagtcataagatggtccttggctctgggcaggcatgtggccctggggagctctggggtcagaggtcaaggtgctttgcatgtcaggcaggcttgacttttgcctgtagaaagactatagaaagatggcaagctaggcctcttttctggaaaagtgccaacagctgataattttaggaaataatgttttgaatgtgaagtgtgactttttagaataaaaagacaggaagctcttagaaactgcaagattctaaatctaagcagaaggctatattttaccctgtgcttttctatagctgtcctcaaagcgtaaaccattccaaattattttcaactagtgttatatgtgttcagcagagctatttctgcctgggcattgccagtccctgagcaggagggtctcacagtgaggtctgcaggactgtaagtttggggtctgactccctggccaccctgtgtgggctgtgactgtctctcagagctatacccgccctttctctgctggcagcccgacagagctggctcaaccatcggaggtygcaggccaccagcccgtggcccacctggcagccttccaggtgaaggtgagacaaacaaggcatgacctgggggcygcccggctccccatcacaaacgccacaaacaccacaaacacaacccaccctgatcagagactaagcagagaaagcagggagaggacctagagttactcagtaatgactcaggaaggagaccctaagcttctaccacatgccagactctgtgcccagtgcagcataaacgtcctcagaaccagcctggtcccagcctggccragccggacgttcctgggaaaggttacaggaggagcagggccaggcccacagcacttttagaagcccatgaaaatgtcttcatttctcttcaaatcacaaacaaaacgtgcaaaacccattctggagtgcatcttttcactggcgaccaacccagtcctaagataaccttcttaatagttctatggaggaagctgcaaaggcagaagtgactacaacccacaaaagtcatgatggagccctgacgtgtgtgtacacacacactacatgcacacacacacacacaacacacacactacacacccaccgcacataacacacacacatacacactccacacacacaccacacactccacacaaacatatcacacacataccacacacatacacaccacacacataccacacactacacacacacacacacactacacatacacaccaaacccacatgcacacattcacacagcatacacactacacacatgcacaccacacatacaccacacacactacacacatgcaccatacacaccacacacacaccacacattacacacatacacaaccacacacaccacacacacaatacacacacaccacactcactacacacacaccccacacacagagcactccacggtcagccttctaccccggaaaactgcttgtgcaacaggctggatctaccagacgctcctcactgtgctcgccttccagctctggggcagactccggtggtgggackgagggtcagagtccccaatcctagacccccacatccacttgtcctcatggggctggtgctcatttccctgggaagcctgggagagtggacccagttctcctgtcctggggctcttttaagtgcacccacacttggcaacactggggctgggcccagtgcagggttcataaaatacagcccttgcactgccaggggcctggcacattctgccattcttgctatgtaatgacccagcagcccccatcctggatgctgaaatcctacccttgtcgtcatgccacagctgagacagtcagtgttcaccaaagcaggtgcattctctctcaggacactagtgttctccatgggaacgctgaggaagaacatctctgccacccccggtgtcgctgtgaagctgcttttgcccttcccaggagctgacactgcagatgaagagacagcactgtgatttctggaagagacagcactgtgattcctggtcctaatatcttggctttgtttgggttttttttccagatgaccattctagggtgattctgagccaactggatggaattccctgttcagactacatcaatgcttcctacatagatgtaagtgggcagaggtttcttgttcccctggcccagctggggcatgagcagtaagcactttcttgtctggtgcccggagtgtaaattgtcacaacctttctgggcagtttggccacaagcacaaagggtacggaactgcccgtrctttacacactggcatcagcatctgggaatttgawttcaagagacagagatgatcacagaggatgttcactacagcattatgtatattcctgaccaaatagaacagggagcatgggtagttaaacagattgtggtaaaaccatgtgcagtggactattagaacttgatttgtattaatctttaaaagatcatttaatatcaattataaaattcccattaaaaatacaacataaaataaattgtacatgttcacccaattagaggacagaaatgtctgcatgtctgcttgtgggtgagtctgggaaaggtttggcagaaaaacagactagagaggggacgtatgaartaggatttgttatttctggaattgctggtgagttttctttccttcttaaccttttcctgtgttttgcaaattttccatggtgaatatgtactgctttcctaacagcaacaccaacaaatcctttcagcaaagataattctgaaaaaatataaatctgatgttattttttctagggttacaaagagaagaataaattcatagcagctcaaggtaagctttttaytaatttctcaacgtatttttggtaacgtgaatagctcttatttccttctctgtatgccaacaagaccaaggacttatactggatttgtgtgtgtgtgtttacacctaacagacacgttagatatccattcacacaacggatatgtgtagtcagagaaacacacacttattcccacacctatatggtgtgaacacagggcacgcartggccccggctgccattccagcttgttaatacttgcrtcagataaccttgaatttctctcagctggctgagccctacatggcaccccaagtttgggcgaggggttagtggggtgaatagcttttcagatcaaggccataactaagaatatacttcagctgtgaaaacgtgcccttcaccttgcacagggctaccttgtgtgttgagtactgaatccagcatcactccgttccaccagaggttgtcatctgcaggacctggtgtacgtgcggttagatatcagtggagctgaaaccagattcctcagacttcctcactcttaggccaggagtctttagggcaatgagctctgaaagtcagcgtccatcaaaatcacctgggaagttgttacaaatgcagaatctctaagaaaaaaggacacacatgtgcacacgcagaggccatcaggaatgtgcccagctggaaacctcaggaaacctgacgatcctggctgaagcagatgaaagcatgtgtttctctcttgccagcagacacccacagggagctagcccacggcaggacagcagcagggccaggggcttccttatctccccgcccatccccctcagcacgtagcrcttagctcgggactgcaaaatagccgcagctcagacaggaagtggataggggcagaggactttctcctagtgacactttgtctgttgttcacatccccctcccgagggactttagctcatatcgtattggacagcaccatgctgagagtaagattttgacaaagaggaggggattgggaatgcagggtgaggctggccagtctctgcctctcgcaaggctttcaccagctctcccacacttggctgtagacccagccctcatctgaaccctgcttcttacctgtgaacgtcataactcaacctgggcccaattatcttgcccactgaggagttcctagctggagtgggtgagtggcaggacaggcagcccctaccggttccggaacgcttcagggcatgacgtgtgtgtccccaacaagcctgagaagggagtgaacagctgtccaggggccaacggccagggtgccggggctgggaccccaaagggacttcccttcatgccttttgacttygaaattgtcctctacacacaggtcccaaacaggaaacggttaacgacttctggagaatggtctgggagcaaaagtctgcgaccatcgtcatgttaacaaacttgaaagaaaggaaagaggtgagttccaggcatctggccccggtatcacttcctttcagctgctgctgccrggctggggatgttcttaccacttccttttcctacttccctcccytcctcccactatcactgcagaaaaaaacccaaacacatgcagtggcttacagcattttcttcacgaaacaaatcccctgtgtccccagcatctcactgttatctaatctgtgataacacaatgacacaagagtttcctttttttcccaagtaagagtggcccccggctggccccatggctctgcctgcctgatgagagacatgaatcttagagttttaggatgttgagcgtgtcatgcggcagagctcagactagaaatgaacatgatttcgcgcttattatccagactagagaaatgcttttggaaaacgttggtatattgaagaaatgttgatttgtcatccgaatatatttaattagctgtttctaattcaaaaaaggatgcatgtacgttataagaatttgaatcattgacaaagaagaaaagttgaactgattcgtttcctaatgtaacaagtactcattagcatctgctgtgctgggccagctctgtcccaggtgcaaggagtaggggctcaaattcagggctgagaagtggtggctgtggggagcctgggtgcgggggtggggttgagtgacaggcagggagccatgccataggcagtgagctcactctccagaatgaaagaagaactgggagcctgagggacacttaccacaggtggggcgaagttaggaggctgtgcttctggcgtgttctggcatgaaggcccggttcagtgggagccgtgtgtcctgcccggccctgctcagggcmtgctgtgtcctgagctcctcagtcatctgctggcctggccccagcagttcccaggcattgtagcgaggactgtggggaagggctgccatttttagatgggagtaccaggccttggggagctcagctggggcagaagatgggtggcaggagcccacaggaagggcaggctgggaggtgctctggtccccgcagtgccagcttactaattgccayccaaaacacaggaagcagcctccagccaccgtttctggtcaggaataggatggaggctttcattctgctctggggggagctgaaacaggactgtggagggccacccctttgcccttgcaaatcttgcccttgtcatgctttgtcatggggaagagggaagagtgacagagggaagtagggkattcccagcccaggactcttcactctgcctgcgctgtagcggccatggaggaggacacccacgcgagggaaaaggaggctgacccttcatcaggagcctcagggtcccccrtgacccatggcccatagggaccagtcttcctggggttggtgctccaagcatgagaccagcacagaagcagtggggctcaaggacgccctcacttccctctttcagtcattctgctgaaagtgtcactggcattttctctccatcttcccccacaacctcctactggatttttccactcctgtgactcagtgctgggctgctgccgcgtcctcattctcaccaattcagatgaaatcatttctcaatagagttccctttttcttaattgctcacacttctgttgtggtttccttggcttccacatcctgggctctgcattgcaaaacacagctgccctggcatctcatgatcgggtgggagggaggcagagggagggggtmtaaaaccagccaccaacactgagcccttgagaggctgacacatgttctcagttcctactggagagccttcaaggtgagaagctcaggagggaccccagggctccccatagggccaagactcacccaaaccgggacatgtaggcatttgcaattcccctgggctgcatcagagatggcctgtgacccrcagccccgcagccccgcccggagccaggtgtaaggagggggaagttgtcggtagccgtcataacacaatgatgctgctctctactaaataccagatgctgtttgtttcataagactgttaatcctggaggcttgaccacgagctgtgctgctcaggggccattccctggatatactctctgactactggcaggcttgttccattccagacatgtttctctggcagatgaagtagatcttttcccccttgaggtgggtcctcattcactcgcgaagtgatggaggacaccaccgggcaggtgctgcgggcggtgctgcaaaatgaaagggctcctggaacgtgtattttgggtcattcttgcttcagaggtcgggaaggtaaagaaatgggcctgtctgtagcaatgcaccctcttctgcagactccacggcagcctcgtccctgctagagaaaaatgaagatcgttagaccaatcataggttcatcactcttgaatggcagactggcagtggtgcaaattaactttgtccttagtgaactgagcaggaaaaacacaaattgctgaatccagtgggaaatgtctggggggagcaccgtccttgccctctagcctgagggtcacttggagttaggtgcccagctctgaaggctacaggctcagcataactggttgatggtcagttaataaaaygtatgggattcgtgaatgaatgaagaaatgagacattgttgctgtctacatcagaaagccttggggcatcctagtcatagtttcaaggctgctgttcaccagttacgcagcctcagtttccccattcaagaggtcgacacacgtgaacttgtttctcagctgtgggagctgtgtgactccagctggtgtgtgtgaggccttctgtagttgggtggggggrtgtcatgatgcattgcacccacagatctatttgcttctattaaattgttccgtgcaggaaaagtgccatcagtactggcccgaccaaggctgctggacctatggaaacatccgggtgtgcgtggaggactgcgtggttttggtcgactacaccatccggaagttctgcatacagccagtaagcatctctagttgctgcccttccagaaagatcattttcagagagcatcatgcycagagttaacatccttctgcatttatgaagtgctttgctcccagccyggcactgtcgcagccctggctgagagggtgcagtggccaggctgtgataggcagacatgcaagagggccaagacaccagaggccggtgcacaagggtctgcaggcagtgctgggggctcctaattcctagtgactcctctgggcctctccaggaggaagaccagtcattggaggggcctgggggtgaggtcctccctcagtagcacagtgacatttcacacactgactgggaggtggggtttttttctaacactttccgaattctgtctgaaacctcctcgttattttccacacttgggttctgctagttccaccaccccaaaaggtttaagagagagatcagtaaaaatatgtgtatgcaaagcagatgaaatcaagatatagaagaaagtttaaaaccatagagaaaagacagaagaccattttgtcaggatttaaagatagagtcattggcataattaggtcacaaaataagtgtctgaggttccaagaagccacagcaaaaaaggaaaaggatgagctgattattcttatcctatcccctgctggcatctctcccagaaatgtgcacacaggcgcacacaggcactcacatgcacacgcacacacatactcccacacacaggcacacacatgcacacatgcacatacacccacacacaggcatacacatgcacacacacccacacacaggcacacacacgtacacctacccacacacaggcacgcacatgcacatactcccacacacatgcatgcacatgcacacgtacacccacacacaggcacacacatgcacacacacgcacacaaccgtacaatgcatgcacgttcacacacacatgtgcacacacaccccactcacatgcacacatgcacacattcacacatgtgcacacacatacacccacacacattcacatgcacacacatgcacacaygcacacayattcatgcacatgcatacatgtgcacacacacgcacccacacacgcacagatgcacacatgcacattcacacatgtgcacacacatacatccacacacattcacacacgcacacgtgcacacatgcacacattcacacatgtgcacacayacayacacgcacatgggtgcacacgtgtacgcacccacattcacacatgcacacacatgcatacatgtgcacacattcacacgtgcgcacatacacacattcacccacacatacatgcgcacacatgcacacatacacatgcatacatgtgcacacacatgcacacacatctacttccaaatacgctgtgtatcaccttccgtgatctgggcaagggaattaaactcatgggctctgggtccaaaagctgagagaggctctgagggcaggtctgggagactccaaagagcaggccgactgcatcatctgtcctcccaaatgtaagacagctttgcccaaggaaggatgtgctgttggtgattactcagcaccaccggcctgaggtgggactgtccaggcaagatgggccatggccgccctgcttgcacgggggtctgtgagcacacagaccaactttggggatgtgtctggctgcttgggccctgcctgacctgggcatagacggttgctgcgggccctgttctgtggccccaaaagcagcacatgttcagagtcggcaggggtaaggtccaggctgtctggctcaggcaggccctctgtggatgggcccctcccctacgcagccccagcacaggggagcccacggcggcgtcctcagaatgagatgctgggggagcagggggaggattgtttcacccactcttgtctccccgcgtcccccgcagcagctccccgacggctgcaaagcccccaggctggtctcacagctgcacttcaccagctggcccgacttcggagtgccttttacccccattgggatgctgaagttcctcaagaaagtaaagacgctcaaccccgtgcacgctgggcccatcgtggtccactgtaggtacgctgtgggggccacggggcgggaccctcaagggcaggccacagtgggatgactcatcctcatgggcaatgccaggggaccaatatcagggtgggcagaggtttgggcagggctgatgtgaacacaaatgtcagtgactgagccaggccccaagaaccctacaggagaatgttcagagagccccctcttcatcccagtcgataaaacccaccaaagccaggaggctccggttgatggtgggaatggagttctgggcaggtctgcttggccgccctcacctctccccgggaatcccaagtcacctctgggaaccaagatggaaatgagagaaagccccctggtttctacaggaagccccccaacaacacacaagtcgttatggaagagcacaccatgctcagatgggcccccacagcagagtcttccagaacacgctgtcctggagaccagggtccgaggaccaggctgcccctcgccagctgccacttcagcctcggtttcctcacctgtgatgggaaggacagcctcggcggagcctgtgactggcatctgggtgggctttgcacaacatgaagaattactcaaatgtacagccaaggccaccccacaaccccctgtccacagagagccccacttgttcctggcagtgattggcctcaccagggtatcactttgattagatactaagtttccatctgttacagacaggttcattctgagtatcacagcactgccagggacaaaagccacctgcacgcagtgatgcaggcgctctgcacctgtcatgcaggtgttcacgagaagccgtccaggaacccccgaagaacgggctttccccaagtctgagcaacactcgcttgctggggccaagcagaggctggaccccaccccacccaccctccagtgtagctcatactgggaagaatttgcagggtcagataacagtaatctgacagatgccacctcacttaatgccccgagtcagatgacttggtttgcccagtttgacagagagggaggctggataccagagctgttgcatagttgatctgaggtccctctgctcccagggggacagatctaggatgccaatcacacatataagaagaagacactgtttggtaagtgagaaaaattctccacacagcctaatccgaggcttactgcaccagctgttaatgtgcctcttagtagagtgtcggtggctatcagaggaccggcctgagatcactttactgagaccacagctccctctggtggccgcactgtagctttgctcctaattaaccaaaaaaacaaaaagttgcatccagtgacctgggtgcgcaggccccttcggggcctttcatttacttcgggaggagtgtgactcacgacgcagcatctttctctttccccaaagcgcgggcgtgggccggacgggcaccttcattgtgatcgatgccatgatggccatgatgcacgcggagcagaaggtggatgtgtttgaatttgtgtctcgaatccgtaatcagcgccctcagatggttcaaacggatgtgagtcatgccttcctcttgccctgatctagcttcccaaagcaaacccgatgccttcgccacacaggtgtgcagggccctggctctgatgggcacgtggcaaccagcctgggcctggcctggcttcgctccccatagccttccctgcccacgcgtgggacctcagggactccctcgtcctcatctttccctcgtatcctcatgtgagatggggcaatcctactcccccaaacggtgcatgtacacagtgcgtggcgtgctcaccaatgtgaggctctgctgctaccgttctccttactcaagggcataaatggtcgttatccgtggccggtactctgactcttgcctcacacctccttgtgttggcaaaaagagaaaaagaagaaagccgccctctttggtctgccaagctccacgtgggccaagactgcagggcagagttgagggtgtgggcacccctggcctctctgcagatgcagtacacgttcatctaccaagccttactcgagtactacctctacggggacacagagctggacgtgtcctccctggagaagcacctgcagaccatgcacggcaccaccacccacttcgacaagatcgggctggaggaggagttcagggtgagtacagctgaccctcctctccatcctggtgtaagcagccaagggcacgaggaaaacaggtgaccatttaaaggaagcctctttcaatcacttgccccttaactgacctcagaaaaagcaggggcaatacctgagccatgatttacaagggaagaaggatcaggtggctttcagagcctcatagcagccctactaggcacacatttgtatttcccaatgctaaggaggcttcctgggttggagagtggtttcctttgagcaggcgtccttgccagcagcactagtcctcggctgagcaatgtgctcaggagtgtcagaggtttaactgtgtcattatatccttctctgctgcagaaattgacaaatgtccggatcatgaaggagaacatgaggacgggcaacttgccggcaaacatgaagaaggccagggtcatccagatcatcccgtgtaaggcacccgtggcgtggcttgggcagggctggggcggggctggtgccggaggctttcatcctggagaagccattgaccgcttacccctgtgcaccagggtcaaaagcagggtgtcctctggcctcaggctaagggctcctgtgtgctgtaccaaatgtcaggtagaaaagacacctgtgaagcaccagctgacccagacagtcctgcatgggtctcaggcaagctgcttsggatatgagcttgcagatgcgggagggcagccgaggctgatttcaggggagggcttcacagaagctggagatttgcggcaggcacgacttgggattccttgtctcattccttgtctccccaagcctgggcagaggcccgcctcccccttacacagaggggcctgagccacccagccgaggccatgcaggtgaactcagctgagaccacctaggaaaaggctgtggccttgaggaggacaagaaatgggcctagggtagagtcaggacactggtctgccacccaggtcatgggagagggaaggaggacctggcaggtgtgggaggagtggaggcaaagctggcaagaagacagggccacatgcagtgggcaggggagygggaatcgggaggctcaccaagtgggaaaaagagaaacttgagaaacccggccccaaagcagactccacagggatccgaggaactagggagggaggtgggagatgccccgcttgggaggagggtgtgcctcgttatagacttgtcctcgacagagtcacagctcaacaaacaccatctggaaacagctgggagcaggcctgctgcagcagggtctccccgagcactgcaggcgagtagagctccccggggtgctgccatcttcagactctggcccttggttttctggggccccggtgtcctgctggccactctagattgcttgcctggccacattccatttactccttcagcgcaatatttttagtgcttgtattttggtatgtattatatcgattcctgaaaaatgaaaatgataattgggtggttttcagagttttccttcaaaaagaaaaatacccctgagccactttaattatcgtctctcataacgtaaactttccaaagagttggctttacstagtgattttattaataggatctatattttgcaagcttgtagcaatggattaaagttagcaaggtgggaccctttttgtaataactaaaggaagataatgctttgcagatgacttcaaccgagtgatcctttccatgaaaaggggtcaagaatacacagactacatcaacgcatccttcatagacgtacgtatgctggcctgggttgtgtttatgcagatgtgtttccttcacatgtgaccacagacttgattagcttgttttcacaatgagaaagaattgacatgtttccagaaactcagccatttttgttagcagaattacttgcttaaaaaaaaaagtggcaaggcacgatggctcacacctgtaatcccaacactttgggaagctaaggcgggcagatcacttggggtcaggagtttgaaactagcctggccaatatggcaaaacccgtctctactaaaaatacaaaaattagctgggcgtgatggcaggtgcctgtaatcccagctacttgggaagctgaggcaggagaattgcttgaatccgggaggctgaggttgcagtgagctgagattacaccactgtactccaacctgggcaacagagtgaragcgagaccccctctcaaaaaaaaaaaaaaaaaaaaaaaaagkggactttggaaatagaaggacatagactcsctgctaagtaattggctcttttttcattctgcttttaatatatagttatttttcttttacatatctgttacacaccaattatatatccactgcctctgtgctctttctcttgtgtgatttctgcaatgtgtacccacgtggacaatacaattatgtgttcagggcacacagaggctgtcttcatgcacagtggagttcgcagaagaagggcaaaagggggaatggcagccaagtgtgtgttcatattgccatttgcagatgagaaaattgtaccagaatccggtgggctccatgctgatctagctgaaacacacagaaacatgttagaatctaagccaccaggtgctgttcaggtggccacaggcaactaccagttcataatacccatttgttgatgwcctcaggggctgacggtggccgttatggtttcagataagcgagcttcttgacctgcttgtcaggtgtgtgcctgagtgctcgtgccaactggggtctggtgcagaccatggaggatgagagagttttcctcattaggccttargctgtcctaaacttagggagcaggtaatggagccaggatggaaggaagtcagactctaacctctgcgcctccatttgaagggctaccgacagaaggactatttcatcgccacccaggggccactggcacacacggttgaggacttctggaggatgatctgggaatggaartcccacactatcgtgatgctgacggaggtgcaggagagagagcaggtgaggagtgcyrcccagcccggtccctccagggcagcctgtgcacctgaggcactgtcyccgttcattacaaatgtcccacctgccatcactgcaaacacatgggtgagaccaagccaggaccactagggaaggagagagattggaaatgaaaaaggtttcatttcaccctttccctttttgggagtgaggtttaaccatagctacccgctgccctttatccttagcctacatgttatttaacctgccctgaaattctgccatttggtattggccaagatcataacctgttgaagaaaaagacatttattgacttttttcaagacatgaagacaacagtaaacccaaggtttaccaacaatgtacatctatctgggttctcccccaagacataactactgctgtgtatttgtgtttttatttctttgctctaaaaaggaacagctttattgtgatataattcacctataattcatgcaattcatctttttaaagggtacaattcagtgaattggagtatattcacagagttgtgcaaccaccaccactatctaatctgtgatcattttcatcaacccaaaaggaaacctcgtaccattaacagtcactccccattccttccttcccctaacccctggcaaccactaatctgcttcctgactatgggtttgtctattctggacattattataaatggaatcatacagtatgtggtcttccgtgattgggttctttcacttagcatcatgctttcaaggttcatctatgttgtagcatgaatcagtaaatcattcttttttactggcaaatagtattygcttgtgtggatatactacactctgcatatccattcatcagttgatggacatttaggttgtttccactttggagctattataaatartgctgctttgcttggtgcggttgctcacacctgtaatcccagccctttgggagtccaaggcgggcagatcacctgaggtcaggagttcgcggccagcctggccaacatggcaaaaccccgcttctactaaaaatacaaaaattagctgggcatggtggcgggaacctgcaatcccagctacttgggaggctgaggcagggagaatcgcttgaacctgggaggcagaggttgcattgagctgagatcgcgccattgcactccagcctgggggacagaacaagactctgtctcaaaaaaaaaaaaaaagtttcttgaacattcaggtagtagtttttgtatggacatgctttttcacttcccttgggtatacgcctaggagtgtatatactaggagcggaattgctaggtcacgtcataactctatgtcataaacttactgtttaacatttttgasgacctgccagactgttttcctcagtagctgccccattttacattcctaccagcaatatataaggttctaatttctccacatcctcaccaacattgtcattgtctttttgattaaagccatcctagtggatatgttctttgcttttttaaaacatcttttaaaatcacatctgtttatgcctacrtagactgttgtttagttttacttgtgtttgaactttatagaaagagcatcattacagcatgttgtcttctgagacttgcttcttccactcaaaattgtgcttttgatattctatgttgatgcttatgctgtggttcattcgtcatcattatttcattatattccactgcacaaactatatcctgcattagctcaggtattccttctcctgtcatgggcacttgagttggtttcatttcgttgttttacaaacagtgctacctgtacattctttttttaaaactttaagttctggagacaagtgcagaatgtatagttttgttacataggtatacatgtgcatggtagtttgctgcacctgtcaacccatcatctaggttttaagccctgtatgcattagctatttgtcctaatgctctccctcccctcaccctccaccccccaactggccccagtgtgtgttgttcccctccctgtgtccttgtgttctccctacctgtatattcttgtacatgtcttatgctgcactaggactaagatgtatcaaagagccaaaatgcttcattgaagagtatgtgaaagtttgaatttgcaagataattcctaattgctttccaaagtggacatcaacaatgtataagagatatcattcatctacatacctagtatggtattctcaaggtgtcctaattattgttaattgaaaattaacaaaatattsttcattgtataattattgtataaatactatctttttgtggctctgatttgcatcattctgattccaaggtcaaccccatcacttcatatatttgtggatgacatatttcctcttgtgtcaaatgcctgttcctgcctttcactgatttttctattgtttgtcctttcttattgatttataggagctctttacgtaatcttgatactaattctttattggttttatgtattgcaaacatcttattgcaatctgtggcgtgtcttttcactctgttaatgatgtttgttgatgaagagaagtgaatgttactgtaatccaatgtttcaaattgttgcatcgtgattggttagctgtttgggctcttgtctagtaatccttgtgtacctcaaagtgaaaagatatttcttcttccaagagtttcacagttttgttttttaccttaaaccttactccatctgggtgtatttttattaaggttcaaggccatgacacgtggaagtgcagggtgtacactgcccagttctaggaagagctgggggcactcacatcaaccctggtagggaatgagtcagggatccaatttcattttccccaggtakaaaaccaatttttccagccccacatattgaagaatctctcctttctgccatatgttaaggtttcatatatatatgtgtctgtttctagactctgttctgttccctgggtcaacaagcattaacaggcatttatattcatattcatatgttwttttttttggtcagatgaaatacattaactggtttgagaacaattctgtgttataaactcaaaatcgccagcagcaaattatttattacaagacttaaatttttattttatcccctaaggataaatgctaccagtattggccaaccgagggctcagttactcatggagaaataacgattgagataaagaatgataccctttcagaagccatcagtatacgagactttctggtcactctcaatcaggtattgttgaagtagctctttaaacgcttgtgaatttagtgaaccacgccctccctctgggttctgcttgtcattgaaccagaatgtggccctgcacctgtcctgctccttcacctagtcccattggctatgaatggccaatgggtttcagagacagtggcaggcctcctgtacaattcccatctccctagcygcctacctcccatttatctctcaggagaattacattagccattagctgtragaggaagaacaaaggggactaatgaagccacaggggcctctctggggccctcctccaggtgccttctcagagccccccaactgtccccatttccactgggtccttggttctgctcatcctctctccttggcaaagaatgagaactyggggtcagctgtaggtaggatgactcacttgtacacaggtcttgatgctgagctccaaacagtcagtatcacgtaatgcacctgccactgtctcctccatgccagccacagagccacccyggccaccagactcagatgctgctcatttgagctctgaagggaaatgcagggccctggtttcttgagaaagtgattcccttctctccagcagagctgccaaggatcccgtaggggttgggcagtcctcacagggatccaggggatgtcctctggacggctcgctcccccttgcagaaggaagcacagccagccacctgccttcttctttaggrcaagcaggtttcagccttctccttcaggctgcctcggtggggatgttggcagcacagaaggctcagggagggctcccagccttggccaatccctgagagggcagatggggctggggcctgttccccggcaggcaggcgacgctgagaccccctctcctccctgcagccccaggcccgccaggaggagcaggtccgagtagtgcgccagtttcacttccacggctggcctgagatcgggattcccgccgagggcaaaggcatgattgacctcatcgcagccgtgcagaagcagcagcagcagacaggcaaccaccccatcaccgtgcactgcaggtgagcccccagcccgaagccctccaggtggggtggacacaggctgcacccccccagtacccgcagctgtgggcagcagagcctggtcgctgcccctggccatggtattccctagagtctcctctctacctctccttacacacatgcacacacgacttcacttaagtacatacatgtcatcgtatcatacataagatgcatrtgtgtcatcttaacataaatgcagaatgcacttcagagggtggagttgggaaaccactcaaacacacatttccatgtgcttttgaagtcatcaaaaaattgccaggcagggctcggaggaacacactcctggacttcaagttcctgggtgggttttgagagactgccttactgggctgcattggcctacacccgccctctcccatgggctgggattcctggccatatgaggagtcccaactgggattgtagccacgctggtcctgcagcctcagcctggctcccaagtcaggcccaaaggcagagggacaccctgggcaggtgggacatgcttagtccgcaggtgaaggcgtgaaacacagcacgcccaggggcagatacgcaaatctggtcaagcccacyggccacccacttgcctgccttctgtgcctctgtagttctgatcctgctgcacacttctgctggcagggacctcgacacccggcaaggttcttccaagcaggagcttggggtgtttctatccttgggtggtgctaatgtgctcctgaaactgcagttccatggcttgtctcacactggtggcgcccactctttgtgactgcctttcacccccacccactgtcccaccccttatagctggcagagctctctccctgcctggaccccaccggggtgcactcctggcctggccagtaggtggagcacacacctcggtttttggttttcctggtgccttccaagaaatcatttaggataaacttgaaatgagttccatagggcactggagatgcagaggtgaacaagatcccacctgtgagaacgcagatgcggggccgatcattgcggcaggacaggagccttggaataagcccacatgtgagattatggagcacagagggcagccaggcatctccagaagacctgctggaagaggccggtccaccccacctcctccagcccagtacacctgggctctcctacgagggcctgggctctgctcttgtggggtttatcagcaaatgaccatggtaaatggagatgactcaaatcggccttgctgggaagtgtcagttgactgttcctggttgtgaatgtccttaaactgcccctccctttcagcatcacctgtttcagaagacacccctggcacagtaaggagagggtatgccaagattacctccttcctagacctgaactgggagggtttgcatttctggcaagttcccaggtgccaactgtgctgctggtccagggaccacactttgagaaccattgccctacacaaggaagaggggaaatggtgatacttgcttaaaaamttgtcactggtcctgtctcattttataaaatatcggtctcctgtaattagggaggtgttttaggaattttacatttgctaaatcttgctcakaagttacactacatacaaatgatcaaaaaaaaattcagtcaaactcagatcattttcagcgattgttgcttcagtgctgatatgcaggggttggctgtcagctctccatttctcatccccaagtgcaagtcrgatgatctgcattaagcgctttttctctgcagtgccggagctgggcgaacaggtacattcatagccctcagcaacattttggagcgagtaaaagccgagggacttttagatgtatttcaagctgtgaagagtttacgacttcagagaccacatatggtgcaaaccctggtaagaatctgaataaggatgttaccagaagagtggagaattatttcatgttgtatttgatgtaygtttcattaaaggaccttaagtacatgggggaggtgggaaggtaaaattcccaaggaaaagagccagctgcaatgtttcgcagtaaacctctgcagagccctccttccttgggtctgtgacgtgggtgtcttctgggcaagacccgggaggaggggcctgtccgccagtttcaatgtctgagaccactcggagagacgcactgaggataggagcttttgtgtcaaagtgaactattctacgagagtcctgtgtgcactgaaaaacatactcttatcaagttcaaaagcagcactgaaatttaaaatcctggtccttctcatttcaatgttatactcgtccatgtggcttgttttccctggcggggtctcactcagcctcaagataccgtccacgggctgcaggaatccctaatgtattagtagttttccccgtacattctttcatttcaaggactcctgctttctggttttcagaagcgattcctcctcaccaaatactatggctcgtgctgctaacccagcgagtacaattttaaagcctgttacaatgcatcctttttaccaaagcttcccacttygcacctgtcctccctgcctgctcactctccacgctgacaatcctggctcacgcagcgccctgtgcatagagaggcaggaaggaggcccttctacgtccccctcacagcaaggcgcagcaggagcgaggacacctgagctgagggcgggtctgtccatccacacccaacgacctacagcaaagaccatctctctaagcagtagcatacagagcttcccctagtctttttagggactcacagctctcattaatctgcctggtctggccaatatattctatcttcgagagcatctgtcayccaggtgtcctcccgtctcagctgtgctcttcctgaccgcagcttgcccctccatgctccctgactgagaagctgccctcagatgttgtgtggctgtcatctgtgctctcttgcctggtaacagcttgacagagcactttgtagcctgacttttagagtaaagggtctagtccaatgcctggcccgtggcgagggctccagagcaagtggtgaatcagcaaacgaatgagggagaagagtcactaaataaccatcaggcgttgggcgcagtgcaaccaggtgccttacagatgtctttctcatttcatcttcaccatctgcttgcccttgtgcctgcttctgttcacaaggagtgttctgcaggtgcctccagttaggacggttgaggggcctgcctgagatcttcaggtattaagtgtcagaatgagattcaaactctatctgattccagaagggaaaggcttaactagtactgtatgctgccagatctaacatttggcagggagattttggcaaaaaaaaaacacaggcacaaaaatattattgagtaaagagatgattgctgacctgcaggttgatttagccctgcaggtgagcacagtggcccaagaaccagtttccaattgctgagcactcagggaagacttgcttccagcatcctaggtaggctttggttggaactgacatttcaaaggccacaagtacatctgttctcctggagtctgtggattgaccagaaatgtctgtctgtgacctgaggtgtggcttgtatcatccgagcacactccaaagtacacttcrtccatcactggccccaatcacttgtactcgagactacgtgggatggtcagcagttagctgctgtgttagctatgaaaacagagtaattagtgatcgtctccatttccatcccagactgagccagctttgatattcagtcaatgttgctttaagttggaaaagtcaatgttgctttaagctgtttgcctctttaaagagagcctgtatatttattgagaattccttctaagaattcaattccctttccttctgaaggctgggtgatcagctgcgtgtcttagtagccagaagtgaggaccctacaatgtggtcttggctcttccaacaacttcatgcaaattcagaagcaaagtttcaggctcaccttttccttctctggaaaactcagctccttcccatcctggccagaccgggactcaggaagggctaagctagctgttyggcatctttccacccaaaagcatttagatatttgttcactgtgtgctgagaagagcccaagtgcaatgtgttggaaagaagcagggaggtgctgaggacagctcttggcctctccggctttccaagcccctgtcccggccccaaactcacatatcccacccaggggtctgggaggaccagcctatatataaaacaatgtcccttttgtacagtaaatgtaggctttaaaataatctagatatgcattttatttaacttttatagatcgctttatgaaatttatctggcaatgttagtactctgatttttttctctttctctcttttttttttttttttttttttttttttgagacagggtctcactctgtcacctaggctggagtgcagtggtgcagtggcacaatcttggctcactgcaatctgcctcctgggctcaaggaatcctcctgtctccgcttcccaagtagctgggactatgggtgtgcaccactatgcccagctaatttttgtatcttttttgatagagatggggtttcaccatgttgcccaggctggtctggaactcctgggctcaagtgatcctcctgcctcagcctctcaaagtgctcttattacagacgttgagccattgcacctggcctggttttttgtttttttttttaaattcaaaaatagttgttttccagtttcaatgtgaaagccacagacatttaactcagcccattaaatacactaagttgaaatgttaatacactaactgacacattctacgtagaaaaacagctttatttggaattctgcatgtgcctaaaaactaaattacgatgtgcataaaggtatatggtattttaatgaatagtcacacttatttatgtcttgtttttgagtatttctcctgattaatcaaatatatttttgggaatatcattttaatgtgtccttgtttgtcttttcaggaacagtatgaattctgctacaaagtggtacaagattttattgatatattttctgattatgctaatttcaaatgaagattcctgccttaaaatattttttaatttaatggtcagtatattttgtaaaaatcatgttaatttatttcatagttgacattaatatcttccctaatttctttgtatatattttgttatgccttaaaggccacctgctatacagttgttaaatcttaaatatgctttttaaaaattggaataatgtattaaggtcaaataatatcccataaaatatatatttctgctaatattagtaaatatcttaatttttcattagattcatatcatttaatttcacatattcaacacctttaaatgttgtaatcttaatatgcgaagtgtgcctctgcaagatactaacacaaagctcatgttaagaaaacagttgaggactcagaagtcagttgaaaatgcactttcctaacagtgaattcacaaccctgaacagcagcatttttggaaggcaaactgttcgtgatggtacaatgtaaatggggacttctgtaaagttctcagtttcggtccatgtggtttatctttacattttgaagatcaaagaagtctttacaacctgaatccaggtctaaaacacactagagtagctggtgactataaataatatttwaaaatgctgtgtctacaccatcaagactgtgtctacactatcttggctgaacgagaagagatgtaaatgctgggtggtcccgttgacccacggcgttgggtacaacaaaaccagccatcggagttacaccccaaagcaccatttgctgtccagctgcctgtcgtttggcccagaccaccctcagaaaaaaamcagctgcctctcccattctsccctcccgttctgccacagcggcctgggctggtccagtgctatgcctggaggctcaacacaaaacttcccatccaaacattcagatgaactgagcgtcttacacacgsagtacagaggagcacacattrggatagaaacagtagaataaccacgggcaattaaactttaaattttctgagcagcattttggtatttaaacatttcttgtaaaaagctgagacagtttgtaagaaaagaatccttaaaatctagatttataccattttttaaagtcccacctttcaatgtttaataaaacaaaaagagaaatccttaatctaaaagctaaattatttttgaatggaaatactactgagaccattgacactggataacagtaatgatcccattaccagataagattgactgayggggaaaaaaaaaaaaaagaatggggtgtgaatgtaccaacactgaatcttacagcagttatctttctatggccattaggtacctagcagatgtgcacaatataaacaaaaagatatctggcctaccttactactaaaagcatttaacacrtgcatttttggtactttyttttgttttctaaaagctacataaaggccttatttgacattttcactgataactgatcgcaccctcrtgttgcagtgttcgtcccctattcattaacagtgtgtgcaaatgcaaccccaggacacrttattgttctgatagatgctcacagggaatcaagcttctcgcccactccacggctctgagccccatccaagggcaagacttggtgcccagctggaaggacgaaagcacactttgtgaccgccatcctcaccagctgcatgcctgggctgcacactgctgaacgtgctcctctctccttctctgtacaatgattcagcatctcggcggaagaggaaaatggagctttttgaggctcgccaggtcccttttgttttcaccattaaaattccaaacccaaagcctttgtttgactgaaggagaagagagggaagtaagcttctgttcagcacctgaaccctagaaaaagagccagtttgctacgatgaaggtgacatttctctggtcattwgagagttcgaagtcaaagycgaggggcacmggctttggttcatgtctaggagccctctgtcagaatccttgaagccctttaatggtctaactggcatctcttgtatcaagaagtacctttaaggtagaccytttcagggtgccctcaggaaagggccctgctcatgtttttttcctgtccccttagaccaaccccaggtktccactgcaggggttctgcctgttcccaaactttttccattccaggaacaaaggagaagccactttccccaggacgcargactctcccctccactgtccgggacagcgttcgccctttagcggggaggtcattacagcctcatggcctctaccaaggccccagatcacaggatctcctgggccttggagcacctcacgctgggggaatcmatccctgagggactcagaatcttctccgtgcaacctggaaagttcatctcttgtttccttcagtcaaagaaagtccattgtacataacaaaacagcccccaaacagcccagtgccgacaccattgttcctttcacactttcctttgttgcatgcagttgggttcaaatgccaaatagtgattagaagacgaccattctgatctgtgtgtgatctggtcactatgtgactgcctttayggtttctctccatgtgctatatgaatgaagaatgcataccartgttttaaaaggtatttttatgtgtttttaaacacttttttaaatgagcctgacacctgtgtttcagcatttggagacatccccatgttattcttttaagtgtataattactgatacttttttgtttgtttgtttaactaagttgtgtttaayttatgtgcagtctttataatgtatgtatgttattacagtttcaactatcatattttctttgattacatttataatttgatcttgctctgattataatgccagtgaatgttgctgaactctttgtatatgcaaattgcaagatttaaaccattctgatgcaaggataaacctttactttgactaccagcctgtgtttttgtctttaaatctcttaatttcattcctctgcaaaaaaaaaaaaaaaaaaaaaaaaaaaatcgcctgctgtgagatggtgtttgctgttgtgggcccttttgttaccagtttctctctatgggtctgtgggtcccaatgttccatcctagacaagcagcatccactctgctgtggatgtggtcttggcccttcccctggggtaagcagacctggatacatgaaggtgcaggcacagctggacacagtggggaggggcagagggatccaaggaaaaggaggtatggaagaggcataaaggaagtcaccaactgggcctccaccaggggccaatgaacccaaatagccctgcctgagcccaacgcctctgaaggagctgaggtctgcaaaagtacgcttgccagaccagcctcaaaggcagctactatcaacagaaatacacagataggacgctgagtgctgagggacctcaggagagacagacaggtagccaggggcaccgattagtgtgtgtgtctgagcaagccactcagaggagcattactgagaccacactgggaactctactctgcagagatgtgcgaggggcctccccacatcttctgcatgaaggagcaggatgctgcagcactgacccacagctctcgcccaccaggtggaaagtttgttccagggctgtcagctccctggcacatgcatgtcccacgtgtgggcctactgttgccaaaatcagaggaacacccagggacagtggcgcacaacatcaaggcatctgctgtggtcaccaagctcccaagcttggcctctaacagcttgcatattgggcgtggcagctgtgtgtcagtcgggagcaatgttcatccctgggggccctcaggccatctgctggtttgctgggagggcagcttcagggcccaagacagccatgccccagccagggctcacattgccacttccacattcagtgcccacagctggtctcccacttggcccagggtctaacagagccaactgcccctcgtctcaaaggacggggcaataccagcaatatagggagacatgtttgttacaaacattcaaaccaaacagaaacacaccaagagcatttagcccttttcctaattcctctccccatctcaatccattggtaactttggagtacatctccaaacagacaacactctgcaatttaaatctgtatagttacagaaacatatacattgtttgcttttatgaacaacagtcaaactcctggtatatcatcaaatccaggactaccattgtcaaaatcactttatgctctgctaagaaagcaaaaatactgccatttattcctgtaagatcccaccaattttgtgataatcctgatgttagggaggttaatatgtgaaagtactgtgtcttagaagtgactaaatctgccacatatgggcagttttgcagatggccctctttggtcaacattctgcctggacatgtcagcacgtacacagcttcctacttctgtttaatggctgcttggcattccacagtataaacataacaaagtctggagagtcacctccacctccccagtgacagacattaacttctttccacatgctgcaattctataattcaactgtataatgaatactcctgcatgtgtgtatgtttgctaacgtgcaaactagttctatgggagaattccctagaagtgaagtttctaggtcaaagggcacattttaaatttaagtagaaaccaccaaattgtcacctccaaaggaccttcccgggcaccaactcaccaatagggcatgatggcgctgtctccctagaagtcactcacccgggacgttgcacacctgagaggcaaaaaaaaaaaaaaaaaaaaatcagacttcatgttaatttgcatgtcccagagttctattgggctgagcatgttttcacaagtgggttgtgtttcatcagtgaagcatcattcatagtttcatccattttcctcattgcaccaactgagttttcctcgttggtttattgtcaatctttttttattattattattttgtttgtttattgtcaatcttttgaaaacacgggtactaaccctttgtctttcctattataactatgccccttctgttcctttatcagagtgtctctgaagcctgtttaatgcactttccaggaagcagcacatgtgatgcctcgacacctgtcacccagcacattgtggcaacatactagtctcatctcaaataagactctgggcttcttccaggaatcagacgaagtttcaagaaacacttcacaggatcaggttcccctccagaattctaggctaaaggagcccgtctgtgccttagaaaccaagacctgtttccctcttgcatatggaccagcagcctttgctataagcactcagcggccccagcggaggctggaccgaggtgtgagcttcacatttggctctgctctggatgctgaggttacatgacagtgccctccttctgaaagtaacacacccccactctgtccatggtaatattatcagccagcaattttgtttccaaataaactgaaaagccccatggatgaaagtgatgtcatcctgatggtgcctgcattgccacctacaggagtgtctgccaatgaccgtgcacctggaggtttgtgtcactgagcggccagcatgtggctgaggtattaggctgccgctcctttcccaaccactgaatcctgtccaaggttgcctagggcatcccgccctcactgataaccctttcctgagcaaaacctccctcaaggatgcaaacagatgccattcagaacagaggccaacaaacgcaacaccagttctttggggcccttgtgtggtgagcactaatgcttgtgattaaagaggatatctgaatgagcatggaaaatcccagtgctttctcagtaatcactattaagatgaaagcataatgagcacattataacaactagcccagaacaactatgatagtaacaatcaacatattcacttcgtttctcttttcttattttcaaaatatgtatttcaggtttataaagtgagccatatacacagatagttctcgttccatgagcacctatgtgctgggccctttatatgggtattatctgcacaatatcccctcaagggctgagaaacagaagcttccggaggatatgaaactagaccaaagttaggttggaggtagcagaagagacagaattccaacccagaacacccctatgctgctgtggcccctctaaattcagccactctgcataccttgccctttgagctgttattaaacaacagtgtggcacgttaaaaatacttgagaaggccaggcacggtggctcacgcctgtaatcccagaactttggaaggcagagctgggcaggtcaggagttcgagaccagactgggaaacacggcaaaaccttgtctctactaaaaatacaaaaattaactgggcatggttgcaagagcttctaatcccagctactctggagactgaggcatgagaattgcttgaacctgggaggcagaggttgcagtgagtggagaccgcaccactgcactccagcctgagaggcagagtgagactgtttccaagagaaaaatcaccgcgtaattgatttaaatgtgcaggtgggtttaatacaactccaaagatgcagaattcctagtttaatataactttcctcagcatgagaatcatgttgatcctcctcctctccagacaccaagtgagctgatactctggagacagagcatgatcgcttggtgtgatggagccacggagttttgtagtgcaagaaaaagggctgcaggtgattgttccagttaaagggaccccagtcccaccccactgtcaggagtctgttttgtgtggttcttgctagaagaggtcagtaataccctctcagtgctgtggtcacttgtcttaggaaagcttacacatgtagccagtatgcattcaaaacgaatcagcacaaaactgccacgtacccatccacctgttaaggaaaaggctcagcactggggaagctctgaggacacataaatatgttggaggacacccactccctgcccccaaggaggtcagcactgcccatgggatatacacatcctctacgtttctattctgttgatagccaatatcttgcattttgtaattataaacagaaccttgatttttaatagttttaccacctatatttgcatctctaaacagcagtttatttttgcctatttttgagcattttataaatgaagttaactttatgtattaaggctcaggttttgaacgtacaaactgtaccacactgattcaaatagacatagttcatgttgtgtttactaatatttcaagtaaaataatgtaattacaggtataatgtttcttcaaatcatgcagctctcagtagagtctatttatagcaaagatgcttcacatttgaaaccaacagtgactggcaaatagaatccaccagaaacctgggcactcaaaatgtaacaggcatgcaatccattgcaagcctggttagggaggggctgtatcgcctagcattactccctaaaaagtggcctcaaaacctcagtgataggcaacaggggcccactttgggcatcttcgcagccgttgtcataaaaagtttacattcagaaactggtctcaccacttcactgctctcgccgcaagcacagagcaccattatctccagcaattcccaagaccctcactcgccctgcaccttacatttctttggctctgtatggcagtcacagctctaaagcttctagttgcagaagttactccagtgggaatactccaagtatgcctcgtcctcgcttgccttggcttctgcataaggttagtaagaagcaaagcatggccaggactccagggaaatgaatggacgaagaccaagaaagccagatggcataaccagatagcaaaaccaagacatcatgggccactttgatgctcaagccaccacccactgtcattaaccgggacagggagggggtggtgtgttttatgaatggacttggtgccttccataattccctcatcctcagaatcatgaaccgagacacatactttgggttctcctttctgggatgagagacgtgcagatctgtgtggtccaagtttgaatactagggccatcctgcctctttagaattctgggacgacctctcttgccagatgctgttcctctgccctaatggaatgtggcgtcacagtgcagggctgaggtcagatccactcttcttagtggacacgaccttcagttttatagagcaagagggtctcatcttagaatacgtctttaagtgactgatttttaatcatttacttatttgtttgtttatttatttattgagatggagtctcgctcagtcgccaggctggagtgcaatggcacgatctcggctcactgcaacctccgcctcccgggttcaagcgattctcctgcctcagcctcctgagtagccgggactacaggcaccagccaccacacccagctaattttcgtatttttagtagagacagggtttcaccatgttggccaggatggtctcgatctcttgacctcatgatccacctgcctcggcctcccaaagtgctgggattacaggcgtgagccaccatgcccggcctaaatgaatgattttaaaccatatcccttttcaagtcacagcagtgcaacgccttaaaatccaaggcccgtttccctcttgctttgattggtgggcacaacccttagttcttaggaacccaggggaacagaggttgggaagagaactgccgtgagaaacccaaattgtttaggtggcatctggggtcagctagacattgacgaggcagctctgtgatgctggctgggcttattcacattcacgtctggggattggctggtagttgggtaaccccaactagcctgggctggggggccggggtagctcagcggtcttccgtatggctgtcgtcttccaacaggctcgtgtgggtgaaggcaggcacagacg

SEQ ID NO: 96029 - DNA, 47658 bp, Homo sapiens
ttgactaatgatgagcatgttttcatgtgcttatcatccatctgtatatctttgaagaaatattcatttgaatctattgcctatttttaaattgggttatttatctttattttattgagttataagagttgtttacatattctagatacaagtcccttatcagatgtgtgattcacaaatattttctacaagtttgtgggttgtctttttccttcctccccttctttcttcccttcccttcccttcccttcctttgcattccttcctttctttcttggtctcactctgtcacccaggctggaagtacagtggcacaatcatggctcactgcatccttgatctcccaagctcaagcaatcctcccgctgcagcctcttgagtggctagctgagactacaggcacatactactgccatgcctggctattttttaatttttagtagagacaaggtcttgctatgttgcccaggctggtcttgaactcctcagctcaagcaatcctcctgcctaggcctcccaaagtgttgggattgtaggtataagccaccacactcggtccttttcactttcttgatgagaaccaatctttaatagttttgtagtatgttttttccaaataattcttataaatttgtcatgccactgtagttcattatgtatgttgatgttctcagtttccatattgttacttatattaaatgccttctaaagagtctcaaagtaaaggtgtctgtgaatttagagaaaggatgtgagaagaagaaataggaaacctgttataggtttccaagagggtccaggataaaaatgggggaaattgggggcttggtgttgggggagaagcagacaatggagatgcagagccaatactagggtggggaaagggatattcataatcttaggtagggttaacactagtcacaatctccacctctcttgtgcaattggcctgtattttttggccagtactacatgctcaatataacaccttttattccatcaactctgatgaaatgagagaagatttaggggtttcccaaatatctatggtttctcagatatgcgcttgcaactgtaatatgctgtctctaataaaatcattaagattgagacagaaaatctagaaaattaaacgaaatattcctacaggtagcaaccatgattaaaagggtaaaagataggacctagatggagagtttaaagcactggaagacaaggaggaaaggagaaaaataacattattgggtacttattctgaactcagtgctttatatagtctgttgttttcatcttctaccccactttatagaattggtattattgccatcatataatttaagaaaaaaactaagaactggagtggttaagaaacttgcccaaagacatacagctaattagcaatagaaacaggatacaaatctatgtttttattccaaggttatactctttccactgcattaaattagctattataaaacaggattattttcattaagttgtctaattttgttgtatgttgccttaactgctaactctgtgtggtaagcagtcaatttgtaggcactcttatttattctgcttcatctctgtcacaagactcacttctacacttccttcctcctgcgtaggctacaatttccttctctaaagagaatcctttctgtaccctggatcaatgattctcaaaatgtaatatgcatatgagtcacctggggatcttttaaaaatgcaaattctgatttggtagttctgaggtagagtctgagattctacaattctaacaatttcacaaatgatgccactcagtggaccatactttgagtatcaagggcttctgcctttcccttaacacttgcattaacttttcctttccctctgtggtggcgagcctccaagatggcccctcatcttggattcccatatcctggtgcccacatctttgtgtagtttccttccacattgggtaaagttgacagtgtgtgacttccaagacattgtgacttccatcttgctctttccttgaagaaggaataagggggaagccaattgtcatgttgttaggacacacaaacagtcctatgaaaaagtccagatggccagaaaaaaaggccattctgctgtccatgtaagcgaagtgttttagaagtggatcctctatctatagtaaagacttcatatgactgcaaccctggccgacattttgactgcaactttatgaaagacctcaaggaagaaccacccggctaagatgctcacaaattccggacccacagaaactatgtgagatgataaatgttgattgttgatttaagctgctatgggttagggtaatttgctttgaagcaatacataatagacccactaactctttcacatctaccttcaagcatgcagagatcacatttggaaaaatcacaggccctcttttagttcctatctcatgccccttcctccccagcattttccaaagtgtgataagcactgcttgactccatttaatttacccatttatctttcactatgtcttatttacccatcacccttcttaaacactatccttgaaggtagcacctcactaattctgatatccatttcctgttccttattcccttagatccctgttgcaaaatacatctttttgaagctattttcctacctaaagctctcacttttctttgctgccactacacaaaacactcttggtattccacttactttcccacccatgacccatctttttcctcataggtcttcactgttgctgctccccaaagcccattttctagtgccttctcttttctctgtcttcccctttcctctttgggaagcaatttgtatcttacggtttcaaaatcattctctcacatgattgctctcatatccatattctcagccccatatctctacctaccactagggaagttccacttgaataccacatacatttcatatatgtgtatgtcttaagctcggtttaccattctcccctccaaaagcttatcaatgttaacacctttaactcaatccaccactcataaatttagagttcatatttactcttctatttttctacttctgtatgtaattgcaacaaagttccatggcttttttttttttttttctcaaaaagttcttctttgggtttctagtgctatcaaccttgtacaggcaggcccttattattttggtcctaaatactgcaatagtaattgaacttgtttccctttcctgattctgtcctcattccatgtccctccactagactaattgtctatttaatgcatcactgtcacaataatactctcctgatacacaacctcttgttgcatttaagctcaatttcatgtttctaagactaacagtcaatgtccttcactatctgatctcaaccattggacttagttgtatttccttgcttggcctccatgttgagcatttcatacttatgtccattccacatgcatttccttacgattggaagttcttcacctattcttttgcttttccaaatgcgtcttgcattcaagttctattgtctctacaaagtttcccttactctccgtccatggcaatgcccttttgaacatctttagcccttatcctctgcaccatttgttttgctttaaggaaattttcctgaaatttgttgttgctgttgtctgcatgactgactgactgactgaatgaatgaatatcttgcattgctacttatttgttttatgcatttatcttcctaccatgaagattttaagtttatggaaggtaagaccaaatataatctttcttttgcatatattttaccacctagtgcagtataatatcccaaacagagataattcagagggcaaggattatttattgacagtgtggcctgatgcctagaaatctgcatttttaacaagtcttgtaccctcctccccaccccataggattttgatgttctgcttgtgagtagggatcttgtctattttctttatcatgtgtcttcagtgcctggcatatagtaagcattaagtaacatttttgaattagttatgcagttgatcacaaactatgttttgaaactacatcctgggagaaagagtaggagattaaataacacactgaactactatatgttgcacatgtatttgcatgttgcaaaaatgtgtgtgaaatgttttgaaaagcttaaagcaattttttttttttgagatggagtctcactctgtcacccaggcgggagtgcaatggctccatctcggctcagtaaaactgctgcctcccaggttctagcgattttcctgcctcagcctcccaagtagctaggattacagacatgtgccaacacgcctggctaatttttgaatttttggtagagaaggagtttcaccatgttgaccaggctggtctcgaacttctgacctcaggtgatccacctgccttggcctccaaaagtgctggaattacacgcgtgagccactgtgcccagcccatttaaagcaatcttaaagtgtaaactattattgcaagataccaacgtagatttttttaataagtgttaatttctcttttgttgggaggtaaactgccctaggaaagacaaaaataatcttgtaagcttactttttaggtttctttctatttataaagaagagaaaaaaatcaccattttttgtgcaaatcatagacctttgagttagaagggcaccaaaagtttcagctctattccctttaaacaaatacaacatttattgcattagttatgggtgaggaaattgaggcttagaaggatttgaagatttgctcaaggtggagattctcaaaagtgtcctcagatacctgcatcctaacttcctgggaagtttgttctaaagtttagactccagagcttcacccaaaacttactgctaaattaaatcctttaaaggaaatctgcatttttaggatctcctcttatgccttccagcatagtgcttctcaaaccctaatgttcatctgaatcacctaggagtcttattaaactgcaaagtgtgatgtagcatgtctggagtggggctcaagattctgtttttgtttgtttgtttttgtttttcaacttttattttagatttagaggccacatatgcaagtttgctacctgggtatgctgtgtgatgctgacatttgtggtatgaatgattttatcacccaggtactgacaatagtacccaacagtttttcaacctttgctccctcggtcccctctctagtagtccacagtgtctatttgttgccatctttatatccctgagtgatatggtttggctgtgtccccacccaaatctcatcttggccaagaagccaagttttaatgggtacacaagtgcataggaattggagagtggggagcgtgagttgactattggtcagggactgtcaacggaagggaaggaaccaatgatgggagtgagagcccagaactcggtgttcgaagtgggtaatttatgggaggggcatacctacgagcagacaatgcactcagacaaggaagatttgcacattggacagaagagacacctttttcctctgcaataagaaccaaggaggtaagtagggggtctgatatgagtttgtgcatgtgtgcagggtgagtgagacaatccatatatttgagaaaagacagtgaaatctttaaaggtaaaaataataaaaccagctgtggcacctattggataaggaattactaactgatgatttagaaattcctttatgtgcgttaggagctcatttgttatccccattttacagatgcgcagccccaggttcagcaatttgctctaaatgagactgtagaggctaattccagcccccggcagctctcaccttaagctgcctggctgaggtcagcagtaagttacctggcagcgtccgggggcctgcagccgaggacagggctggaactacacttcccagtgtgccaggcggggcggggcgcggcggggagggcgcaggctccttcccagaagcaaaagcggaaacaaaagagtctcgccggcgtccccgcccgcacactcgcgcacactcgcgctcgggcgcacacggagcagggaccggcgcccggagcgagccagggagcggctaaccggggacccaccgcgcggagccagcctagctgccagcgagcccaacccgcgacgacccacgcccctgagccccgcagccgacccctgccggccggtgtccccaccgccatccctgacccatggcgctgaagaggattcagaaagtgagtgccggggccgggcctggggctgcggggcagcggccccctgcccacgctgactcggccagtggtcccgagagacatgcggggagagcaagggatggaagggtgggccggggtgckggcagggagctgaaggctcgggccgggccagcgrgcaycggacaggtgaggtgggagcagggtcaggtcccaggcggccggaggagcttgaaggctgggggcccgcgcgcgttygcgccggagccgctcccggagccccagggtagagagcctcttgcgcgtccagaccgtcccgaaatctgtgcttcacggtcacggccgggttttgccctccatggggctagttttgacccctgtcatgctgtgttttctccaggctgtttcttaagcctgtcctcttttatgttcttgcttacccggcctccccgggagggcaaggaaggtggggtgggcctgcagcctttctccgcggagctgtcgggttggttctttctctcctctgcggttggctcttgctcagttgcccgaatgggctggaaagcccatttgcggccaagaagtcaggagaaggctcctgccccttctattttggtgcctctgctgctgccacttcaggtcacatagctgtagcgaaaacatagttgctgatacacaacaagatgacctcctggctgtgattcacggtgagtcaagccaaacaggtttttttccccctcatgataaacttagatgtaaagttcgagacacaacataaactgtcgcaaataaattgttttgatgctttgacacatgggtatagaatgaggaagaaatatatatcttcatccaacaactgtttacccatctcaaccctgtgtatggaatcgtctttttttcacagtatttattgccaccatttcagatgcgaacatccttcagaattcagattcgggcatttctttctgttcatttttatttcttgttggtctgtgtactgacccaagttttaggttttacagttacagttcacactggcaacattgagaatgtgtttgttaaatagggagtgcttttcactaagttaagcaacaatggacagtgtattttgtagttgtttcagaagaaattgatgcccacatttttatccacttttttgaccaggagtccattatagcaatagtatatgttagagcagtgatagtgacgtacgcattgcattctgactcgccactggtgacatctttaggtacagaggacagcaacttttagagcctgccagttttttattttcaaattctaaatctgtggatcacctgttattttttgtgccatttaaaggtcatctcattgtaaaacatacagttaacaatcagcatcagcatttattaagtaataatgttttcttgtttgaaggtagcgcaattacacattgttttatataaataccctaattttgaagccttagcatctttaccataccttgcatacttattaatgacgaagtaatattggttcacatttggatcagaaaatgcacatcttccaaggaagttttcaaattctatttccttctttcctagttgtgagaatttttcacatgattttgcacatacaagagctttttaaatttcattgtgtttttttaagagatggggatctcactatattgcccatgctgatcttgaactcctggcctccagaaagtctgggattacagacacaagtcaccatacccaactaacaatagcttaagctgtataatttgtccacagtaagtggatattcaaagaaatatgaacattatttgtaaataccacccttggcagttctcatcaatcaccatgctgaactagtgtatttgatttatatttataatatggcgtgtgtccaaatctttttagtatttattggttattagtttatagaattgttgagtaaaaaaaaaaattacttacatagaattgatatcaaacatgtgacaaattgatattttggaaaagaaattggggatgacacaccatcacatctctgtgtgttcatttttggcttccctttctgatatcaggaaaatcgacttacacaaatcttctttccattaatcacacattcagaccaatccctcaaaccttaggggtgattattttgattgattccctacttttcctcctcctttacctacctccttgattagaagccaattctaggttagatgtgccgcctgccgtatgaacagttacaccatcttctttgatgtcatcagtatagaattcttatttgaatctttcatgttccaacaaatgaagatgtatactaacttttggcctttcttcttaagctcactgaagtattaatataattttcctgtacctatagatggtggcaggccatagagttgtgtggaacctcagataagtctgctgtagtgtagtagagggtacaagcaggggaacagcttctaaggcagtgtcttagaatcacctgtgggacgttttcagactgtcatcacttctataaatggagagatgttgaatccctcagatcggttggggtggaaagaagactgaggaccactgatgttctggcctgtccttattcaaggaaggatccagaggcctggagtggaggagtgctttgtccaaagataatctctttttttttttgagatggagtcttgctatgtttcccaggctggagtgcagtggcatgatctcggctcactgcaacctctgcctcctgggttcaagcaattctcctgcctcagcctcctgagtagctgggactacaggcgcatgctgccatgccccgctgattttttgtattttagtagagatggggtttcaccgtgttgcctaggctggtctcgaactcctgagctcaggcaatccacctacctcggcctcccaaggtgctaggattataggtgtgagccaccacacccggccaataatctcttaattggcttggctatttgagagtgttaaaaagttcatgatttcacatttcttcactatgaaaaagaataaagatgattggattaaaattatatgtaaagacagagcatggagatatcaatgcttaaaatatatttttatagtagaataaactaactatactagaatatactaaatgatttaatgctctgatttagtgtgccagttttgcattccagctcataaatttacacacccatgccctatttttaaataacagtgaaagatgttatcgcagtcacctaaatcattaaaagaaaaaaagtttgaacaaagtctaaggaaagatacctaaaacatgtctgaaaagaggaggacagtttttcacctaggtatctattttctagaagtaatttctaagttgtttcttctatcaatactattttcattacttgaaacactttttttggggaggattattttttaaattacaggtgttaatatcccaataccaaatgttttgaaaactaaagggcaaaaaaaaggaaatcctaaaacagtcattgtcatcatcatagattttatttgataaagaatttgaggtaatgaacatcatactagcattatgtgatgtgatgtgatgtgatgtgataagtttatttacatttttgtcttttgaaaagtgaggcaatagagttccgttttacaaacatagcaactcagagaactattccttagtgtgtaattctggcccccaaatggaacattagttgtttttgttttttaataatcaatgtaatctgaaacatatatagagagacatagattaaaatcaaatttgataaatgtttgagctgctgaatttttttgatttgtagaattttatgttaaactgtttatgtcagtctagaaaactttaggatacttaacccagccctctatggacggagcatcaaatggaagaaggaggtctgagttttttttgtttttagacagggtctcactttgtcacccaggctggaatgcggtggcacaatctcggttttctgtgacctctgcctctgaggctcaagtgaccctcccacctcagcctcctgagtagctgggactacaggcctgcatcaccacacctggctaatttttgtattttcagtagagatgggttttcaccatgttggccaggctagtctcgaactcctgacctcaggtgatccacccgcctcagcctcccaaagtgctgggattacaggcgtgaaccacctcacgcagccaaaggtctggtttttattcctggctgtgtggcttactagcttcgtacaatgaggctagtacatattttccatacatttccatacaatggatatgtatggatatccatacatatgaggctgctgatctcaaaaaccagggtgtttgtaatcgttactctgccttctaagtacttgacatatattaattgacttaattcttagtatacccaagaggtagaaacagtgttatttccattttacagatgatgatactaaggcagggaaatattgagtagtttactcatgatcacattatctagtaagtgacaatgctacgattccaaaacaaacagttggcttcaattccacattcctttttttttttttcagtcttagaatcttttatttaataccttctcatgcccagttaacacaaaaatagttgcagttacatatcgctactgaaagctaccaaactgcctatctgaagagagagtcaaggatccttctcttccacttcttaggagagaatgatagtttttggatgttgaagagagcattcactgagattactgaactcaccagatatactataaagctttctgtctaatgtagccagtagccacatggaaacaaattgggtatgaaaatttagttttcaaccttgagctttatgaaatctaaatatagatcaaatattgctgacgaaaatttagtatccaaattgagatgtgctgaagtgtaaaatatgtactggaatttgaagacctagtatacaaatctaaataattgttactaatgagatatttataaacatttttatattgattaaattttgaaatgatgacattttggataagccacctagtcaggctaagactcattttctttctctgtaaaatgaaggagtaaacgatatcagagtactacttgccttattctgtytttacattcaggttctagaaaccagaccatgggcagagcattttcctccttgttcagcagagcaaatttgtgggcttttaaagatggtaacattgtttcttaaatcactttccataatttaatatcagtaatctgtttatagaagagaacagccacattccctgacaaagttttgtatgactttactttttattttgcttttaagcttggctgtaatattattactgaacctgtgacacttcacttaaaatgtcaaatcctttagtggagagagtgttatttccttgtcttaatctttttatatgccaatgattgtgccccctaggatagcaaataaaatctgtcaataaactgactgaacaatgctatccaatagaaatacaatgtgagctacattttaattttaaatttcctagtagccacgtttttaaaacgggaagtagaagcaagcaaaattaaatttaatgtgtcttatgtaattccatattcttaaccacttcagtacatagcttctcttatccacatgaactcgtatctattgtacttaaactggaagacatagagtcaaatgggtttatgggatataagtgctttgcaaactggaatgttctatacaaatgtaaagtggtgttataattaagaccttggcatatttgatcattttcactgacacattgctcaaatgtgttgattgtgcttcgcaaatctctgctccaaagtaacacatgctgagatcgtttaacattgtaaatcagtaatataactttgatcatctttgtttcatcactttgaatttctctcctccaaaaggattttgaaacattggttgtagttcataaatgctctgtcaaaagtatcattgcattgtgaagtttttatttgagataactttttgaattgacagagtcatttagttcctgtagtggttttgagtagtaaactgttcatattatgagattaaatccaagactccagttctttctagaaagaatgatacaacttaaagaagcacggtatttatgcattttgggataaatggttttccttgagatgagagcgagatagtgttctttctctaataagccacgatgtaaatttttttttaaatctttgtaattaagctcagtctttcttttgtccttgatactgtatttttctttcttcatcgcaatagaggtataaaaaaatgaggtaacctatgacagttaaaaagttctgagatttcttctctgtggaaataaatagcctagaactaaataaagctgtttatgcctattttaagaagccaggcacatatgaaaaccaaacctagcaggatgtgggattgcctccaggaaagcaaaatagcgtccttactcgctttagttccctgaaatacgcatagaaaacatatgggccctttattttcatttaatgagtgctactaatagaaatgataaacctaatatttagccataaaactgagttaatggtcatctactaatgtaatagtccctgcctttttaatagtgaataaactgattacattgaattaacaacaggaattgagatacttatcctctctcctctcctgtgaaatgctggaataaatgatactagaatatataatatgaccatatttgcagtttgggaattggaggggtaggtcctcaggccaccttagcacatgtgtctgaaggcaggacaggttttatttctggcccatcttggtcttgatggtctctgagaagctaaggtttttctgtgcttaatttggttctgagatgaatctgtgaaggttcagtttcacacattagacaataacaggctgttgtgttccaggattgtccttagtatggggaggaagctgctatctagaagcatacagtctagtgctgtccattccaccatcatgctctgcatcctcttgtcttacctctttctggatgtatttcccactgtcctctattcatatggtcccgtttgtatggctcatctcttttagtgacaccacagttcttatttagattcctgggttttttttcagacttaagaaacttctccagtgggggtgagctgaggagttggttccttcaccttaagcttcctcagataataatctgattgttctcattctaggtggccaccctccttatgcgagcagagtttgggagtagtatggttggattgtctagagaaaaccaagtggacctaacaaatggtctgggttcatttttcttctcttctcttaaaccaggaaatctctggcttgtgtttttgcttctcccaaattttgctgtattttgttttcacttaaatttaaagatattttctagttttcctttttatctcttctttgacccttggattatttagaaatacgttatttatttgccatatgtttggagattttacagatagctttctgttgttgatttctaattccattatggtcagagaacaaattctattattatttgactccttttaaattgtgggtacttgttttttttggttttttttttgtttttttttttttgagatgaagtttgctcttgtcgcccaggctggagtacagtggcgcgatctcggctcactgcaacctctgcttcctgggttcaagcaattctcctgcctcagtctcccaagtagctgggattacaggcgcccaccaccacacccagctaattttttgtatttttagtagagacaaggtttcaccatgttggtcaggctggtcttaaacttctgacctcaggtgatccacctgccttagcctcccaagtggggacttgttttatgacccagccttttcaggtgctcaacagcacttttgaatgaatgatggttaatagtttgtagacttcattttggtattttccagttggtatctattgactgtaggttatttctaagaaatggatgccaaactaaggtgtacaccttcccagtatctttttttttctcttttatgagtttccaaacagtttagtgaataataaacatccactttttaaaatggaatagaaaatattagtgctttgcatatagtaagggtgttgtttcatgaaatttgttttagtgtgtgtgtgtgtactaggttgtaatgtaaaatctttttcatattataaattgctgtaaggaaagctggaaaatcactgttccataacataagatccttaggtaaaattaatgttaaaaatacatgccatacaaccatacatatacatgtatacatatatagggagagcaaatgaatacatatacacatacacagagacacacaaatatattgatacacatatacacataatgtaaactgttctagccttggaaacgtttgcatttgatacagaccgtatgcattgttttcttctacaagtagcagcattttagtgactgatgtacaaccataatattcaagaataatactggatgatactaacagagagtagagaatttattatgaaacactcaagtgcccactatatgccagttattaggtatagagctgtaagaagcaatatttaataacaaatatttggtaggtattggtaggcatgttcatgttttacacacgttttaataaataggcagctaggttttctctcttttttcttccatctttttttggttactgtaaagtaaatagtaagttttgataatggagcactcaaaatgctccatttgcatattttatgtgaaaattctatttatttaagttgtgtataatttcctgtaaagtttttcttgactctcagagtgtctttaaacacaacgctcctgaaagcttatgaaatagtattcgtttctaaccttttatatgatataagctcctgagaaaagataagaattccttctcattccttcacttatcacacttttgtttctctggagcatagctaaaaatgtgcaaatggccttaatacagtactggagcattgtttgcttcagtgttggttgaaaataatgtgctctagctgttacagtgttgaggtgagtattgaattggggtgggaagagtgctggagtagaagtcagatggtctgtccctttgtcctagtttggctttgtgaccttggccaggagactcagtctttatactcctcacttggaaacttaatggattgaacttgatactttctgtcatctcttctgaatcataattttaggcaaacctaaataatgtatttgctgtttttttttttgcagcaaacaacagtgatcacaaaaacaaacactgagctttggcactgtgctatggagctatattagacttgacttaaaattccatttactttgaaatatcagatttgaaataaatgttgacatctcttaatgtataaggtcaataaatcttattctctaactaaagagcaattatttatgatgcaaataaaatgtatttctattattgcactggtaacataacgtggttctctaattccatttagcttttctctatttgttagcttttgtacttaagattgttttatccacatatttagacaactgccatacacagctgcacagctgccttataggtaatagtttttttgttttttttttttttaatgacaaagtctggctctgtcacccaggctggactgcagtggcatgatctcagctcactgcaacctccacctcctgcgtttaggggattctcatgtctcagccccctgagtagctgggtctacaggtgtgcactaccatgcctggctaatttttgtatttttaatagagacagggttttgccatgttgtccaggctggtctcgaactcctgacttcaagtgatccacccgccttggcctcccaaagtgctgggattacaggtgagagccatggtgcccagcctatgtaatagatttttaagattcagtgctgggcacgtggctcatgcctgtaatcccagaactttgggagaccgaggcagaagaaacacttgagcccaggagtttgagaccatcctgggcaacatagtgagatcccatttattttaaaaaaaaaattaaaaaatagctcagcatcgtggcacgtgcctgtagtctcagctacttgggaggctgaggtgggaggatcacttgagcccaggaattcaagattacagtgagctgtgattgtgccactgcacttcagcttgtatgacagcaagaccctgtctcaaaagattcaagttaatgcatttatcaaacaccttctgatacaaggcatatattaaatgcagtaaggagatgctagttatgtagaaaaacaggtatcaccattatctaagaaatttaaaattaataagtgtaagaaaagtcctgtaacaactagatggatttaggaaagtaccaaacagaaaatacaatatatttaaacaggaagggagtcaaagatgggagaggccaaatttatttgggaaaatcaggaaaaactgtggagaagatggaatttgatataggttgggaagactggatagcattttgaaagacttaggggagccaggcttgtagaggaagctacggaaatgaagacactagaatatgcttggcttatttgggaaggagcagataatcctgcttttgggaatcgttcagaaacagtagaccataaagcttcatattgtagacaaccttgaaggcctgtgctgagaaatatgtacttaatgcagaagattggggaagccattgaaggtttttgagtaataggagctaatactttttttttttttttttttagacggagtctcactctgtcacccaggctggagtgcagtggtacaatctttgctcactgcaacctctgcctcccaggttcaagcaattttcctgcctcagcctcccaagtagctgggactacaggcgtgcaccaccatgcccggctaatttttgtattttttagtagagactgggtttcaccatgttggtcaggctggtctcgaacccctgacctcaaatgatctgcccgcctcagactcccgaagtgctgggattacaggcgtgagccaccatacccggccggaatgaacactcttaatcataggcatccttgccctcatcaaactcaagattgtttactgtttgtcattataattttgattaatgtcatgaaaagggatgcatggagtattctaggaatatagcagggacccattgaaggtttcagggaaaacctgaaggcaatgatgtttaagatgagacaagaaagtaaaagtaaagtagataaaatgaaagaatgagggagaaagtgtgttttggggaggggaggtgattaagtatcttctgccgaaaaggaagccatgtttgcaactaaaggcaagattaaaagtcatggctggtgcagagagcactggggaaaagtgttgcagatatgacgctagaaagaagtcacgtcttggaaggtctggcaagtcattttaaggacttataagtcttacatgaaggtgaatggaaaacatcgaagaggtttgacatggctcttcaagaagatgattttggcagcagtgtataggtagaaaaataggaggacagtaggtaagttaagatattgcacttaagtgagatccaaagagggtctaagctacagtgttagcagaggacattgaaaagagggatatatgacaaaaattacagggtgtttgtaccacctggcccttttgagttggtgtgatccatctatgcctacaccttcttggcctttcaagtcaagtatcacaggctccctggtctaggcaatctcttcagattcctccttctgttatccagtctggtcccagatattaakattgtctgcctggctggaacctttgggttcttatcctaaactacctctcctctggcttatatcagactcttctacacgttggacctcagctgtcctatttgatgggccttctgggaccctttcagagggagggatctagacagaaggagaatctgaacaatttggtacttttcaaattgtgaaggagtgggatgtgaagagaagaattagatggtaactccaaggtttagagtttgaattactagaacgaataaatgcatttttactgtaagccttcataaaacagattcaaatacagcttttacttggctactttggatttgtctaaaatmgatttttatttatgtaattcctctgatggaaatattatatgtagagagtgtgatcaagagtccgccatctaaacaggaagccatgtttgaaagtagaggcaagatagcattttgggaaattgaatcattatgcctggtgcagagaaaactgggggaaagtggttgagatgtgaggcactgagtaaataatgtctgtaattctgacctcaagcttttattctaaattacactcttttttttttttttttttttgccccgagacggagttttgctctttttgcccaggctggagtgcaatggcacaatctcggcttgctgcaacctccgcctcctgggttcaagcgattcttctgcctcagcctctcaagtagctgggattacagacatgtgccaccaagcctggctaattttttatatttttagtagagacgagatttcaccatgttggccaggctggtctcgaactcctgacctcaggtgatctccccgccttggcctcccaaagtgctgggattataggcatgaaccaccgttcccggccctaaattacactcttcatagttcacattcaatatatatgactgatgtggcaaagtcacatattattgctttcttcatcttccttttttgtggcagttggctgcattattattttttaaataaacagcttttgccagagagacttgatccaaggaaacagcaaagcagataggaccagtttgttgaagtgagtttggttcctataacttcattaattggatgtgtcagcattttgaagtcttccaggaagaatctacatggtttaaaatgcaaatgtactttaattcacaggcttaaagaggttctgtatttggagacatttctgatgatcgtttgacatctttctattgaaatagctctagtcaactggataaggagatcagggcctgaactgtaagcccatgaaatgtttatttacagacaaaccaaatacagcttatatatccttttagaggcaacatgaaaaatgcaatccagtaagaatcactgtcttgttttaggaattttgaggtaaagattgttgtgtcatgttaattaattgccagttgagccaggagttttgaaataatgctttcacaggctttggactcaataatttaaattttgggctgtaagtcagccgcttgcatggactgtttaatgtcctttacacacaaccagtggggtatgtattatatctattatggagatttagatcttctgactgttgaagctagaaaacaacaaagcatttttagtctggtcagcgtaattttttagggaatatttactgcattgcgtcatattaagttttatggtaaatatggcagttctcacttgtttgcttttattctcctctcttcagattggcctgttacccttctgggagccaggagattaatgcaggccccttctcttacattcccttctttgtttccttttatttgtttactttgtttgaattaggctgcctcatctacttttagattttaagtcccctagaggcagggattgtgtctaggttggttttatggagaacactcagcatattgtgggggtgttataaacatgccatctgtggcaatttaaaattcagtttcagacctttcagtacttttctttgtgtctcgttgtttatagaaatctgaactagaatagaggtgcttagcaatgtaaggctatataaatccattaaatatacatttttgtggctttattgtaagtgcttttatagttctagtcatgatataaaggcactatcctttaatttactgatcattaatatcttatatttttattttaaaatttagatacttctagctagtttttttatttgaatattaatcacattagaatagaaaattgcttcattggcacagactacttttttgtggaacatactttcaccagtttgatgatatttattgcttgatctgtttaggtatagggttgacttgttctaagcttatttttgtctcaaaggggaagaaggaaatagaatcaacaatgcatttcaattttagattaaaagtcactggaaatgaaaccgaaatacacaaaatatatgtatactcacacagtgtgcttctataatgaattcttttcatatacagatttattactagtcttattatttgatagccatcttttccattatatgaattctatagatccttgcccttttttttatgttatcattatgttattcgttgtggcaaaatacattttaaaagttacaatgtaaactttttgtttcagttatacagacataagtatacagcttgaccaatttttacaaagtgaacaaacctgtgaaaccagcacccagctcaagaaatagtattacaaggaccctagaaaccctttcttctcccttcttagctttacctctgtcgtcaaggtaaatcactattctaatctctatcaccgtacattactgtagcctgtttttgaacgttatttaaggggaatcatacagtatgtatcttttgtctctggctgcttttgctcaccatatttgtaagattcatctatattgttgcctggagctgtaagttcattcattcttactgcatgaatatgcttcgagttgttcgttctactgttggtggactttgggttgcttctggttcgttctactgttggtggacattgagttgcttctggtttggggctattacaaataatggcactttggcatgcatattcacttttctgttgggtatatacttagcagtagaaatgctaggtcatagagtatttccgtgtttgccattagtggttactatcagttttcctcttccaccaggagttccagagttccatttgcttcaaatctttgccaacacttgtactctcttctatttcatttaaatcattgtgttggatatgtagtggcatagcattttggtttaaatttgcatatccttgatgactaatgaaactgagccccttctgatatatatatatgtgtattggccatttgggtagcttcttttgcaaagtgcctgtttatgtttaagctgctttttaaaaagttgatctgtaggaatatcttttacatattctgaatgagccttttgtcagatacatgtaatattgcaaatattttctctcactttgtggcttgtctcttcacacttttaatgkgccttttggtgaacagatgttcttaattttaatcaagtccaaatttttcattttttcttttattgttagtgctctttgtgtcctgttaaatctctgcctttatggggttttaaaaagctttattattttagctttcacacttaaacctacagtctatttaggattgatttttgtatagtcatgcattgtgtaatgacagggataatttctgagaaatgcatcgttaggcaattttgtcattgtgcaaacatcatcgagtgtacttacacaaacctagatggtacagcctactatacatctaggctatatagtgtagtctgttgctcctaggctagaaacctatacagcatgttaccgtgctgatactgtaggcaattgtaacacagtgggaaatatttgtgcatttaaatatagctactcattaaaaaggtacagtaaaaatatagtataaaagagaaaaaatggtatgcctgtatagggcacttaccataaatggagttcgcaggactggaagttgttctgggtaagtcagcgagtaagtggtgagtgaatgtgaaggccttgggcattactgtacactgccgtagactttataaacactgtacatacacttagtatatacacatttatatgaaaaatatttttctttcttcaataataaattaaacttagcttactgtaactctttgtttataaactttatttttttaactttttgactcttttgtaatagcactttgcttaaaacacaaaacacattatatggctatataaaaatatttcctttttaatatccttgttctataagcttctattttaatttttttcacatttttttcactttttaagcttttttgttaaaaactaagacacaaacccacacattagcctaggcttacacagggtcaggatactcagtatcactgtcttccacctctacacctccacattttgtcccactggaaggtcttcagggacagcatggagttgtcgtctcctctgataacagtcccttcttctggaatatctactgaagaacctgcctgagtctgttttaccgttctttttttattttataagtagaaagagtacatgctgacataatgattaaaagtacaatgtagtaaatacatgaaccagtaacatagttgtggattatcactgtcatttattatgcaccatacacagttgtatgtgctatacttttataggactggtaacacagtagatttgtttacaccagcatcactaaagcatatgagtaagacattgcagtgcgatgttaggatggctacaaggtcattaggtgataggaatttttcatctccattataattttatgtgaccactatatatgcaatcagttgattgagacattatgtggcacgtaactgtatattatttgaggtagggggatcaaggttgttttttcctcatatggatacctaattgacccagcaccatctattgaaaaaaaactttccctctactagaaatgtcattgttttcactttttaatttttgagttctgggtttcacatttcttttttttctttccattttcaacacattgtcacagtagctaaaggtgaaataagtactcttggtcccattcagatgccaaacaccatcacttttgcttccacatcaaaagtggaagcacttttgtttgcctgagacagtgatgatatgctaagttaggtttaaaggatatgtttatttcctatgtgcaactttctgtattaaggctttgcagagctcccagggagcaacactcactttggggcctgtgtgaatggtgtcctttgttgtcagtggcacacggtctgtgtggcaagatggcagcagccctgagtcctacttgtaataactggcaaattaaaaaaaaaatcatggatgtggcgatatgtgcctggaatcccaaccacttggggagggtagggcgggaggattgcttgagcgcaggagtttgagtccagcctgggcaacataaggagacccccatctcttaaatcgaaaaaaaaaattactatttctatgcccccagcaatctaccatttcacaaataggggtactaaagtgtgccccaagtttaaagagatggataggaagtaaactctgaggcaatccttgtgacttttcagaatttaccaggtcttatcaccttactttttaatatttcatatatcagtttctatttttgatttagaaggtagtttacatcagttatttttactagttccttatttttgatttagaaggtagtttacatcagttatttttactagttccttactagatcactcttctgtcctaggataaactttctttccagggttccctgcagtattctaaactttagtgacacattcagaaggggacccttgagacttatagctactcttgtatttccttggaggtacaacttctgtagctacttttaagtttctaagaacctagaggacctctttgctataacttttaagctacatcttgtaaaaatattgtttccacaaatgagtaagttctcctttaatttcatgccccagtttaatcatcaacaatgtgcctgaccagtgatttatgaggatttttattagcatcataatctgatactattgcattaaatctttaatgccttggaggggtatagttgggatgaaagtataaaatctgaataatgcctgttagaaaggatgtagaagtacttaataaatttctacatttagcccatctggttaagttaaccatggaataaacaaacaaacaaaatctctgtccacgccacagactgcagcttgtctgtgggcagctctgtcactaaggattgccagtggttagaagacgacttactttgagatgaggtcagctcagcacaaacccctaactccccttggaaagcaacccatagctgtgtcctgaaagtaggtcaataccatcctaaataaacaataaggaatgtttagagctttgagatcttctgaactagagaaatggaaacaaaaatttaacaagaattttgtgtggctttggatactttgctagaatatataatacattctgtaaattgaaaatagttgtgacaatggcataatatcttagtaattaatattcttttgatattcatttttgtgtttcacatgttatttaaaagctcaccatagtgttttcaagtgacctgcactattctaacacctgttatactttttaccgtatgcaatctgcatatctatataaaagaataatttattttgatttgattctctaatcacttgcatttgtaaaatattgaaatttgagatatttatcttctactgatgaaatttttctttaaattttattgctgattcaaataataccaaacaccttatgtgaaaggcattgtgctaagtattatggcgggatccataaataaagtgcataaaattcttagttttaaaaaacattccggtagaagaggaacagatgggggaaagttagcatttattaagcatctattatacatgtcgggtattaagctaggtgctttacctatgtatttttatacatgggtatgaaattttaattctcagtacagttcttaaaggtaaccagagatgtccccatattacatacggcacacttgagactcaaagaggttaagtaaattgcccaaggtcacacagctagtaattggactttgaaaagatagcattaaggaaagcaggtaaaatttgatcatgggagatgaaaggaaggttattttagaagaaagaaaattataagggccagaaaacttaactgtgtctaggaaacatccaagtagtcaggttatacctgcagttcttaaactttttggtctcagtacccctttaatttttttttttttggttgccactgaacaaattaacctttaatattattaagtattgtagaatccaaagaattgtttgtttctgtgggttatttgtattatcatttaccatatgagagattagaacaatttaaatatttggccgggctcagtggcttacacctgtaatcccagcactttgggaagctgaggcaggagttcaagaccagcctggccaatatatagtgaaaccccttttctactaaaaaatacaaaaactagctgggcgtggtggtacatgcctgtagtcccagctacttgagaagctgaggcaggagaatcacttgaacctgggtggtggaggttgcagtgagctgagatagtaccactgtactccagcctgggcgacagagcaagactccatctctcaaataaataagtaaataaataatagaaaataaaacatcttaaatagtaaataatttaagaataacaaatccactgcattaacataaataacatttttttgtgaaaaataactatattttccaaacaaaaaagtagagtggcattgttttatgttttcaaatctcgttatagtcaagcttacagatgacagctggattctcacatatgcttatgcattaatctgttaaaataccacatgtcattaagcctctggaaaactctactatatactcatgagatattgagaatgaaaagatagataacatctgagttttattatgaaattaattttgatctcatagacttcctgaaagtgttttagaaaacccaagggggttctttggagaatcactgggcaagtttgtgaaggggaacccaaataagagtgtaggtttgggactagataatgaaaagatgttcactgggggaatttggtctttactaagcaatggggagccactgaaataaagtagaagagtgaaataaaaggagctgtgcttttagaagattttttttattgcaagtaatgcctagagtatcggaagcagttacaattgaactgtaattgatatttgaggtaactgtggkaagcaacgtaatgggttttgaggaagaatataaatatagtacatctgattaaatacaaaggacagacaaagaggaaagtcaaaacagtgctaagattttgagccttatgactggttggcttatgtcccattaacaggcatggggagtacaggaaaataattaagcttgggaaagaaagtagggaattaagttttagattgtatataaaaagttttacctctaacattttgaaataattttgtcttacaaaaaagttgttaaaataataaggttcatatatatccttaacctaacttcccctaatacaacttatataaccactgtgcagttaaacaaggaaagcaaccttggtatcacgctattaactacacacataattcaaatctcaccagttttttttcactaatgccttcttcctgttacaagatccaatctgggatcccacactggatttaattgttgggtcttcttagtagctatcctccaatctgtgacagtacctcagtctttctttcattgtcttataaaacatttttaatgaaaagagaagatgcttaatatatatgtagaggaaaaaaaaccaatgccattttatctctttttttatatttatgtatttatttattacctccattctctcagagtgggatattttatcttttaaaatgcttaagaacctgaataaaaatctttatttttctttaaaaagttacaaaagtattataaaaaattaaatggtgtagaaaacataaagaagtagcaacccagtagtatctcccagagataactaccattaacaatttgttgtgtatccttttatttatttatttttgcctagaatttatatgtatattatgagatcataatgggcatactgtcctgtaacttgtgtttttcattcaattgtatattacgttcacttaacatttttcaatgtcaatatatatagatctgtttcactgttttaaatagctactcagtatttcataatatggctgtattatttcatgaagccattctcttattgatggacctttaggttatttcagttttcatacttatacaagatgctgcagtaaatatccttatatatgtatctttagctaccagggcagtaatttctatgaggtgaaattgctgggtcagagaccatatccattttctacttttgcagttattaccaaatttccctccaaaagactgtatcaacttatcctccctccaacagtgagtgacatgcttatttcccaacaaagctgtggatggaagtattgtaattgacaatggtttggtccaggtatggtcttgtgggtgcttaactatacattgctcgctctcttttttcctacaaatcattgctttgcttttgtaacacacatatgtagataaaatacttaatgaaaatattgaatgcttttaaatcctttgtctttgagatcttttaatgcagcatgtgataaagacaaaagcatggccatgaagagttcttggcaggaagcctggggggcttatgaaatcgttattgggaggctatttatagggtgcatcttagatttctaggtagtggtggaataggaagaaatattcaagaagtgggaatctggggtatataaattgttctcaagagggacttctattagagtgaggaatgtggagttaagtcctggctcttcagaggttcctatggtcttgagcaagttgtctaattcagtgttaattcttacttggtgagtaggggagaagggcaagggaagagagtactaatcctaacatatccgtttggaataacataaaaatccttaaattatctttaataccccatatgtagtagtggtgctaaaagcagataactaagaatgtcagttatagcagagaaagcatagatcaggtagtaaggcagttccagaaaaacttagagtaatctaaatcaaaagaaagaattcaacaaataaaagtgatccttgattttgtctgtcatctaaaagtacactggctgctgcacagactaagcaaaaaaagtggggtttttgtttgtctagttgtagtttctatttgttttatattttcacctcattaacacatctcaaaattttccaaaatatcttcatttttcttttttcaaatttaaagtctgtatttttgtggaccagagtgggaatgtgttgtaccttttgttttctgtaggtcattctatctgcacatacgcatcctagtttcagttacgtatttctgaaaaaataacaggacgtatttccagacacatggattgacaaagggatagaacattaggaatctagaccctcctaaaaagtgtaggttatgtaagtctcctccccaaagcattactgtaattatttgtgacaaataatgatccatgtgaatattaaggatgtttgatatactatcagctgcctctttcctatgtggatgagctgtaataaagtgacagcttaagaactcggccttttcaggtgtgtgttagattttctctctcttccttagccctaacttctaacagaggaggtagaattagtgcatcaaaaataataataataacaagataacctttgtttttatatataatataatattttaaagggttttgaagaacagcctgacatgtgaaatttgaatatggttcaaggctgttccaactaaaataaggttttcatttttcttgttaataaagaaaatcagtatgtatttgtgcatatgtatgatttattcacatacacattatctctgtaaaatatgtacatgcaagtcattaacaattttttaaaactacagagactatcattttctgattaactagtttgctagttaaaatgagggcaaagaagtcccatttacactaatgtttagaaaattcaacatgatgaataattacagaggcaatctcctaaaagcccaaattagaaaactgttacaaggcacagcccttctaaaatggggctgtgatttgggaactgttcctccctcagtcatttaaactattttaataattgtattctgctgctagagaattggaaggctgtcagttccctttatttgaatgcttactatgtgccagagactgtgctgtacacttgacatgtatcatttcacttggttgtcatagaaactgtggatggaggtagtgccacttgaaaactgagctttggagagagaaaaaaagatttttcccaagatcatgtgggaagtgagtggtggcacccagacttgaacttcaaagccttgctgcttttacccagcatagttaagtcaaagtctgaaatctgtttccttattgctttttctttttctttttttttttaaatgcggtcttgctctgtcacccaggctggagtgcagaggcccaatcatagtttactgcagcctcgaactcctgkgttcaggcgaccctcctgcctcagcctcccaagtaattggaattacaggcatgaatcagcctgctyggtccgttattgcttaactgtaacatggaccaaagaagcagctaaccctgttagttaattcttactaggaagagaaaccgcaccagctatttaaaaaaaaaaaaaaaaaaagcaaaacaaaaatgaaaataccaaggtatactggaaaataacattgagcttagaaggagacctgagtttgtacctggctcagtcacccagctcatttatcactttcttaggaaggcctttccctgtcacaccctccttcttgtttgtctctattagagcactgaactcattgccataattaccttattgcagtgattctaaggtggacatctttcacattttaacttttctaaagtgtggatgcattttacaattgatggtgttttaaaataaattggcagcattttttcttaattattggtacttaaaataaggatgtgctgtacagttgatgacatcttagatttgattaagtgcatatttatttttgtgtgttcccacaaaaatgtttacatcattctcatggttttaaatatcagatatatgcaatgattttccaatttctatccttttttaaggtccacccctgtatgttgaaccacattgtttcttcatatcacaaggattacagattcaacatatctactctccaaatcagtttgtcttctattgttctctatctcagtgaatggcatccacattcgtacatttgtggaactaaaacatgagatgatcgcccacctgggtttgaatcccagttccgccctatagtagttactcaagcatgcagtgaagtatgtcaccttaactattcacttgtaaaatggggaacataataacacctatctctgaggattgttagaatgactaagacattgaataaatgttagctgtccctaatcttcatcatacatatctatgacttctctccttcctctgcacatgtaattcatcaactcctgtgatagataggcccttcagagtatctcacatctaccacttctatcttgttgccacttctccaatctaagcccccatttttcttgcctatgcagcaactaatattgtagcttctcctctttcccatgtctaatccagtcacaaccatccattaaatcagaacatgccacttcttaagacctccctcaccccctacctaatgcatttggtataaaacaccacatcattaatgtggtctgtatggttgtctgtttcctgcctggcttctgcccacatttccagcctcatcctctgccactctgcctcccagtatcactcttttcctccaaaagtaactcctactcatcctttagatttcagcttaaatgtcacttcctcagagatgattattgatcttccaaactaaattaagttcttcagttatagtcctttatattgaatgtatgcctttcttctttgggatgatcagtttctcccaaactgtggctaaagaagtgaagtaacttccacaaggccaaagagtgagatctattagaactggaattctctctgttagaggaaaaaaaaaaatccaaaaaagagaaaagaagaaaaatggaaagaactggaattacaacccaggggcggggtgaactctaaagctgtgtcctttctgtgatctttgctgccttgagggcaggaaacagggtatgaatcaatgttctaagtttcaaaacatggcctgactgctgctcgtttatttcccatttcaagttgtccttaaatgagctgggtgcagtggctcatgcctgtaattcaatactttgggaggccgaggcaggtggatcacttgagcacaggagttggagaacaacctgttcaacatggcgagaccccatctctacaaataaaattagccgggtgtgctggcacatgcctgtagtgccagctactcggggtaggagtgggggcctgaggtgggaggatcgcttaggcccaggaggttgaggctgcagtgagctttcgtgccactgcactccatcctgggcgacaaagtgagatcctgtctcaaaaaaaaaaaaaaagttatcctgaagtattattctttctgagccttcatgctccctcaatagattgtaacctgttaaaatagtacctgttttctgatatattatcaacctagcatttacataaattatcttacatacagtaggtactcattaaatagtttttctcttagggatgttaaagaaaaacagtattttttttccatttaatcttttcaaggtctgaagctgtctcatggaggaattgagtaccttattctttctaccagtcaatgacagagtacaatttatgtttttatattttgaatagaactgctttaaatgtttttaaagctaatagtttgcatcttaatggatcattacccttgtttcattgggaaaagaaggaattaaccttacatayttttgatttccttcaggaattgagtgatctacagcgcgatccacctgctcactgttcagctggacctgtgggagatgactgtaagccttgctctatttctgggattatgctacctttaaaaatataggtttgaacatttgttaatgactccaaaactcctttgtttgtttcagtgttccactggcaagccactattatggggcctgtaagtatgattcatatctatgaaattaaccccctcagccatacttcattcttgccatttcacctttgatcagatgtttgtgatgaaggttgaatattcttgtactttgaatcacctaggaagcaaartattattaaggatttacaatgattttccaaagcattggtggcaaatatttcctgggatcactattatgttttcctttgctgaatcctagatcattacacataatggagtgccacagctcgcaaccaggctgtgtgtttatcttttttttttttttttttaagtcacagagagttagttgtaattaaccataatcattctcacatccacagttttggtaggttagaaattagtctaatgaagccaataattgaattcctacaagtaacaagtgtcagtttgccataagtttcatcactgttcttttttgtgaaagagaatcaataaaatattacaatgggtctgtctttacctccttataaatttgctgcttttaattttgttgcattgtcctaaacacaaaattatctgctgtttgataattggctactctcaatacttattacttttgttaaaattatttctttcaatactttagaggcagttacaagacttgaaacaggctttttctttctatgagcaaaaaatctgattgcataagaatgagcactgacagctcaaatctactttctgggtgagagtacataagtaacatgtttccatgaacaccattctcttctccctgccctgaaagagctttatctagtgagttacagagtttttaatcatacgaccttgtgtttaactttaaaaaacaccaaaactactgaatttcaaagcagtactctgggcagttgtctcaaattattgttttattaagtttgtttttctaaaaaggcaaaatacaatgtatttatataacaactttcaataagaatccatttatttctgtttgtttttaattagttactaagaaccttcaaaatactctcatttaaaggcccacccttaccttttgaattatggcctttcacaaatattttttaggtgaatcacatgtaacaaatggttataatcatgttattcataactcccttactttagtaatgtaaatatttacagtactctggaccatatctgtcattgtaatttatcttcattttctatatttcttacaatttttgataaactagaattgtttaaacaatatatatagtaagaattattatacaggaaaatcctctagcatatatgtggaaacttaacgagaaagtaatgagtcttggtgttattaccagaatgctaatataacatgatatatttaattaaatatgaaagaattaaaatagaattgtaggtatagtttgctagcattttctttttttwaaatttttttgcttgtaatgttatattttctaatggctataaagaaacatggtcaaatttaaatttctctagtaaagttgattcccaatttgatagtagcatgaatatataattttgttttggatttttttgggttctctacattattttataaataattactaaacgaagatttggcacataaattgtgtagcagggtccttagcattttcttttcacgacagcctcttcagttcatctccattcttggtcatcaagtgaacatcagaacttaagttttactatcctcaaccctttttcaaaaaaaatactgatkacggctgcagaaaatgatcttttcccacagcagtcgtgtgtatactgatctttaacaatttgtactcataaccagatttgtttggacaagtcacagcactgtgtgtgtcctgtttttgttttgttttaaattttatgatgtcggcatagttgttggaaaatcctccttcgtacctgcagagaaacctgttctcaaagtaaatgatttgaacttakgacaaaatggttgcatttttttcatattggtaatatttaatgaaattattttaaacatgatggcatttttttcaaactgataatatttgggggaaataattttgttgttataaataaatatagtaatcaaatgctgatgcaaatcttttgtaatttcagcctgatagcgcatatcaaggtggagtcttctttctcactgtacattttccgacagattatccttttaaaccaccaaaggtatttttatttttatgattgatgtgactcccatgtaagagattttattctttatctagagctcatttgattatctagagctcatttgatatgtcaaagactgtggggaggttagcattttcaaactgttttgtaaaaactactgaatctaaaatctgatttcttattgaaatactgtattaagtctataaaacaaaagtcagtacgtgtcatgctataaattaaattccttgcttttcttttccttcttattggatatgtgtagtttgggacgtttttatgattaagagtcagacttttctattcatgggattatccttacaaagttgatcattctttctctgttttttttttttaagtattcaataaacattcaccgagtacctactgtgttcttctacactggggaatccgaaagtaaatatgaagcagtcccttaatttagtatggtaggagagagaaacacatgttagatttagatttgctctaaagaggaaacaaatgatggggatatcagggaggggaaaagtgggcagattttgtcactcaggatataattattttaaatagttaaaaacagattaacattgtatttatgaaatggtatgacaactcttgtggaaaattaggattcttaatggatttcttagctgagacgcctcaactttgccctgaaacagcgtcagcaccctggttttagatccaaatgttacttccaggtatcaccaataatcaaattaagaaaaggattacttctacatatgatggaagccatggttaattactttagatgctgctcaaccagtcataccggctactagagacttayttattacactgtccaaaatactcttcagttcctttgagggcaaaagaaggaagctgacttgtttgtgttcacattctcactagctagaactgtgtgtagcacaaagtagataattatttgatttgtgttgatgacttttctcctctaaagttatgtaaagttgaggatattttaccctagagcaaattggttctgttttattcatagttgattcaaaggtgattgtcatattttgttgttttgttttatgtttagattgctttcacaacaaaaatttaccatccaaacataaacagtaatggaagtatttgtctcgatattctgaggtcacaatggtcaccagctctgactgtatcaaaaggtaatttcattgatcaggtttgaaacagttgataacagtgagacaggaaaaatacagcagaattacctatggactaaagttttaaaacaacaatcaactgtgctttctcctgttttgattttgttttgctctctttgctcttatgttactatggcttttggcagttagctttggttgaggggagtgtggatggacaaatctaaatgatgaaatgagaaaaaaccttaaaatatcagagctagaaatttggggataaacctattgatattttatccttttagcttgggtgttgtcttttaaaaaagagagagtgcccgggcactgtggctcatgcctgttattctaacactttggaaggctgwagtggaggattgcttgagcccgagttcgagaccggcctgggcaacataggagaccccatctctgcaaaagaagagagagaataagagatagtaaaaggaagattttgggactggttgtcccattcattaaatggaaatgttgacaataataaagctttacagctgttttacttcatccaagaataaaataccagatttgattgataaatgatttaagatgaaagacatttcacactgtaggataatgcagtacatatagcatgttagtctaaacttcgaataatcagtagcatcattatagtgactgacacaagatctgtgctgattctcaacttttacaggggtatagctgttctttgctggattatcaggtgtatacataggcatctcaagccattttatttcattagccactgctacttactgtgctagcactcttaatttatgtcttgtttctctgaaagaagagaacctgacagttggaaaatactgtttaggttagaagtagctgcactgaagcaaccatcaagttttccgtttttataaaattgaagaaaatgtttctcttgaagggatttatggaagcaatctgtactcattttttatttttaataattgctacttgaatatacagcatgtttttaaaagtaataaggtttataggaagcagggtccacagccgtagctctttcaaatattagataaataatagctctttcagttcaattatttatgaacgatagtttttctgacctaagatgctcatctacagtattcatatagattctcatattcttttaagaatctttcacacagtgtaactgtcatgcattagatatatgaaagattctgtgttgaagggttaattcaagttcataygctgtttcctggaatggtgtcacaaaatggatctcacttggcatataaactgccaagtccttatacatataaaagaaatggcaaactgccagatattgagtacttatattctgacattggtagccttttataaagaatcagtagtgttagattctggaaaccatcctgtgagaaatgaaacagcctcagtttccttataagtaaaatggggattcttatagtgttaccatacagggttgctatgtacctagcacatagtgggcacttacatgaatgttaactgttacccttttccttaccttaaaggatagacatggtttgtgtgcatgatagtgaaactggggcaaatggctcctggcagtaggggtgagcagaggaggaacttccttcttgcttacttttttataagatagatcataccttgctcatttgtttgtatattttttactttgctatatttttttaaatttttaatttgtttatcttaaaagattgttttttaattaaatatagacagagtcttgctgtgttgcccaggctggtctcaaactcctggcctcaagtgatcctcctgccttggtctcccaaagtgctgggattataggtgtgagcaaccttgcccagcttattatttttatttttttattttttgagatgcagttgctgtgttgcccargctggtctcgaactcctaagctcaaggattcttccacctcagcctcccaagtagctggcattataggcacataccaccattgcctggagcttttccatattttaaatgtcttcttttgctttttatcatgaggttagtctggaagcattctggggctgtaagttagccctgaaaatctgccctgttggtttaatatacaaggcttttaagtttcattgggcagatagaagataagaaagatgaataaaatactaattttttctttagttcataacacccccccaccctttgcctgtcattgtaagagtcaactctgctctataaatccacctttggacttgaaagagtacgaaaatagaaaggaaacgcagtggggtgggtgcaagtggaaatgggaggttggtccagaggttccatgaacctcctcagaagtggtggcatgcaattgaagcagacaaatgaggaaccagagtccttgttccctcttatttcagatacttagatcgttaktgtgtgtgtgtgtgtgtgttagtgtagctatttgcattagaattttgacatactggagtaacaactactttttcaattttcatttcttttttaaaatatgcaagctatataaagatagctgttcacattatttttaaatgcatgcaatacaaataaactacattaagtaaagattcattgaaaaaaattttacaaatttttcttctttgtagacagactatagctctaagccaaagcaaaagagtgtatgagcacagtatccaaaatggtttggactgttaactgtaatttgattgttctgtagagaactctcaagtttaaaggttgttaatagctactttggaggstcacatttttttaaataaatgggaactcggaatttaaaacttcaaaagctaaaataattttatattttatgcatcctatggtaattttataactttaaaaattaaagatcaatttgctatcaaccaaagtagaataaaatataatttgatgtgttcattttatgttttttttataagtacagtatctatattcactaaaattattttcacatatgtaatttgtatgaaktagaagggttattgtctaatgtgatgttctcttttaaatctagttttattgtccatatgttctctactttgtgatcctaatccagatgaccccttagtaccagatattgcacaaatctataaatcagacaaagaaaagtaagtgtttacttattttagtttctgtatggatacattcctatatagtatgccaaaacacraatattatcaatatgttttaagtcaatttgattatggttgttatatgtatattgtttatctttttccaatggagtaaacctttctttgagaactctgttagaccttttatgataaatcttgttccttcccacttactgttcaatagtatatactctgtatttgaaaaatagatgtatatattctaggtgataaattaaaaatgaaagaatttaatcattggaaagtattaaatatatattgcttatcttctccaaggaagaggagttctctcgtacccatccaaactgacctaattctcaagctgcttcatcttgctagtactgtaggttcatttgcaatttgtagataatgctccttcaggattggcttttgtaaatttctgttagaagctggtttctgcattttgatttttgtgtatttggatacattttcatataggttgcagagaaatccatgagttaaaaaattatttttcctgttttatttctgcatgaacctaagtcacattgacccagtaattgatayatgtgtgattattgcaattaagtataagaaggtagaatatatagttttattagacagatgcttctgaaatattaattttgtatgtttttactatatcctttttgtgtatctacagatacaacagacatgcaagagaatggactcagaaatatgcaatgtaaaaatcaaaaacattttcatatataccagagtactgtaaaatctaggtttttttcaacattagcagtaaattgagcactgtttactgtttcattgtaccatgaaaccatttgatttttacccattttaaatgtgtttctgaagcaagacaaaacaaacttccaaaaatacccttaagactgtgatgagagcatttatcattttgtatgcattgagaaagacatttattatggtttttaagatacttggacatctgcatcttcagcttacaagatctacaatgcagctgaaaagcaaccaaattattttttgctgaaactagatgtttttacatgagaaatactgtatgtgttgtctaagatgtcagttttataaatctgtattcagatttcattctttgttagctcactttataatttgtatttttttactgtatagactaaatatattctatttacatgtatgtcaactcattacttttttcctgtgaacagtattgaaaaaccccaacggctgataattaagtgaattaactgtgtctcccttgtcttaggatattctgtagattgattgcagatttcttaaatctgaaatgatctttacactgtaattctcagcatactgattatggagaaacacttgttttgattttgttatacttgacttaactttattgcaatgtgaattaattgcactgctaagtaggaagatgtgtaacttttatttgttgctattcacatttgaattttttcctgtataggcaatattatattgacaccttttacagatcttactgtagctttttccatataaataaaatgctttttctactatttgtcttgattacttaaaaaaataaaaatataagtaaggatcaaaactctaaaattttgcatgaaaattacatccaaattgtgaaaatcagatctattttgtttgccattagtcaccattagttatataaattttattgttttaggttagtatctctttactaaattgtcagtctataagataatatatgttgatcccttgctgtagaggagaatttagagtaatttggggtttgtcttggattatatctaaatggattatttgttaaaagtactgaaatgagtataaggcagtatcacccatccaaaagaaaggtctttatagacctgcacagtcactagattaattcattaaaatgcccccaccctgatgtaattgacattacatttcttaacattttaaaatctagaatttctaaaatggaatttaatgccatcacaatttgaaaaactttttttttttttttactatagaagttacaaaggaagttctaaaattatgcctccctctgtttttataagttgccatcgaaaagtgatttaaataagcaggttatctttatagattttaaagaaaactagaaagttttaatgttttaacttggggaaaaatacatctctttaatgtttagcatgcttgtcaaccttgagtgagtgtcatttttaagaacagttgtagcccttctgattattgcagtagctgtagaagtatgtaagaatatgtgatgggtgtagtcattagcaaagcatttaaatcacttgagtattttgtcatggttcattattattaaagcacaaaataacctattgttagaaaatatgtgtttttataaatgaatgtaaaataattaaatgaattgtgaaatggatgtttaagaaaatataggcttaaaaagtaaatctataaaatgatgtcttaaaacagccatatcatgaaaaattctacttagctatattattataagctacatttgccctgaatttgaacactcaacatcactagatttaaatatttagtatattttgatagtaaagggttttgtttcttgaatatcttcactttaaacaaaaaaaaaaaacaactttcatttgtgtggcatttatttttggaagtgtcttcttttttttctttattaaagtttttgaaacttgcctaacttgtttgcctttgcttacatctggattgtactggacttgaggagtaagcagaagttctcataattagctaaaaaccttgagttccatagtggcgtcatgatcggtcagaacaccattttgggtatattatttttgcttaactctaacaaggagaacatcagttaccttttaaaactgtagaataaaagtcagggccttttgtggattaagcattaatttaaggacttccttggagtgagagaaataggtagtcttttggggatttaggatcccacttcttgaagttgcatagttgaaaaccatgttcaaattggattctgaacgcttataactgccatatacagcagttacccacatcagtgacatgggttgtaaggggcagcctcaccaccatcctccaactatctcaaaagcgtacaattcctgaagtacaagctttacatatatgcctccgtcaaccttatttattaatttttgcattatttccctgtttcaccccttttaaacgctgatagggaaaattaaaaattataaatgaactgcatatcaaggacaactctaagagttaacgttcaaaagttacttttcataagaaaaaaataatacattgcagttttaaatttttcttatttatcacagtgatctatctaatgattcagtcattgatgtttgtcaagatcctgctctcccacagttctgtattttttaaatggagagattaaggaaattaattttcctcccaaattaaaagaaattattggtcatgaaactatatcatgtctgtttattggtagtcattttgaactgtacaaaagcccagcccagttgataatgctttaaaatttgagctctgcagtagaatcatcagtcctgttactctatcttcttaggaccagccatgaaaaatgtgatcagtgctttagccatggccataaaaacagagcttcattgtattcagattgttgaaagtactgtttatctttgtttgtttcagtcttttaagtgattattactacaataaaaaatctgatttttaaaaaattagttttatcacttttcagctgtaaagtaggattttcacaatttttttttctttaaagcagaggcttaatcacaatttaatagctgtaaaatgtaatgcagattatttatgaaaggtcttataatgcttctcttttattctgatggttgtgttgcacaaatagggcagcaggtagagtctcatctaatttcacttacaaaagttcttataggtagataactagtcatttctactctctctgtttttgaactgagtaatgtgtctgtaagctcttcttaaactgtgtaattaatatgttttccctagtttttttcagtagtggtgataactgaaaatttgtagacggctgatagtgtcctggtgacagcctaatagatgttatatccttatttgtattttgttacatttacaattctgctcccattatcctgttatataagaatgtggctttaaattgtaaatgaactgaactaataggaagagagaaaattcacctgagagtattagtattggggggcattttatgtaataagaaacatttctctaaaaacttggttagcactctcttaggtcctactgttgtcgagggagagatgtgcctttcttctctcagaggaggttgcttttattatactggcatatgctgaaggtctgaactctgctttcctcatataatttacttggcaggaaaaactgttaagatctcttgagtgcaaaagatcaccatgaattgcatatgaaatatttcagtataaactcttaatatacatattgtgggaacagttgtgataccacttgtgttagcacttttggtacacttgttttggcagtcccacacattcaacgtgtggatagaagaatgcacaggacccaacataccatcatactcaacagttaagatttattacagccacctggcaaggatacacagtgggggcagtaagggggaaagacagaccaggcagtctggaggaatccacgtgcaggctccctgtgctctccctgaaggggccacaagagtgaagccttcctctagtagtagcatgggcatagtgtttctgccctaggatgctagtgtgaaacgcaaagtccagggtttttattgggggctaatcacataagcatcctttgttttccaaaattctagtcttctagaaggaaagcaggtgttcaccataaatcacattgtttatttaagaagtctagtcaggctagcacagcaagcacatcttatcactcagggatggtttcagaagccaggtttctagatgtcagccaagggcaaaccttgtaaacaggccattctaaagatcaggcctgtataatttgttaaaaaaactattctttccctttgaatggccttagtacccttgttggaaaccaactgaccatagaggtttatttctggtctctcagttccattccatcaatcaatatgccttatcccagtatgacactgttttgcttactgtaactttgtagtagcttttgaaatggggaagtgtgtgccctccaactctgttctttcacagtactgttttgactattcaggccccttgtaattccgtatgtattttagggtaagatttgccatttgtcctgagatttaattgggatttattgaatctgtagagcaattttggtaaagttgacattttttgttctggttatctactgctgaacaacaaaccaccccaagctaagtagtgtcaaagaacaaccatttctttatgcgcatggattctgttgggtcaagaattgggctgaggcacgggagggatagcttgtctactcccctgtacttaggttcttggctcaggatgactcagatggcttgaggctggaagcatttggaggtttctccactcatacgttggcaccaggacaggtattatattctaggtcacttattaatggcctttctatgtggtttgatctttgcacaagatggctgcccacttccaagagggagcagttggagataagtgttccaagagaatgaggagtaagctgcctttttaagtgatctagcttttgaagtcagagattgtgtagttcattggatgaaacagtcacaagctcactcaaattcaaggaaagtggacatagacccttacttttccttgggaaacaatttggggtcactaatatgtcttactgactagtctttccaatgtacatgaatcactcaatgtacttaggtggtctttaatttctaattgtcattgttttatagggtaattgttttaattgttttgtaattctctgtgtagaggtcttgcacgtttttcactggattcattcctatgtatcaagtttttaaaacctattataaaattatttttcatttcatttcatatttatatattatttatagaaaagcaatttatattcatcttatatcctgcaaccttgctaaatttactttttaaaagtttgtacaattctaaagttttagttttctatacttacttataatcatgtcagctgcagatagagatgattttattcaaatctttatgccacatttcttttttttkccctttgttgcattagcctgagctccaatatcatgctgaatagaaatagtaatagcaaacatcctttcttgatttccaagggaaagctcttacatgtcagtattaacaatggtgttcctttcatatcaaggaagttttctattcctagttcttaaagcatttttattactattgagttacaagttgaatttaatgctttttcttcatttatcaagattattgtgatttttatccttttctttgattaatgtagtgtgatgaactacactaactgatgttcacctgttaaattatccttacatttctggatagaaacccactttgagatgtatttatcttccttacaaaccactagattctatctgcaaatttttttgaggatttttgcaactgtgttcatgggacgagttggtccataatttcctttattgaatattgttgtcaatttcatacctcaggttatgctgggctcataaaaacagtgaagaaacatttcctttgttctctggaagagtttgtagaagatttgtgctattttttccttaaatactttgaagaatattctgaaggcatcatgtctagagtttttttgttgtggtggtggttatgggaagattttaataataaattatatcttatatatggactagatatatttttattactcagttttgtgtttttcaaggaatttctgcattttatctaaatcgttgatctatttggcatagagttgttcatgatatcctcgtctttttgaaggtaatatgtatctgcagtcatacatatctcctcacaatttttttccttggtgagtcttgctagaagactatcaactttattaatctttcagagaatcagtattttattttttaaaatttcttttgtacatttgttttctgtttcattgatttatattatttatgttttctttagtttttgattttgattcattttttgtagcttcttgaggttgaaacataatttttaaaaaccttccttcttttctaatatatgtatttaaaactatatgtttacccctaagtaccactttagctacatcctacaagtttcgaaatatcgtatctacattgtcattcagttaaaaatattttctaattcttgtttggatttttttattcacttatgagttatatataaggatacattgttttatttccaggcaattgggctttttttttttaagttaaatttttgctattgatttctagcttaatttctccatggccagaaaacataatatgaatagtttcaattctttgaaatttgctgaagcttgcttcatggcccagcatatggaaattatgataaatgtatcatatacatttgaaaataatatggattgttattattagattcagtgtttatatgtgctaattagatcaagtttgttaattgtgtttataatttttatttgcttgttctcacagccattaagggagatacgttaaaaagtttcccattatgattgtgaaattgtctgttttatttttgccttatatattttgaaatcatattcttggatactctctcttacacacacacataaaattgtgatatcacattaagaaatgtctctatctgtattaatgcttttgccttaaactccactttatctaatattagtatggtttcttttggctagtatttgcagtgtatatctttttctattctttaatttttgatctttctgtgtccctttttaaatgtgtgtctccagtactcatttcaaagttgggttctatttaatttggtttttatctaatctgaccatgttagtatttcaattagagaatttcattcttttgcatttaaaggaattactgatatagttgggtttataccaactgtgttcccatttttgtttttttttcttcttaaccatgttttatttttttcacctttcttttttccttcttttgggtttttcagtttttataacagtatcattttctttccctctgataacttgttagacattctttgtgcatgtgattactctaaattaaaagatctatctctgattatagtttaatatgaattattgcttgtaccatttttccctataatgtgaaaactttagaccacctggattccattgtctctttcccacctttgctgtattattattgtcatgtattttaatttgacatatatgtgaaattccacaagacactgatgttttgtatgtcagtatcattatacctacctccgattttactttttccagtattcattgctttcctgtttccatatgggatcatttaccttttaactaaaca

SEQ ID NO: 96030 - DNA, 30754 bp, Homo sapiens
  misc_feature (1)...(30754): n = A,T,C or G
tatgtatcaggtaaatgttcaaacttgctctggaaataattctgaaccaaaaaatttagtctatgtaaatctaaactatgtctataggatgctaatgaacatgggaaatttttcttgaatggtgacctttaaaccatataattatggacatgtggatatttctgtgcaatcttatagttaccaagatttttttttcatcttgtttagtattttctagatatctaggttggattcttatatctaatcttgaaaattatatatctattgcttggatttttataaaagactattcttttcactataaatttattgaaataaaaattttaatgtataccacttagaagtaacatttcaggtaatgaagatgcccagtgaagtaaaaattaccaaggatatatattttagtgactacaagagaggatttgaatcctggtttggttttaccattaaatagctgaatgactttgggtaaaatacttcaattctctaaggcaggtttttcatttgtaaatgtaaatattaatgatacactcaacattcttggtgggaggccttaaagagatgatatatattgaatgcttaggttaaagccaaaagtataataattagcattcaacaaatgctatgagggtgcataaatgctatgagggtgcacattttatttccactatagcttgcaaatacagtaagtatggaaactacctctcacctttctttggtttaactctatttttatatttttcaacttctgtagtctagaaaccttgtgaaaggaagttctgttcaccctcacattgtgttaggaggctgctgacatgtgatcactaaatcttactgctaacaaaatttaatggtggagcaacacattcttgtcttttgttataaatttcctctcaatgaaacttttcaatatggtctcaagaaccatacatgactgttgaattttgctgccttttgaactttggaatactgtttacatgagactgtcatcattttcattattaatattagtgatgtcattctgatcaggtaagcagacttccaggtccaaaatgaccccttctgggtaggtccatgaggaaagtaccaaccattgccacttttcccatcatctttagttctgtgtttgttccacatcagacatctcaggagagaggccacacgaggagatgagaactggacggaattgataattcctaactcatccccctatccctgtgaaagcaactaacgtaggttatttctaataaattccatgagtgtttgttttaatgttaccagttataaccaagatggcatgacaatgtcaacctcaaaattaaaccagacctctcatctctctgcagcctctttgatcttttttaaagcacaaattgatcatcctcccaatggtccccaggaaaaatccatattccttaatgagctttgtgaggtcctttatgttctagttgtcaccttggactccaggcctcatctctcaccatgctccttctggaactctacattttggccttgttccccaaaagggccttgatctctgatgcggctggatgttgccatgaatggttcctcttcccgggatgttcttttccttatcttcctgtctgttcaactcctactgattcttaaatatctgagtagacagcacttcttccaggaaatctttcctcacctccattacccataccccctaagacttgataaggggcttcccggcaataatcctactgcacccagaaatgttcccacctcaacccttgactctccatatcataattgctggttcatttctctgtatatcccatttctaaactccttaaggggtttacctattgcctacatgcctggcatgtagtagaagagcacataaatattttttgaatgactttcccagtaatggaaacaatgaatggatccactagggtcaagtatttaaaattaggccatgtccaaacaataacaccctaagaaagaaaagtatatttgtgttaggtcttaaaaagtggatagagagggccaggcgtggtggctcatgcctgtaatcaagacaccagtttgttagagctctgcgaattcttacccaatccattgggataatcctagagttatcagcctatacttgtcagagtactttccatgaatctccataaagctgaagctcggtaaggttacagttgcttgcaaaaagctttcagaaaacaattcactggccaggcgcagtggctcactttgggaggccaaggcaggcggatcacttgaggccaggagttcaagaccaccctggccaacgtgatgaaaccctgtctctactaaaaatacaaaaactagctgggcatggtggcatgcacttgtagtctcagctactcaggaggctgaggcaggggaaccgcttgaacccgaaaggcggaggctgcagtgaactgaggtcgtgccactgccctccagcctgggcgacagagcaagtctcaaaaaaaaaaaaaaaagaaagaaaaaagaaaaagaaaagaaaaaaaggaaacaattaactatttaatgatctgtgcgtgaataacaggacttaaaatgaccatcgttaaaagatgagaattcattataatagtgacacaattcacaaggaaatgtggttgttttgtagcatataacagtttaacataataaccaaaattacagctgctaacacattagatttctaagaatttattagtttgtggaacatgaaacaacatatttatacaagtataactaaaagaaggttaaatataatttcttatttacaatgtttcccatataatttaatgtatttaataagcctaattggtttaatatgtctcttcctttgagaagctccagggaccctctagtatgtcccaaagtcattctgagatcaaaagacttaaattagaatttcagaagtttgtaagaaatgtcaaaagacctaaaacattttcttaaataggatcttggtcattatgaaacaactaaaggtaagtacagaaaagttacacagtttttaaaagcttagctcttttaatattaagaagacagtttgttatggcttctgggcagtattcagagaagagaattgtaggagacaagactaggatggtccttgagtaagcattcatgtcttccacaaacatgtgctgagcacctaccatatgtgaggcactccgctaggcattggagacacagaagtgagcaaaaaaaagacccagttcctggtctccgaagtccatggcagctggatgatgaggacttcctcatggacaagcagaggcccccaaaagtggcttcagccaagttttgggtgtaaatcaaccgttttgatacttgtatggagagcaagttctgattatttccctatctaatcgtcattcaagtttgcagaacttcacagcacccagattctgaaggctgggagttgttctggaaatgccaaggacccctacagaggagcgcagacttttggacctaatgcactccaactggcaccagggtttgtctggcctcggtgagatctaccagcggtcatcaaggactttgagaactctaggtgaaactcagaagctgagttcacttcccacagacaggtatctctaataaaagaaaaagaaatcaatagctgactaatgatgaggcaagttcttgtaccctacttccattacaacacacagagggagagtctgccagttcatgggatatttagaaacatagttcaatgtaatacagtctgattctaggctctggaagagatttaaaaaccagctttctcaaaacaaacatttctctaaaattaagggactccgaaaacccaccttgaacccaactctatcattcccccagaattaaaattgaaggagcaaacaaggacagagctgattgcctgaaggaaagcagatatttgggcttcatctacacatgtatgtataacagataatggctggtgacttcattctttacttttgtgaccttcaatgagtcatacgtcttgaagacctgagagctgtctggtggaaatgaagtcatggtttcaaaaagagatccacagatttgtatgcctatgaatccttacttgtgaccctgaaactggatgtaagttcaatcaaaatattccagttgttggccagacgcagtggctcacgcctgtaatcccagcactttaggaggccgaggcgggcggatcactaggtcaggagatcgagaccatcctggctaacacggtgaaaccccgtctctactaaaaatacaaaaaaatagctgggcgtggtggcgggcacctgtagtcccagctacctgggaggctgagacaggagaatggcataaacccaggaggtggagcttgcagtgagccgagatcgcgccactgcactccagcctgggtgacagagcaagactccatctcaaaaaaaaaaaaaaaaaaaaaaagaaaagaaaagaaaaaaagaaattccagttgttattgttgtttgaaagactcacccagaaatctttccatctggtgtggaatgaataaattgtctgacagcctgtgaaggagaagcagcttgaacctcagccttgctagaggcttagtctaattaaatcccctagagcatttaaacaggagccagtgcattggagcacagtgtatattgactgatgcacggagtttcctcattgtcttaggaaagggtatgctcgaacctggtgctgtgtgctaaagaatagtaacagtgagtgcaacaggtgctgctgtctctgaattccaggcctggcttgggttcctgtattggttagctactgctgcataacaaacaatcaccaattcagtggcttaaagcactgaattaaagcatttatccatgctcaaaaatctgagtttgctgggtggttcttctggtcttggctggatttactcatgcctctgtggttacagtgggttgagtaggcagtgccactaatcttggctgggtcctttacatacttgggggacagctggctttgagttgttcaaagatgttgctgttaccacacttaatgaccaaatcaagtcataccatgtctagctcagattcaagaggtggagaaataaactccacttcttgatggaaggagctgcaagatcacattgcaaagggtgtgtgtacaggaggaagggatgaagaactctgaccaccttcccagtccatcaccaagtctagcctgtttctccatcctggggatgcctggaagtagggaggaaacaggtcaagggccaagagggttttcacattttctcttttgactcattctgtgtatccctcttgttctacatggttgacatccagtgaagcttgctgattactagctcaacacaactgaatattcaacaactctgtacagcctgaattcaaatcttacctcatcactcgttagtcgtgtgactttttaggcaatttacttatctctctgtgcctcagttcccacatttataaagagaggcttatgggattgttttaaaacttattaggtaatacacgtaaggtgcttggaattctgactgtacttggtaaggcttcgtaacagttggcagctattctttatgattccaggagtcctttccattttcttaagaggaaggcccttaggcctgcacccttgtgttttggttatttaagattgagaactttgacaccgaggcatatttaacttggcaaggggaggcactcatggtgtttgctttgtgaaggcttatctgccttgctgtgtgaactggctgggctgttcacagatgcagaggtctctggttatatcatgatggctttacagggtccaagaattatctgcaggtgtgcaaccttcagaggacctggggaaactcaacagacatgacatgggcctctgggggctcctgaacccaactattgagattacagtggcataatgcaatcattgctattgttttaaagtgttgtcttttggattggttcattgcatagcaatatataactggaataggcagttaatgggaggattgtggtcagaagctactgtgagggctgttgaatttttctccaaagctcagatgcccagtattcctagtcttcgaaagagagagaggaagattgagagagagagagagagagagagagagagaagaagttttcttaatcagagatttctctttactttcaactaattgcaggtattttcatctattctaaatgagaaatactatcctctatcattagggtttgctgctgtgtccctattgagacttgtaaactatttggtgatgaaatagaaaactgaaaagtgagggcccattcagctcacaagtacatgcatagttacataggtacaaggttggtgacttcactccctgctttaaccaagcattctgtcatatttccagacttgtgggaagacttgacagctattattaatcttgttttgtgtatttgggcagattaaagtattaagtgcgcacagcatgggctatmatcacctgctgttttcttgaagtagtgtccaaatgataaggctggaatatatatttttagaaagggctggacactcgatccggtgggagggaacatctggaacattagacagggtaagccacctttgcaactcctttcccyctgctgtgacgtacaggtgaggtaaacagtactgaagtccagggcgtcggtgctcactgctctggcaatgcccggtgagactgaattatgtttaaatttattgtagatgctgatcttctggacaatcacacttttcctgctgggagcagccaaaggtaagaaacaccactcctgccccgtaggaagggcttaaacttaagctctcagccctggccagagaaagctttaactgtggcagggctcccagcagctccagggtaccagagagaagatgtgggctgacactctgcctgggagagtaggctgggcagtttaagggagacctgtttctggggatccccccagtggcctaccttcatgctcggggtgcccaaggccagacatttctaggtaaagcatgaaacatctgcctgagttaacatattgacttatcaatgcccatgatcacattggtcaaataaatgtatcagaagagctaggaatgggacttagaactttccagttttgagggtagttctaaacaaaggctccagtggtgtccctgtgggattcaatgggactgatactactaccggccagtagtaggtgggcactggggtcaagaagagagtgggaggggttgcagtaggttcatccattgtcttcagactgtccctgaatagaagagtgaccaggcccgaacagcagtgacaccccagagcacaccttgagagcaaatccttgagcagattcaacctttctctgtaggaaaagaagtttgctatgaggacctcgggtgcttttytgacactgagccctggggcgggacagcaatcaggcccctgaaaattctcccctggagccctgagaagatcggcacccgcttcctgctgtacaccaatgaaaacccaaacaactttcaagtgagacctctgtcatttaaatgtcactgtaactggcacggggctatgcccaccctgcagaccatgaataccttatctctgtgccctcttcctccaccatgccccaccccatccctcaagctgccccccagacctagctagacctagacagagcaggtctttagtaatgttggcttgaatgaatgaatggttcacatttgccagaacctctagctactgtgtgattctggtctggggcaaacagcttactgtctaacaaaaaccacagggaaggtaaaacctcaaaccacaatccaggcctagtggaagcagtgattactcacctggagagatggggcaagaaaagggagatcagggtgggcttcatggaagaagtggctttttgctaagctttgaaaagtagaggcattggcgcaggcggagatgaggaaggaaaaaggcctgtgaggctgggctgcgaaaacatgmagcacttctgcgtctgtcacagattctcctcctctctgatccatcaacaattgaggcatcaaattttcaaatggacagaaagacccggttcatcatccatggcttcatagacaaaggagatgagagctgggtgacagacatgtgcaaggtaggagccagctctgatccctgtggccagctgaggccaacacttctgctaacatctctgcatcactttatgcactcaagaaatctttacatattaggtaactttatgcaattaaaatgcttctcttcacaaaaattaaaatgcctttccatgtttccgcactacatctgcacactgaagcaaccacatttgctgttagaaaagtactcctactacctaatttctggttaaaccaaggcctgatgttttctgcttccatttgtagtgagggtactttgtatcctataagcgagggactataggggtttctttgttcaaatttttcccacatccctgagaggctgacatgtgttgctgtgaccacttaattgatcccagcactttgggaggccaaggtggatggatcacctgaggtcaggagttcgagaccagcctggcgaacatggtgaaaccctatctctactaatgatacaaaaatcagcctgttgtggtggcaggctcttgtagtcccagctacttgggaggctgaggcaggaaaattgcttgaacccaggaggcaaaggttgcaatgagccaatattgtgccactacactccagcctgggcaacagagtgagactccatctcaaaaaaaaaaaaaaaagaaaactaagattaagttactacaatgacagaatagaaagtgtcacctacatgtaatataggtcagaaggagagcaacagaagaatacacacatgtgcacacacacacatacatacatggacatgtgtgcaacttgtgcatacacacacaaacacacacacatgtgcgtgcaatataccacaatataccatcatcctttctatttatgtggagactagttcaatcgatttttctgtcacctaagaatttacctaccccaggagcctgccttccacacatacattaataacaccaaccagtaatgtcaaaaggaaaaattacaaacccagaaaattaaagtcattctgcacttgcccttggtttaacaggcatttcactcttggcacctttcctgtcctatcattaataagcatcttattgatacagtttatactccaaattctccaggcttgtgaaagtttcctcaggattgcttgaaaatgaaagtcctggccaggtgcgcagtggctcatgcctgtaatcccagcactttgagaggccgaggcgggtggatcaccygaggtcaggagttcaagaccagcgtagccaacatggtgaaaccctgtctctactaaaagtacaaaaattagccaggtgtggtcgcaggcgcctgtagtcctagctactcaggaggctgaggcaggagaattgcttaaattcggaggcagaggttgcagtgagctgagatcgcgccwctgcactccagcctgggcgacagaatgaggctgtctcaaaaaaaaaaaaaaaaaagaaagaaaaaaagaaaagaaaagaaaagtcctgargagaaaactcccactatctctgtgcatgtgatcacacatattagtatactatatgtggaatgattccaagtgcattttaaatttatagtaccattttaaattcaagctggtaatatgtactgcctggcagaactcctaaagatatatcagctcctttgacatccaggaagacattttccttccagaattcttcaatctcttttaaatcagtacagttctatttttcaaatatctacatgtgtctactccatgaagtactgtgtcatcgtgactataaaaatagtgaaacttctctctcactttccagcagcctggggcatcgccaagagcctgaaaggaccccttacagtcaaatccacaaggtcatttagacactggccaccggagattgcacctaagacttttccttttcaaaacaggactcttttcatgatgcaattgtttttcccttactaaccaaccttactgaatttggttgaaggaaaccagagagtagccagcttccaattaatctgcaagctggagggggaatcagtttgcctttctcatagcattcaccctgaaggataactcctaattaccaacaggattccctaacagagtctagtttatctcatgccctagctaggagaagagagaagtggccatttctgagccctggctggataaggtttcccctgctcccattatctccccaaccccactatctccccaacaccagaaactgttcgaggtggaggaggtgaactgcatctgcrtggactggaagaagggctcccaagccacctacacacaggctgccaacaacgtgcgagtggtgggcgcccaggtggcccagatgctcgacatcctcttggtgagtcagctggctggcctatgtgaggagggaagcagtgcctgctggtctctgtttggtagagatgcagctgagagttatggattaaagaaggacaaagaattgatatccagaccttacttytaaaactctgaaatttgccttcataatgacacgccagtggaagcaaaaataagaatcgctaacacttagaaagtggttttttaaaaatcatcttcaatttacagataaagaaactgaggcccagaaagtttaactagtttgctcccaaagtcataaagcaaatgaatagaagacctgccttttgatccagaccatctagcttcagaattcacccacaacaccaggtgggctctgtttcgcgtgaaacacagcatggccagagagagccacagagagccaacggacagtacgtgcaattggcatgtaccagctctactggcctggtggtatgggtcctattgatgttggggaattccttctgccacaatcatttcacttatttcttcctatactgtttcattatagctaactccttcagtctttaattctttaagttgctaatcctttgtgactattttctataccaggtaatgactacagccatttctgtcttatagttaaagggtctacaaaagaatcaacttctgcactcctgcagaaatcaaaacccatggtatttgtgcaagaagtatgatagaccaataaatgaagtgcctttgggtgaacgtctctgagatcaacatgtgcaaatacctcatagctctatttgatttgcttgttcaccagtacttttggagcagaatgtcaggagtatgtgaggaagtaaagaagacacatgagatcccagaccatcaaggagcttgcagtgaaaacttgcaatgccagtagagtgcgatctattagtgggttctgatggggagagtaggagctttacaggaacacatagaaggcagctaatccacactgatggggtggggaaagggcttaaggaggtctcccaaggaagagacgtctaaattgacagctgaaggctagtctgttgatgttagctggcaagtgcttgggggatagacaacaacaagaagagaagaacaaaccaggcccagaggtgagaggctatgatgtattcgagggtctgaaagttcaacaargggtttggctgaagagtctagaaaaatagatgatgagttaggaaagctcggaggccttcagaatgagtttgggcttgatcctgaaggcaatgagaggcatggaaggttttcagcagaggagtaatatccattaggctggcattttagaaaaaccacagcaaaaawtgtcctgaaaatacaatcttccctctccagacagagtatagctaccccccttccaaagttcacctsattggccacagcctgggagcccacgtggctggagaggcaggaagcaagactccaggcctgagcagrattacaggtaaggccccagaggcagggccccagttttgtccccagaaaccccagaatgaggtctcaagaatgcagcccagttcagagctcccctgaaggagactgtcccccttggctgtgatagagctgcttggagcctgcacagaacattttagggagcccccaagaagctcatgcgccaccttcacggcaagggaagggtgattttgttcctctttgcttcttccacctctgtcctagcccctcctttctaagtcctggttttctggtggtgttcgcctctcaacaggactgggcacccaggaaaatgcagagtgagactagtatgaacatgagcaaaacataatcaaggagggtctatattgccaattctttctcccttctctttgaaatcaagggcagaatagaacctaaaaattgtttcccactgcttctactagtagaagaaacccagtcgccattatggccaaaagcattcttttaacccaatcaaagcatttgaattataacagcaacagcaagatayatctacataatatgatggtgataataataataataatgctattataattattatgataagcatagattaagtgcctgcttatcccaaatactgcacaaaatgctttatattttcttatataattctcagaactgaagaaaaaggctcagggatgcaaataacttgcccaaagccacacaactcatcagtgggagaactgagatccagacctggttttgccgatgtttggcttaagcaactctttataagaaatctctcttttattttcagctggcaactacattcacgttcctattttatcagctgctgtaatgaagccttcaaaaactattaacaaatccaagatccctactaagaaggaaatttgtcaaaaacaataattattaatatcttacttatacacccatgactatacaccaggcattgtgctaagtgctacctattaactcatttaatctataacaaccatatcaaatagatgccattatcaccccattttgtaaaatgaagaacctgaagcacaaaaaggtagagtgacatgctcaaggtcatgcatcttkccccaaaagcagctgagtaggaatttggagccaggcaacctagacccagaacctgtgttcttaactatgataccacattgcttcacccctttctttctacaagcttggggagagaaaggatgatgaagaagaaagatacacaagtaaatgggagactctggtgtggaaaaaatccttgcttaaacaaaatctaaatttctttgctcatttgtcctcctccatccaygccactgggaacccttttgcaatgagccacattcagactctatgtcctcatatttagcacccaaggccatggcactgcatcactctggtgcatggtacccattgagttgggcagtgcatagcccgggcagctgtacaccttggtgctgctgacatctacagtcaggtctattgttctgcagtgctgatcatctcttttagggttggatcctgtagaagcaagtttcgagagtactcctgaagaggtgcgacttgatccctctgatgctgacttygttgatgtgattcacacggatgcagctcccctgatcccattcttgggtgagacctatgatgctccagctgtgagyaygcacaactgtgttttaaccatgaaagtcctgcatgacaaaaagctcattgtttttctaagcatttcaggttttggaacgaaccaacagatgggtcatcttgacttcttccccaatggaggagagagcatgccgggatgcaagaagaatgccctgtctcagatcgtggatctagatggcatctgggygggtaaagtcatggtggggtgaggggagcagggcgggtactttcctggagtgaccaatacctttctgcagcaaatcttaagaataaaaatgaaactgtctttaaaaatatacaattccctcttctggggattatttcagaaaaaatgtagctacatagtatttgttatatctcagctttactgcttttgtgcttccttaaaacattgctgtggatgtcctggcatgtacaagcaacaaagaattataaaactgtcacttaaagctgtgactccagcaatcagttggtagttacctaatacagaaaggaaataccataagagcaaacatcctgactgtaactaagagacttttgctacaaattctctcttgggagtcagtgataaggttcaaaatgatgtaatcagctccctttcagtagctagaatgagaatattcccagtggtttccacagcaagcctatttgcacaatgagagccattgctcacccatgttgagtaggaatgaggagcaatcacagttaaggaaggtgagatgggagactgctattggatgtggttattctttattgttgatctagcacacttgggaagaaagggcatcctgcagacacagctctgactctgtatctaatgaggccaaaaggacaatggacaggtgaagttttcatccagacttgtcatgtggcaccacacggagaaaacccttagtagtctgaccaaatgtaatgagtaaagatttttactgaatttcatcaaaatggcttggcatatatggatgccatcaaagcaaatattaagaatgaggacaggccagctgtggtggctcacgcctataatcccagcactttgggaggccgaggcsggcaaatcacttgaggtcaggagtttgagaccagcttggccaacatggtaaaaccccgtctctactaaaaatacaaaaagtagccagtcgtggtggtgtgtggctgcaattccagctgctygagaggctgagtcaggagaatcgcttgaacccaggaggcaaaggttgcagtgagccgagaccatgccattgcaccacagcctgggcaacaagagcgaaactccatctcgaaaataaaataaaataaaataaaataaaataaaataaaataaaaaataaagaatgaggacatatgcagtttgtctttcacagcctcatgagggtttgcgtgcatagggcagtcaaaactcttcatcagtaatggcccagcaagctcaggccaggtctagaaggtataatgtaacatttgtcacttggcaggagttgcagggagcccagaaaggttgcaagtaaaatcaagacactatgagagtgaagctcatacaaaaccacctaaagttatccagcccttgtttttatttgtataactgccgcatggaaatgtcctcgcattggcttggtcatgtcacatctggtcatgtctttgaggacctccagcatggtgcctgggacatgagatggcactaaggttagagggatgggccgaagacaagatgggcatgggtttaattaccagctttcccacctattagytaagctgtaaatctgaggctacactctgtagtcctttctgtaacataggaatgagatgataatgcataaataaggatgatatggtacccacctcctaggaagactgaggattacatggacaaggcaggtaaagtgatcagaatgttgccttgtacacagaaagcaccctctatatgttaattgtcattatggtggctgaattttggatttatcttaagtttctgaaaatacggtcctactttggaaccatcccatttggagagagaggcagagaagctgttacaggcccccaaccacctgttcaggtctccttattygttttcccaggaacccgggactttgtggcttgcaatcacctaagaagctacaagtattacttggaaagcatcctcaatcccgatgggtttgctgcatatccctgcacttcctacaagtcctttgagtctgtaagctattgtcctgcctygagcaacaagcatcacccctctgagggactgctgtcctgctgcgtttgggatttgcaatgccttctcactacacgttttgcattgaccctcagagttcatggtcctgtggagtggaagagaaaaaaaagtaaacaacttttggcaggagatggctaaaattttagatgacatgagttatgtggcagaggaaaactgggaaatcagagagaaagagcagtcaattcaatgatatagaggcttcctgcaggaggcaacctctgaatctagcttaaaaatgatacagtttagaaaacacaggaatgcacatttctggcaagggcagagcgagagtagaagaatgtatagagaataattcacaccagagagaaagcaaggtggatgctggagtcctatatgccaggctggcaacaaggggagagatgaagaatgacaggttagagcctgcctattctggctcacgaragccagcatgagtatcccttcccaactccaaattcagagacatcatgttggtagcctgaaactggccacagtcagagtatttacaccactgaaaatggtaagcactgcaatccagggtttttgtcccagagcttttgctgcttatcattcaccagctccactcaacagaaggtataattgatctaacctgggtcctgggcatcagtattttttaaagctcctcaaataattctaatgtgttgtgcctaaaagttgggaaccctgatccagatgaaggtaatttagagatcatctgctccaacccctttgttgtcacaaaggagaacgcttaggctgtaggaaaattgagtgtctgccctctcagatgtatcgatcatacaaacacaaattctccttacagtcccatctatctcttctcattaggacaagtgcttcccgtgtccagatcaaggatgcccacagatgggtcactatgctgataaatttgctggcaggacaagtgaagagcagcagaaattcttcttgaacacaggagaggctagcaatttcgctcgtaagttgcactttgactacctgcccatgtaaagaaagtatatagtttctgttacaaatgaggggcttgctttcaacctgaaatatttgtgggtacattttaattatcttagaaatggacacatttaccgaaactattgcagttacaagtaaactgaggatttagacagagtgtgcatttcttccrttctatttctgcggcatgaaatgagagcaagcaactagtataattaatgggatgaggccagtttgcacatccttgtgaccagctaccctgaattyttaccactccacagttcattgtttctttcctttttaaggccgcatcagacacacctgttctcttcattcagcaaagacgtaattggtaccagctctttgctgggctatgtcccttaagaagcccaactccattctctgctttcccctctgtctgtgcatccctgatgcccaggggctgcctcgctggtggagtgcaggcrggaatcagggggaaggatgatttctctccaaaacctgctgaatggactaagacacagggtagagactgggcatgtttgggccactttgtaccaacctgccccatgacasttccataggaggtgacccagtaaagacagaggttacatattcatataaatgtataacacatcttacrtagtttttaaagtcagatttattgaggtataatttatatttggcaaaatgcacgctgtttagcatacacttgtatgagtttggacaaatgaatagttgtgtaaacacctccaaatcaagatacagaacacttctatcaccatatatatcactctgtaatttttttttttttttttgagayggagtctcgctstgtcgcccaggctgsagtgcagtggcgcaatcttggctcactacaacctccccctcccgggttcacgccattctcctgcctcagcctcccgagtagctgggactacaggcgcccgccaccatgccaggctaattttttttttacatttttagtagagacggggtttcaccatgttagccaggatggtctcgatctcctgaccttgtgatccgcctgcctcggcctcccaaagtgccgggattacaggcgtgagccaccgcrcccggcccactctgtgtattttttttgtaagaagacattgattaawcaatccttccactgatgttgtgatgcatgaaatacttgccaatatttcaacaacaaattaaacactcaaaaaccaggtattcattcctcaatcaacatttatttatgggccacagactatgctagacactgaggatgcagggacgaacaagagactcctctcatgaaattaataatccagccaaagacagaaactgggcaagcaactacaagcgtgttgggcttggtggctgttgccatgacattatgggacagagaacctggccctgaccagaaggagggtcagggtcaaggtctctgaagacacgaaagatgaataggagttaggcaagaatcatgtctgtgtatattaatgtacatctgtgcacatgtgtgggtgtatgaatgcatgtgtgagtgtgtttgtgtatgtacctttgtgtgtatgcatgtgtttatatacgtatgtatatgagyctgtatgtttatgtatatgtatgtgcatgtgtatgtatatttgtatgtgggtgtctatgtatgtgcgtggttawatgtgtgtaggtttgtgtgtgtgtgcacatacacatgcatgtttgtgtagatgtatttgtgtgtgtgcacatgcacatgttgtgtatatgtatttgtgtatgtgcacgcacatgcatgtttgtgtatatgtattgtgtgtgcacatgcatatgtttgtgtatatgtatttgtgtgtgtgcacgcacatgcatatgtttgtgtatatgtatttgtatttgtgtgcgtgtgcatgcaggccctgggacagcatttcaggtagaagcctaagtgacagctgcycgtgcacctgctctgtgctagagactgcccagggccctggggagcagagaggaaacacagtccccgccctcgaggtgcttgccaggctgcactcccgagctaccttcccaaatgtggagacaagcccctattccctctctcttcaccttaccttactgtactgccattctggggcagagctggctaacagaactttctgcaatgaggggcatattctgtgtagccattagcctcatgtggcaacttaacatttgcaacacagckaatgagtttgagaaactaaatttttaattgtatttaatttggatttaaatgtaagcagccacatgtggctggtgacctcctccctgggcaatgcagttctagagggggatactgctaaatacatacttctccataaggccttgtttgatttgtagattaacaaatagaatttcttatactttggctgggygtggtggctcacgcctgtattcccatcactttgggaggcggacacgggcggatcacttgaggtcaggagttggagaccagcttgaccaacatggcgaaactctgtctctactaaaaatacaaaaattagccaggcgtgatggtgtgtgcctgtagtcccagctactagggaggttgaggcagaagaattacttgaacctgggaggcagaggtggcagtgagccaagattgcaccactacactccagcctgggtgacagagtgagaccccatctcaaaaaataataataataattttttagaaaagaatttcttatgctttgttgcctcagagtaagagaaggagacaagtctgggatgtaggctacttattttgtgtgtgaataaattgaactcttccatctcctgtgcaggctggagatatggggtttccatcacactgtctggaagaacagccactggtcagatcaaagttgctttgtttggaaataagggaaacactcaccagtacagyatcttcaggtaatttcctattttaacactacgtctcatttgatgatatacacagccttcaaaccacacacttaatttgaacacttatcatctctttatatgtcactggtttttaattatagtcatgcaacatgtaacaacattttagttgatggaccacatacacaacagttgctttataagcttgtaataccatatttttactgtactttttctatgtttgggtgtttagatacacaaatacttaccattgtgttccagttgtctacagaactcaatacagtaacatgtagtacaggtttgtaacctaggagcaataggctgtaccatacagcctaggtatgtagtaggctgtgccatctacgtttgtgtgagtacrtgctatgatgtccacacaatgattaaattacctaaggacacatttctcagaacatatctccattgttaagcaacgcaggactatataactttatgtactgatgttaattgcagacttctgctaataatttttcttttctgttataaacctaggcatttcgtcctttctctctcttttttttttttttttttttttttgagaaagagtctttgctctgtcacccaggctggagtgcagtggcacgatcttggctcattgcaacctccgcctcccgggttcaagaaattctcgtgcctcagcctcccaagtagctgagattacaggcatgtgccaccacacctggctgatttttgtatttttagtagagatggggggcgttttgccatgttggccaggctggtctcgaacttctgacctcaagtgatccacccatctcggcctctcaaagtgctgggattacagacgtgagccaccatgcccggcctctttctcttaatagatgtttttttaaacataaatctaatattacttcagatatgctgttttctgattagtgcaataacacatgcttattgtgccatactatgtggccaatttgttactgtacaaataattcttccaaaacatataaaatgatatgcaggaattctattttattttctattagaaagctttaaggaaaaattaacttgagttttaaaaaccatagtttgaggtgctagcatatagctggcttttccatttctccatcctttatttggaaattaattcggaaaaataatcctgttaatctagaakagaaaacagcagcctggcattgtrtggtaattagaactcatttccgtgaacagggatgtttatgtttctctatttcaagggggattctcaaaccaggctcaacccattcctatgagtttgatgcaaagctggatgttggaacaattgasaaagtcaagtttctttggaataacaatgtgataaatccaaccctccccaaagtgggtgccaccaagatcactgtgcaaaagggagaagagaagacagtgtatgtatctttgctggctggtgcctaaaaatgtttgcagagattcatgttataatgaaaacccaccctagaaagttacgtgtagttaagcaagaaaagccaagaaaatttacccatctgtggccccttctccccaaacaagcaactgacaaacagcataaaatgtttctgttgggtgcaccttattgggtgttctcagcactgcctgtgggaatacagaagataaggctgcactttcaaggtaaaatgagaaaatacaagaaagagaacaagaaatcctttctgaagggtacaagtttataagtatgggctagtgaatagctatacttgaaagaggagaagaccaattacatttcaggataataaaacggaaaataaatcggttttaggaaaagatcgaaaattttacataggacaagaatgcactaggattgcaatacttgtgagatcctgacctgtggtctccctggctttgggcctgaataagcacagggccgtgggtaggaaaaagggacrgctggaggaaagttggagtggtgacctgagagggcagagcgactgtctctcaaacctcagaccccaagtctggctagtagaacatgtggctttgtgggaaggagatcctgggctctcagccaccgatgttcttgaagtttggggttaggtggagtcaccgagttcaggtcccagagattgtcactcccccaggtggggagggtggggtggcagagtagaatgggggctgactccacatctgggtctcctcgaactggatgacttagtgaggttctccttatccccacgaggcaaggagaacaaagaggttggccctgccaggtggtgggtggaaccaggaggcctcataagctagagcatagtacagaggaggctgggccgggctggtcggsagccctgtgcaagctggaggtgcaaccaaatcctttcctccctgaccccatcagaggatactcagcctctaaattcagctccccaaggccccawtagcaagcatcccatggcctggatcctgggactgtgtggttaaaaacatgtcaggtggtggcatcattggaatcttaaaaattagaggtgttcccaggagatgacttgctcacaggtaaggcatacaagtccaaatcagccagggcattgcatcttccaggttttctgaggaaaggctgaggctttctgaactttctgcaaatggaacagaacatacttaaggctgcacctgaggtcctgtgcccatcagctgtcacctgcattccagtggctgagtgcagctcccctcgctgtctgctccagaaagactctttcttaagagcagctggatataagacatcaggttttctaaacagaggaaagtcaaaacagcttcaaatctctcaaactagtttgggaagtaaaaacactgaattagttgaattactcaaacattttcctgttatgaaaatggccagtaacatttaataataataataataataataataatgaagaagctaaagaaaatcaagattttggtccaagctcttctcagaatcccctcatattttttagtaacctcattggggtttcaattcctactaaggaatctgccgactaggattccctccaatgacacagtatccaaagagaaaggcagccctcccccyctttatttctccgtccccctctctttattaagtacctttggtaaatgtacccttgcaaatgactttattmagtacctattgtatggcctggcaaacagtaagggatgcaaacactgagcctacactcaaggagcttacagttcagctgttgagaaaaatcagacttatggttcacagggaaggtcaaaagaccaaataaagaactcccaggagaggctcagaaagacagtggccaaggaggaaagcagagggccgcggggaggctgtgatggaaggaagggcagctctcaggatgaggcagggagtaggagggaggaagggcacaggggcagggcaacaggtccaagtgcatgaggggcgacagggcccaagtgcagggaatatgatcggaggcctccgatgccaagttagggcttcttggcagaaaaaatgaaacacagaagagaargtgggaaggggccaaggaacaccagtgaggaaatggggcaaagcttccgagctcacagstggtgaggcctgagagaagtccgtggttcttgaacaaccacaaaaataactgcttacatctgcattgttttttgttaattgtaagactttttacatttaccatcatgggatgttacgttcttatcatggaattctcaacagtcgtgggagaatgactgagatggaatctcgctctgttgcccaggctagagtacagtggcatgatctcagctccactgcaacctccacctcctgggttcaagagattcttgtgcctcagcctcccaagtagctgggattacaggcatgcaccaccacgccyrgctaatttttgtatttttagtagagacagggtctcaccatgttggccaggctggtctcaaactcccggcctcaagtgatccacctgcctcgacctcccaaaagtgtggggattacaggcatgagccaccacaccaggccttgccttgctcttttgatactgtgtcattggagggaatcctagtgggcaggttgtttagtaggaattaataccccaataaggttattaaaaaatatgaggggattctgagaaaagcttggaccaaaatcttgattttctttagcttcccagttactaactacatccttcctcagagtcctcagataactagccccgaagcactcaaatgtgggagggaaaggtcatgaggaactccagggaggaacgccaggtcccccgactccagagctggaagacaaggtcaaggaaggcttgatgtgtgatcctaccatggaaaatacagcctctggcatcagatggacctgtttttgcatctttgttattctgctgattaatggagcgccctttgtgcctcagtttcctctcctgtaatgtagaactaatcatcagaccccctcacacatgtgtggtgaggatgcagtttgcataagtgaattaagcagcataattggctgcagatgagaagggctcagggcgtgttggccgctgtccccttccgagagtgactggaagacagcatccctctgtaagccaggctgctgggcctatggaggccgccaggcgcctgtggggacaaggaggtgagagtmcctgccttcggaggccaccgtcctgtgtgacactccagaaccatagcagaccttgtcctagagcctccaggcagcaagcgctgtaggcgctggttgcagctccagccctagtgccccctcgtgcctcctgaatcactcatcaactgtgacctgggcttaaccccttaagaaaaaccaaaccaaaccaaaccaaamcaaamcaaamcaaaacacctggcttttgctaaggtgacccaaactcttacaaagcttccttttctccccaggtacaacttctgtagcgaagacacagtgcgggaagacacgcngctcaccctcacgccctgctaagctcccggggcgacgaggctgctgcgttcacactaataaaatccactggtgcatctgtatgctctgggtctatctcctgccgcggccgcctcccggggatacatttgggaatggaacgtttgcaaatgtcccgagcacgtccccatacctgggtttctccccgttaactttgggtcacacggtttccctggctcctgtgcgtaggtcgactgtcttctccgtgcctgagctggtggcgatggactgaactccggagcctcagctcagggataccagcctttagccccgtccctcacttcacagggaggaaactgaggcccagaggagcaggtagctgttcaaactcactgagtgactcgctgtccccgtcaggtcggagggccgggccccggacccctatttcaaggaccctccctgactcaccgagaccaccccgagggatcgcggcaggcccgggaggaccagcctctctgaggaggtagatttgagggtgaggggacccctcgttggccctggctcttggggaggtgcgcagaggcgggcacaggtgcagggcgctcccgggcttccttcccgctcccctgggtcgaggcggcctcgcggccacctaagcacagagcggcgcggaggcggggcccagggcgggccctgctgaaacgggcttttccgtcagccaatcggctggggccccgaggagcctcctccccccccacccgccagtctggcgtccccatgggcccaacccatagagacctgggaggagcgggcgttctttcaggaggcgtttctgccccgcggtgtcccaagtcaccactccccccagggagtctctctgtggttcaccaagccccgcatcctaccccggcagtcctggtgccaacttctttttctcttttttcttttttttttgagacggagtttcgctctgtcgcccaggctggagtgcagtggcgcgattctcggctccctccaagctccgcctcccgggtccacgccattctcctgcctcagcctcccgagtagctgggactacaggcgcccgccaccactcccggctaagtttttttgtatttttagtagagacggggtttcaccgcgttagctaggatggtctcgatctcttgacttcgtgatccgcatgcctcggcctcccaaagtgctgggattacaggcgtgagccaccgcgcccggccaccgacttctgtttctaacctgcgtggccacgtcaagctatcattgaacttaagacttgaatgcgagtgggcttcgattatccctccaaagcagggtcgtggcgaggatcaaaggagcgaccttaggaggggccttacaggacagggtgcaaggcgagtgctcggtaaaccgcggtgatgacgagggtgataaagacggcggcggccagggacacccaccccttgggtggtggcaccaagtgggagacagccaaaccctctggttctctgtcagtttcagcagcatccgcagtgagcccacaccccaggcaaagaactcaatcaatggaacgtagattcgccaaacatttatcaaataccagctctgtacccacccctgtgccaggcattggcaggagaggaaatcagaagacatgctgccctcaggcagtgcttggtgttagggaggctgcccctgaaaaagcactgtgatgctgcctactaggtacaaaaagcaaggtaggtcccaggccagggaatttcagaaggaaggagcaagacaagaaggctccacagagatggtggttacaggaccaggcttgaaggaagatgtcctaccaagaccgcagcctgggaggccagctaggaggaggcggcatctgccaatacccagaattgataaggaccatctgagggtagtgactggaaccaaggtataagggagggggtgtggctggttggccatgggtgagagccctactccctggtcaaggacagtctgtctcaccatgcttcccagactgacagctatgggtgtgatgacttgggaaaaacaattttaaaataggaaggaaactgagaagagagaaactggagagaggaagccagctggggaagctccccagggctgttggccacatccataagcactcggccaaagcactgctctgaaccttggagtgacctgtggtgacctgggtcccagttgcagaggcagagatggttggatctccaggggcaggggaggcagcagatggagacctgagctggaacggggccaggcccctactcactcctcccacattcccttcctggaacctatgtccttttatcagttatgcagctggaaaaatccccaggaaggtaaagaacagcaggttccaagatcaccagtgtgaactttgactactgatcagtgtgggtatctacggtccactttctgatgccactggggagtccaagctcagccccacagatccgtagcccttacaccctgacttgaggagatgtggagtccaggactctctggggtaggcctgccctgtctttatggccctgaccaaatctgatcaggtttctagatttaaggggttgtatgaggccagcttgattggacttttctatttgtgttttaagtaacaaaagtggcacattgttcagaatgcacatggatagagtctttggggcaatgaaaatatgccatactaacattgactttattaacataaagctcagatggacatccagtcttgttggaagcaatgaaaaagggcactgagctagcatttaggattctagtcaagccaggtgaccctggacaaggggtttccacctctctggaccatagctttctcatgggtaaaatgaatgcaacatttgagccctgtctttctcatgttgtcttaagggtctaacttacagggatgtccaaccgtttggcttccctgggccacattggaaggactgtcttgggccacacataaaatacactaacgacagctgatgagctaaaaataaataaataaataaaaataaaagtttaaaaacttgcaaaaaatctcataatgttttaagaaagtttacgaatttgtgttgggctgcattcaaagccaatatgggctgcatgcagcccgtgggccgtgggttgtacaagcttggatcagcatcaccatgggaacgtaaggctctagccttaagtcagtgtgctataaggcgagcaaggccatctaaggagtgtggtcacagtctggctgcacaccccaaagttacccgaaggctgtaggcatgcagagctttggggtccctgctaggtagcaatgcttgttaaggttggctccaagccccccaatccacaccctgcayacaactccaaggtgcacgaagccaaaacacaatcaagacatgccacttgttctccatcctggctgcaaaccagagtcacctgggagttaaaaaaaaaaaaaaaaaaagaaaggaacagagaaatcccaggccccactccaaccaattaaagggtaatcataagccacaggctgctttaaaaagcccacaggtgattcccatgtgcagctaggtgagagtccgccctgatataggagtatttaactcccaggactcctgggcaggctgtctctgagaaattactatgtgtttccattttgatgataatctatttttaccagttataaaaataaatcttcctttttgttgtgataatttgtagcagaacttttgtttcctgagctgaggcttaatagaatgaagtcaataggaatattccagggggtcgtgaaagtttttttttttttttttttttgagatggagtcttgctctgtcacccgggctggagtgcagcagcgcaatctcggctcactgcaagctctgcctcctgggttcataccattctcctgcctcagcctcctgagtagctgggactacaggcgcccgccaccacgcctggttaattttttgtatttttagtagggacggggtttcaccatgttagccaggatggcctcaatctcctgacctcgtgatccacctgcctcggcctcccaaagtgctgggattacaggcatgagccaccacgcccggctttttttttttttttcgagatagagttttgctcttgttgcccaggctagagtgcagtggcacgatctcagctgactgcaacctccgcctcccaggttcaagcgattcttgtgcctcagcctcccgaggagctgggattacaggcacgcaccaccatgcccagctaatttttgtatttttagtagagatgggggttcaccatgttggtcaggctggtcacgaactcctgacctcaggtgatccacccacctcagcctcccaaagtgttgggattacaggcgtaagctactgcacccagcccgtgagagttttttttagaaagaatagagttcacatatttactggcatctgaaaaatcttggagagtatgatctggaactgaaaatgtggaacagatgtccaatgtcacaggctttgcgagcagagagagtttgacctgggacctgaaatgaaggtggaaacgtgctggcaaggagccccaggcaatggaggagaaatgaagctgggagacctgggagttggggtggagatgtggaaacattcctggcatggggaaccccaggggcaaaagctcagaagaggggaaaagcaggttcagaactgtgagtgttgactgtttgtgtccttctatgtaggcagttatcagctgggaaggcatcaagggtgttggcagaaattaggctgggcagaggtcatatgggagctgttagtttgctggggctgccataacaaagaaccacaagctgaggggcttaaataatagaaatgcattgtctccccccagttctggaggctggaagtccaagatgaaggtgtaggcagagttagttccttctgagggctatgagggagaatctgttccaggcttcttccacagcttctgatggtttgctggccactcgttggcaatctctgccttcatgttcacaggatgtatgtgtctctgtgttcaaatttcccctttatataagaatgtcaatcatattgacttagggcttaccctaatgaccccattttaactttattagcactgtaaagatcctatctcctaataaggtcatgttctgaagtactgggggttaggattctaacatatctttttgtggggcctgtattcaacccatatcaatgtccatctgctatggtttaaaagtttgtgtccctccaaaattcacgtcaaaacttaatccccattgtgacagtattaagaggtagggccttttgggaaatgattaaatcatgaaggctccacctttgtgaatgtccttataaaagaggctccagagagctgcctggtccttccatctcatctgccatgagttcatcctttgttgtccccttttaccatatgaggatacagcaagaaggcagcattttggaagctgagagcatcccacatctgacactgaatctgctggtgccttgatcttggacttcccagcctccagaactgtgagaaataaatttctgttctttataaaataccctagtcttgggttttttattatagcagcacaaacggactaaaatatcacccttgcatacctagctttggtgcttggacgccacctaaattcttacccctctccacagagttattctctttaaataaagcccaaattacatgatagctctcctcacctgccttttcttcttagtgcttttgatcatttgtaattatgtatgtatttataggtaaccattgcctgtgccccatgggaccatcagtccatgaaggcagggaaggatgatgttttgctcactgttgtgccttcaaggctggaagagctctagcacattgtagccacgtgaaaatgaatgtgaatgagtgaaccgacatgtgaataatgcatctgaagggaatgaggaaccacccacaggattcaagctgagaaggactttaggaaatgggggaggctgacctggagggagatgcagtggcctagagagaggtgatgctagccccaggaggggaagggcaggggggaatgaagggaggggaccaggcatg

SEQ ID NO: 96031 - DNA, 43799 bp, Homo sapiens
  misc_feature (1)...(43799): n = A,T,C or G
caaatgggaacaaaacggaaaaggaagcggtgccagctgtgtcctcttttactaggaaagaaaaacttcaggaaccctcagtttgccttgctctcagttcacattgcccagaactgggtcatgtgaccatcttggctagaaggatagttgcagtattagggaacaagattatcataattggcttagataccttgattcattcttttctcagagctaggcaagagatcaccctgaatataatcagagagtagaaatacgtcttgaacaggtaggtctcagtgagtgccccagatcagctggaagtagggaagtgaattctggaagccacaagtcaatgaacttgatgctgatttttgaaactttttgaaacaatgattaaacaggagtagtgtaaatattctagactataagcttgaagggaggaagtgtggtgctgtcttgttcaatgctgtctctacaataggttgggtggcgtgaagtagatattctataaatatatactgaataaataaataaacaaaagcagcccaaagaaaagtaggtcataatgagaagagcatgaatccagtaagaataattcatgccaaactacttcctttaaaagttcttgatagaacaatcattatattttatataagggaatttaatagatactttatcattagatttttgcaagtcagttaacaatgtccttacaatattcttgtagagcaatgctattatacatgggtagatctgcagctacttgaacaaatgcacccagggaagtttggtcaacgaatctggatcagtctgaaagggagcctctgaacagggactattaggaaggcagcatgaattattgtcaagaatatgaggtttagtatgagaaaggcctaggttcaaatcccttctgtgctgctttgtgtctggttgatttgggcaatttatttaattactctgagcccatttttcttatctgtaaattaaggatcataatatcttgcagcatcatcatgagaatgagccatgttaaaatgtagcaggtatactggtcaatatgtaggatggcagaacaaagattttaaaatacctcgaacatctggaaaatggcaaaacaaaacaaaatgcaatgtacacagaggtacatgtgcattactttcacaaacacagggtgtgtgccattttcataattggcttaggtatcacaattcattatattttcagagttggccaggagattgtcctgaacaaaatcatagagagggaaacagagagggaatagcttctctgctggtacaatgggtgggaccagctttttataggatctaatcagactcaccttatgaagacaggaaatctaacatctggtacaccaccctgaaaacaaaaggcaactagcttgggtaatgaaaggctgtattactgtgtatacagaatttgtagtgctgtcactcttcttgttcctaatatcaataatgtgtgtcctcctcttttttccttatgaatctggctagaggttcattaactctatggattttctcaaaaaattaactttcagtttcaattgttttttattttcctacttaaaaatttttctgctttcgttgatatctgccctttattattttctgtttttgttttgcttattttgggtttaatttatacttttttcttaaggctgaatctgagataaataatttgagatctttctttttttctagtataggtgttttagtgccataaatttctaagtactgttttagctgcattcctcaaagtatgatatattgtgttttcattatcatttagttcaaggtacttacaaattttcatttttcttttttacagcatgattttttaaaagtatgtgagtttccaaatagttaaggattttccaaatacctttaagttagtggtttctaatttctaccgtgctcagagtatatgttttatgatttggatccttatatgtgcatcaagacttgttttatgatccagaatatgacctatcttggtggatgttctgtgcacacttgaatgtttaytttcctgttattgggtggcatgttctataaatgtcaattagatcaagttgggttgatagtattgtacaagccttttacatccttattaattttttacccacagttctattagttattgggggaggggtattgaaatggctgactacaattgtagatttttaaaatttcttcttgcaattcgattagtttttgatttatatgttttgaagtgctgtattagaggaataaatatgtagaatcagtttgtcctcattatgaattgacccttttatcattataaaatgatcctctatatttctgataatattctttgtattgaaattatatgatattaatatacccacctatatttcttttgattagcattagtatagcatactgttttctaaccttttacttttacttgtcttaatatttaaagtgagtttttaaataggtggcatatcattggatcttcattttttttccagtctgacaatatctgccttttaattagggtgattacttatatgagcttaaatctatcatcttgccatgtattttctctttattctatctattctttcttttctcccccatcatttactgccttcttttgaattcattaaacatcttaaaaattcgacttaagcttctttgttgatgtgttaacaataactcttagttttgctttcatagtagttgctttaggagttaaagtatacatttttaacttattacagtttaccttcaagtatattatactgcttggtgcgtaagataagaatcttacaacagaatacttctcccttcctggactttgtgctgttgtcatcatacattttatttgtacacgttataaaccccacaaaatattgtttttgtttgtgcattaagcaatcatgttttaaaagagttttaatggctgacatggtggctcactcttataatcccagcactttgggaggtcgaggcaggcgcatcacttgaggtcaggagatcgagaccggcctgggcaatatggtgaaaccccaactctactaaacatacagaaaaaaattagctgggcgttgtggcgggtgcctgtaatcccagctactcgggaggctgaggcatgaaaattgcttgaacctgtgaggaggaggtttcagtgagctgagatcacgccactgcaccactgcactccagcctgggtgacagagcgagattccatctcaaaaataaaataaaataaattaaaataaaagggtttaaaaaataagaaaaattatttacctacgtatttgtggtttcttaagctcttaattcctttgcatagattcagaattccatctgacagcattttttttttgcctgaaagactttctttaacattgcttatagaacggtcctgctggtgatgaattcttttggcaattcgatgtcaaaatatgtttttattttatttttttgatatatataaaaatatataaaatgtacataccatatattaatataaaaagaactcttgattgataggttcttcattcagtacttcagatgctgctccaccatcttctggtttgcatttttctgatgtgaaatctgctgtcattcttatctttgttcctctgtacagtaatgtctttttttttctctctgatagcttttaagattttctctttatcagtggctttaggcattttgattgtgatgtttcttggtatggttttcttcatgtttctactgagtttgttgagctttttgggtttataagtttatagttttggtcaaatttggaaagttttcatcaattattctttcaaatgcttttttctgtcctccctaatctattctcacctcatatttctcattttcttcagggactacaactgcatgtatactaggctcactgatactctacttttactttcagtatttttcttcccttagtgtttcattttggatagtttctatcacaatgctttcaagtttttttttgtttgtttgtttttgtttttgagacagagtctcgctctgtcacccaagctggagtgcagtggcacaatcttggctcactgcaagctctgcctcctgggttcacgccattctcctgcctcagcctcccgtcaggttttttactgtttcttttttagtaatgtctaacctattaatcctgtgtgtgtgtgtgtgtgtgtgtgtgtctgtgtgtgtgtgttagggtgttaaaaatcttagatgtggttttattatctcctagatgtttggtttgtgtcttttttttttttaaagatttttcacatctctacttcccatgctcagtttattttttctacttgttgaaaacattgaatacagtcataattactttcttaatgtccttgttctcttattttatcatctctgtcatttctgggatgatttcaattggttgatttttttttctcatttcctgcttcttttcgcatgcctgataattctgtttggattccagatgttgcaaattttaccttgttaggtgttggttatttttaatttcctgtaaatattcttgtgctttgctctgggacactttgttctcaaaaacggtttattcctttggtggctggcttttaagatttctaagatagaatcagagtagcttttacattagagctaattttgccccactactgaagcaaaaccatttgagttgtgaattatgaggttttccagtcggggtgccaggatcaggcactatttctggtcctgtataatcactgggtatctttctactctgccttgtgggagcagaattaatttcctaccctgtgcaaactttagtaattgctctctcttttcttcatacatgattatttcctgcccttaggtagcttcctcacacacatgctctaatcagcggaagactggagtgagatctgttgtagatctccacagctccttctttctctgtgtagctttctcctttctgatatacaactcacagttccagctgctttggcctccctgctctcccagttctatctcttcaactcagggagtctgcctagctctttttggctgctccctctagttagtaaatcaaggcaatcatagggctcacctcatttgttttccctcctcaaggaccactgtccagcacaacgtttaaaagccattgtcttataaatgcctgtttgtttttgtttttagttgttttaggcaggagagtaaattcagtcctgttgctccatcttagctggctagactggattgctataaactttaaactatctaaatagttgcatatatttagggggtacaaatcgatgttatgacttatgaatacaatgtggaataactgaatcaagctaattgacatatccacctcaaatacttctcagttttcatggtgagaacttttgaaatgtactcttagcgattttgaactgtataatacattattatttactatattcaccatgctgtgtaacatatagtccgaagggggaaaaaagcccttatttctcctaactgaggctttttatactacaagccttatttgcttcttttcatatctcattttcctccttaaaggaaaaggcactcagccactttggtagaaattacacaacatggccatttgcaatccctgcctctcccattcgtagtaaatcctacatagtcttacagatctcataaaaagtcagaccacacacataacctgatagcccacgcgcacattcccaacagagcctggaagagggacaagctcccggataagctgaatttacacaaagcagaatgaggtacccacacacactcacacacgcatggcctaggcagggtaaccatctgtccaggcgctcacacactatctttagccacacacaggcacgcacactcgagtacacacattacaccctcggatccgctcacgctccctgaggctcgcaggccgggccccgcccccggcgctggctagccggcggccccgcgtcaatgccacgcgccggttgcgtcatcagggtgcgccactgcagctggcattggccgggactggaagtgcgggcttctgcagcagccgaagctggagctgctagggtgcgaactgccagggcaggtgtgggctgcgggaggctactcgggccgggagcgccgggacaagtgcatggaggtggtgcgactcctgcaagttgctggggcagtcgtgtcccctattccctgacacccgagctccggtcttctccctgagaaatcggtcgggctcgtgcaggggtggggatcaggattcatctctcctggggagactgcgctggggcatgggttcccctgggttggaaggagtccttatggactcagtcccctaagtatctgcacgcgcggaggcgccgccagccagcccgcctgggtccctagggaacattgaggcagtaaggggtactctgagagcagccggtatgctggagataattaatgacagcgttaccattgattggactgagcgctcactgtgtgttacacactgtggtagaccctttgtttatattattccgtcctctcaacaatccaggaggttaagagctatcattctgcccattttccagatgggaaaactaaggcatagaagttaaccaacttatggtaataaaaaatcacacagatggtaagcagtggaagatttaaacctcacagctggtcttccagcctctgtccttttcagatcctctagtcagcttctctcagcgcatgctgctggctggtgcctctgggatattgcttctttattactccttgacctagagcgaactgtgcggagggaggaagtgcaaaacgtggacctcctgttggcacaaacgagcctctttgtcctctcctcatcctctcttcacttcattttctcaggcagcagcggctcccctgttgtatggacattctgcacccgaaactgatagctgagtcctgaagttttatgttatgaaacagaagaactttcatcccaggtgcattggtttattctctcccctagcctgttatgttagattgtacttatgttaaatttttaaggacataggtggttatgccgagaataacagtgactgtagccaacccatgtggggattgtaaagaaattggaatatgccttccaaaggaacactgttaatctagacatgacctttcaggattttaaaggaataattttaggccaggtgagaaacagccaaaagcaaaaataatgtgaggctagagattatgtttgaaagtttttatattttggattaatatctattctaggagtttactcttagtgaatctttttccttagggtagaaaaaagcttatcgaaaaggatgaaaacttatacatcagatatttcaaaatagtgtgcttttctttcagagctttgtagctttgtattacctttgtattaaaagtgaaaatgttcttttaggacatcacaagaaaattaagatcttaatttaagtacgggaacttaaggggtgccctaattgccttaattaaataaacatgccttccttctgccaggaactattcaattaacaaaaatgaaataagaataagctcttattttcatttgcaaatgactattcatagctattttgtttggatacaattcatagctattttgtttggatactattttgtttgcatactatgttttgtttggatactattcatagctattttgtgtggatacaaaggatacaatgttgtatccttatatattcaggaagtcttagaatacaaatgctgattttttttttttctagtcagggaagcctaactgtgttcatataaacacatcaaagtcagtttttaccttgtgamtcaacatggtagaagtctgtcagttcatgtgatatcccattgtggagcaaagtaatgtagaaatcagaattttgagttctagtatttactctctcgattccttgttaatttaaatggtacctattttttatagcacatgatttgggaattacactttgtgacatggatgaatctgcactgacccttggtacaatagatgtttcttatctgccacattcatcagaatacagtgttggtcgatgtaagcacacaagtgaggaatgggtaagtttaggataagagttaaaagcactcagcctaaaaatgttcatttcaatgatgtttatgaaggtgcaaatactggcagcaacataatatcacatcaagattaatagctacagaaactggtatgtttatgaagcctaataaaaaattttatggcattatattgggaagaaaaaatggttagaaaatttatgtacactgattatgttagaaaacaaaataatcattttgcataggaaaaaaaccctagtagtagttttgggtcggtaagaaatttttttttctttctttctcttggtatgtactttccatgagttatacttgaaaagcatgaattttataatagaagtaaactttaaaaaattaggaacttatagtatgaattcaatccaaaaggcgtacattttcttggattgtttttcctatttcaatataacatgacgtattttaaatatcttaattgtctttatataaaaaatggtggggtttttttttttgcttaattttgagaatgttatatctgtataacagagatgtgagcaactgagctcaaagttaagcatttttagaatagaagagcaaggtttgaccctaattgaatagtatagctayaatttaagttctggtctttaagttcccttgataagataaaggaatgttatataagtttacctgttttttatttaaagtaaaattataaaaacttgctcactatgtaaggcctttatagttctgtagtgcgactgtgtgatttaaaagggggtaaggttaattgttagactagagatccaggagtctgaattgatttatctagctgtcagaagtctgtttgaccttctacaatttagtttttaaatttttgaatactgccttcagtgtgtagctattactatccttgggtgctcagcttttgcttatgtggtaagcttttatccaagtgttgatcatggagggagtacttaaatgaaaatcacccagaatatgccataagtttttcttctgttcaaaatactttagattttgagatcaagtagacaagtattctcttgccatttagaaactatatttttttcttaatatttgtcagggtgagtgtggctttagacccaccrtcttcagatctgcaactttaaaatggaaagaaagcctaatgagtcggaaaaggccatttgttggaagatgttgttactcctgcactccccagagctgggtaagaaccttactgcttattgaccctaatactcagcataaaatattatttccaactttgtagtaggcagtcttattggactaaattcactttcagaacagagacccatgtttatgaaccaaatatttcaagtaaagatgttgacacactttttctttccatttatttattcagtaaatattggtcccataattgatactaggtaacattctagttcttttgaggttttagtaggattttaagggggagagtagatcttacttttggttaagtcttcaaaggagttagtgggaaccttcatgaacttttaggtgttgaactttagcacttaacattaaaattctagcaagataagaaagagataatgggacagaataagaagttaaagctgtgactttgctctgagcctttgctaatggaaggtgtctgttgactttgtgatagtgaaagattgtcactaaaatgttagaatgaagatttaagagagtgtatatgggtttgttgtttgtattttggtgaaaaaacacaagccatgcaatatcttttgcattacagtgcagtctttgagaagagccaagtgggtgagaggtatattttcggtggtagttgaagagaaggacaaattagcacaggaacaagaacttcaygtagttgtgtttgaaggcagtagaattgccttttaaaagtcatatctggatgttaagctctctctgggatccagttattaggatgaagaaattctgccgtttaagtgcctgccatttatagaggttgcttgtaacttgtgtggctaggtaattgtgctgtgtgaattttctactcaaggttggtttggcagaaagtagaattctgagtctggtataaaggggtttactaacatgggagagatttgtgtggaacccaagcagtttatgttaaatgttcagatctgctgaagaatgtcttgttataaatattgcttcttttaaaccacaactaccttgttgcaagaatttggtagaattcaagaatcacagaaatttctagcctaggagtaaagctagttcagattaataggtcacttgaaatcaagatttaaacagaatgtcattttctttttagatctgacatctagtctaattctaattttgaatacttaaaacaataactacaatgtgttcttaagtcagagggtataggaaataatttggtggtggtaatggtttggagtaaagggtaaaggtagatagtacaacagacaattgatttttgccctactatagtacctgatggagttgaacttgatcttgaattacttccatgacatgatcatttaaaataatttgtttaaaaatgtttttattggtaactgtataatatttgctatcttttctctgaaatcgtattttccttttctctaaagagattccacttaagtagttttatatttgttgagggaacattgtgctttttcagcatttaagtgtggaacagttacctttttgcccatattgataaagctatagactatcttttcagcaaagctatctctggattatctttcaagatcacatgtaaagagggtgaccagtagacagacgatttctcattaaatggacagttatttaggggtaatagaaagaccatactctttagatcaagacataagattgaatcctaaacctctcccggtcttagtttctcacctagaaaatggtgataactcttttgtgtcagggattttgggagatttagtaagcaacaataactgcatggtacttagcgtggtctttgtattttgggaaaactgaaatctctgacattcttgtagcttcacttctttcagggtggagatgaggagtcaagcagcaaggggtactgtttcctttggttttaaggtggtttgtttgtttgtttgttttttgtttttgtttttgtttttttgagatggagtcttgctttgtcgcccaggctggagtacaatggcatcgtgttggctcactgcaacctccgtctcttaggttcaagcaattctcctgcctcagcctcccaagtagctgggattacaggcaccgaccaccacacccagctaatttttatatttttggtagagacggagtttcaccatgttggccaggctggtctcaaactaatgacctcaggtgatctgcccgcttcggcctcccaaagtgctgagattacgggtgtgagccactgcgcctggctagttttaagattttaaagatgaattttgagtttatgacattctttgaaggctaaaaagtacttttcaataaaacttttttcttcmctaagatttttgaggcaatatctgtttttatgcttgatattaaagttatcaagaactcataatgagagctcttcaccgtcaatctrgttgtgtatttatgtctacatttactttgttttatataggacaaatttttcaaccccagtatcccgtctttgggtttgcggaatgttatttatatcaatgaaactcacacaaggtaaaaagaaatttcttatgtttttaatacatctcaaaagaaaaacttcataataatcagttaacacactttaagctgaattgctttgcattactgagagtgaatagaatatgagtttctgacacaagagagattatctgaaaattggaagcagtatagccacagagagaactattactgttaccacttgtgtacttacagataatttcaggggagtgtagatgtcacttagaatgttctttgacttatattgatttgcatatgaagtatgccaaaatgtgggaaatatttgtctgagaagaccggtaggtttgaatctcttatgatttattatgactatttaatacttaaaaaaagtataaattattgaaatctgcccaatctgtagggtgttaaaagacattttctctgttgagcaaatgttgtttgagttactatttacccaagactttacttagagttcttacaatttctaggcatatggggataggcttgtaagcaccagtgtgagagaaaaaggtctttgttttatctgactctaggccaggggacagggaaggagggtcgaaaggttgtgtgaatgtctgtgaggcaagagaatcagtagccaaatgctagcagtccttgtaattctaaaaatagatacctggagtaggcaggcagataggctcagatgagaaatacttgaaattctatgaaaattagtgcaagaaatcaactacttgaagcccttatgatattacttctcataatttgatgatgagatcacatatgagaatgataatacttggatatatagtaaacttttaaaaatagaacttaagtctaagtacatgagcagatcattcccaggctgctggtctctctctctctctcttttaaatttrcatttaaatttaaatttaaaaaagaggggagagactttggtccgttgaattttttttgataagatgataagatcctaagaaaagggatctcagagtcttccttatgtaagtagatattttatatataaagccaagaggtttgtttcttgccctcaattagagacagttaaggaaaatcgcatttgctatgatgacgaggcagaatgaaactattcagtgaaataagctgcatgttcagctatttacttcttctgtgtattctatgaagcaaagcctaaaacatttttacacattcacatagagtcacacactctgtcactgtcacactcatgcacatgtgcgcacacacacacaatgctttcagtcagttgcaaagggatttcatagagagcttggactttgtacataccaatartatttctgaaaatgttgactgaaggaggagtttaggattaacatttaatatattgggccaaatttttggaagatttagacaaaggaagggaggaagaaaaagagaatggcaggaaggagaggtgaagaaataggtgattcataaacagttctctttcaagttactttttctctattgagggtattctgggtctttkcagagttactgaattgataataataatgtgatatcatgtaatcattacaaatgttttcaaagtattacataatgaaagcttgtagcattcttattctgaaactcatctctccatcctcccatctaaacaccacatagtcatttataactgacaggaatatgttctatccctcaggtgtatttaaaatgtgaagggggaaaaagtgagaaattctggcttcgttagcctagagtacaaatatttagatcatgcttgacttctttcaactgatctgccttgtcaattcaattagagaatcagtgattatcttaggaaaaaacaaacaaaaacttaacaaaaaaaattagtctttgatcataggaaaagacttccaaatttatctttttatagcccatagctataaatataagctgtatggtttatcagaatagatatagcttatatatagcattaaacatttttgcctttttaatggtattaataaagccagatgttcttatttcttttgttttcatattagggttattcggcacagtaacactattcaaacattaatacacaaattccaagtttcagttttagctgagagtacatgaataaaattggctgcacaacattctgaactactaaggagaatttgctgtaggagaaccctaaatctcagaaagagakgacattaggctttgtttttatgggcggaaaattagtttatgatttaagcaacttgttttaggggtacctctaatacttctctgctaaatcattttcacagacaccgcggatggcttgcaagacgcctttcttacgttctttttrttcaagagcgagatgtgcataagggcatgtttgccaccaatgtgactgraaatgtgctgaacagcagtaggtaagggcggggcaaggtgtaaaggtgggaagargcagggatgggcggtaggagtgggagggggaagtaattcttagtaacctttagtttctctgggactgtgtctcaagaagtgttcacatttccaaacattaaatgttaagctccamaggaaactaaagaaaggcaggagaacaggtgctttggtgacagtgccatgtgggaatagcagccttgttttatggattaataattgaatgggtttctaaaacatgaaaggcaaataagagktcagagatgcacatatttccagagttctctgctttctgtaatataaatgttggagacattgtatttcctattttatagccgaaagagaattgagtttgatatttttgccagttactgagtatctaggtacaaattcttgtactggaaagtcattgctagaaatcttaacagaatgaattactgcctttgctcttacaggagcttgcttacaataggaaagactgattggaactcaggtggaatggggaaataaatattctagaatatgggagtttgggtgaagatgttccaaactcccgtactctagaatattgattctagagtactggcctcattggtgtggccagtttcagagatctacctggatttggggagcaggagaccagggtgaattaaaaggctgctttaaattcataagtgtcatctgtagactcttcgttatgtttgttaaggcctgaacaatgctggcacataatatgtactcaagaaatacttctcgaatggatgagtgagtagttgataatggaggtgcatcagtcatggtaatgacgtgtagaaacattcctggtcagaatgcaatgaatgctttttagggaatagacttggggggcatcagtgtcctgtggtattggtctttttgtattagtgaattatggggctatgtggaattttgctgtacttcactagtccaaaatcagcaccastgggataaaacacaattatgtgaaattcttagattattatatattctgttttcttgttaaaaccttcaagtacatttatttcatccagatgttttgactagtaactgggatgttagaagtggtttaaggaggttgaacctcatgctttctcccctaagtcagctggaagatttataaaactggattaaatgtttccttttatctcactgcttattattctgtgctgtgctcttttgatcttgagctgtgccttttaaaaattactggtttgagttgaaaaaatttgtaaatatttatgaccatttttggtccctcccagagttttacatatagttttactaatggagtcacaatacaaattaaaagtaaattaagtcttcaaaagaaaaatcacacattaatttggtagtagacttttggatacctctgaattatatgcctaaagggataacctttctttttctctcttctgctagagtacaatttcgtgtccctcayactttaatgggaacattcaaattcacccagtaaatttgaattaaattcttagtctgctttccagattcctcagagattcattgatttaggaatatagtattcttaatatttaatagatagccagaaagagcacttctagcttgagcttattctttcatgttaccgcattttaaagagaacatacattttgttttgtgatttacagctgcagtttagaaaatactgaatacagaatgtagtatagaaacaattacattgtctctttttccattttcataccagagtacaagaggcaattgcagaagtggctgctgaattaaaccctgatggttctgcccagcagcaatcaaaagcmgttaacaaagtgaaaaagaaagctaaaaggattcttcaagaaatggttgccactgtctcaccggcaatgatcaggtattaaaaggcaaggcagaaagctttcaatcacagccatgctgatttgagcaaataagactgaattattgaactttcctagcacagttctctttgtccaaaagatgttttaatgaatcctgatattaaattaaactcttcttatattcttattcagctttcgtgcaaagtagcactgtggtaggcttgaaggtgccttcatatctgttaattgatagcagccaatgtattactactaayatctgctcacctagactgcttgtgaatcaactttcacgtatctgagtcataaaaggagtggtttgtgtacatcagagggatcattctgctcactaaatattcattcgccttggtcatttgcttctgcagtataaaatgttattagagtgaactatgactgtagtctataataaatggatacttctgtaagtagwatatatatatataattagctctagttcagcaattcagacatacrtgcatgcatgtgcacacacactaagtcatttacaagtactttgaggttgtaggtccataaatttaagtagacagaagtcaactgtatgtgcttgtatgtaaaaataacgtgtgttcatttatgttgttttttktgtttgtactttgtttcagactgactgggtgggtgctgctaaaactgttcaacagcttcttttggaacattcaaattcacaaaggtcaacttgagatggttaaagctgcaactgaggcaagaatttctgtgaatctattaccccrttttcccctcaattgtagagtggttttagggttcttgtggaaatgttttcttgtgtactgtgatgtatttcaacccatttggaagatttccctcatttatgataacttcaatagctgtgtatttggggaggagaaatgagatacaggagtacttactagcaatatgcaggattccttttgtaagttaccttgcaacaaccctgaaaatctggtagaacaatccctattttgtagatgaagcaatagagacacagatagataaataggttgtctcaagtggcagataataagtgacttgccctggatttcaaatcaaaccaagcctgactccaaaacctgtgctctttttatatcagtggagctgcttctcagaaagggtataggtcaactggaactcttgattgctcttcttcccccaacttatttctgttgttatagttgctctttttctttttagctcagaaagtattacattgaaggaagttcctattattggaaaatgtttttaaagagtgagtcactgattagccagtgtttgagtgactctagccaaatatgcagttgcaaagtgtgattgaattttacatttgagttttaaatttggcatttttccctttgctagacgaatttgccgcttctgtttctaccagttcatagatcccatattgactatctgctgctcactttcattctcttctgccataacatcaaagcaccatacattgcttcaggcaataatctcaacatcccaatcttcaggtaagatgagcttattttggaatttaaggaattaaaaagattatgttttgaattttaattttttaaattatagctttcgatatgttattgtaaagatgacattagccttttttcttttattataaaagtgatacatagttattgtgtaaaatttggagagtgcaaaaatgcattaagactatcatcattatttatatattttatatgggatacttggtgaactgtgactacctaaactttatgggcattrtttatcaaatagataaaaggcaattagaaaggcaagatagcaaattaccataccaggctcagcagtagggagttgtttggtggaggagggggcagtgaagtgggagaagggttagtgatataaagacaaccatacctgttactttgacctcataatttagtagagctagaaccacttaaaaagtacaatatcatgtgaaaggtatgttttagaggttttcaccttttgaaaggttttttagaggttttcctcaatgcgttccattcaggggaaatagtatgtgcaaatgcggagagatacaggagcatggtatggttgggaagtgatggacaattgggtaaggtgggaatatgggatgcattaggaaggatcagagactggaggtggtagctgtgtaggtagtgaaagctggatcaaaacaatttctaagccaagagattagagtctgtcctgtacttgagaaatgacatgttcaggtttgtattttgaaaggtcattctggattagaaagaatgaaatcaattctgcttccattaggatagttcaggcagaagataatggaggtttaaattgtagtattgtttttggacaggagggcatagatttaaaaagtacttagtagctcgaatttaaagacccagtgctagtccctatgggggctcaatagagggggagaggaaggagcaagattcccaggtgtttaccacctaggaaactgggtaggtggtaggtctgatcaccaacaaagaattggtgaggaactggttgagctggtttgggaaattaaaagtttcaaacctgaaaggacaaagcatctctaaggtcagctctgtgggtagagagtggataaaaggagcatgaatttagaaagagactggaaggaaagtgggctggcaggttgtgcaggtggagcttcacaagatggccttcgtcacctttgtgtgctgtgtcctcagtatcacagtctaaggagctccttcttaatcccttggttcagagttctataggctttcagagttctgtagctaaccagactcttgtgacccaactgaagagaagccatggattcatgcagtcagtgatatttatccagctgtgctttagacaagagagarcaaaatatatagtccttgccttcacatagcttaatggataatgtagacagacagctagctgtaatagcgtgtgatatgattctacagggtagatgtgcttttccaggaattagaatatctgtgtttgctctccaggggacctctctccaggaacaaggaaccgggaaactgaattagaaagtcatcaggaagtttctggtgggcacagacttagagggaagaggactattccactggggctctagagaagccttgcttctcttgtaattagaatatttcctatacccatttccttcacatttggttctcaattaggatttcttggaactgcttaataaacactgataattttttgtaatccaacttccctttcatggactctatgccagtgactgtgtagctcacctgkccttcagacacagcaggctgtagttagcccagcctgtttttgtgcagctttcttttgttacatgacagtctacccattcacaaaccacttctcaggtgttatttttgtggatggctcatctcattcattttattctgcagagttttactctcaaagagtgatactaagctttggcaacaccttactgtggcctccttctatttactgtagagcagtggtccccaacctttttggcatcagggaccagtttcatggaagacaatttccacagaccatgggggtggggaggatggttttgggatgattcaagcatgttacatttattgtgcactttatttctattattattactttgtaatatataaagaaataattatacaactcatcataatgtagaatcactagacggtcccaactgggggtgataggagacagtgacagatcatcaggcattagattctcataaggaatgcacaacctagatccctcatgggcagatgtgcagttcacaataggatttgcgctcctatcctatgagaatctaatgctgttgctgatctgacaggaggcggagctcagagggtaatgcaagtgatggggaatggytgtaaatatagatgaagctttgcttgcttgcctgccactcatctcctgctgtgtggcccgsttcctaacaggccggggaccggtattggtccgtggccccggggtttgggaccactgctgtagaggataccaaaaatatatattaatgtttatgttagtatcactctacttgaaaagaataggaggctgtgagtttggaaagattgacttagacagtttcaacttcatatcaaaattagtgttgtagaaagagacatagggttaggaaaagaatcgttttatgcctgtgtatgtgcaaatgaagcacatttttgtttcatgttttggaaagatggttatgcttggtttcagttggataaaattgtttttgtctcacaaggatcctctgtaaacaataattatttgagaaaatttcccccaaggagctttcgtaataaacatcatattcattttgtagtaaacatgccatgcgcaaatttcagaatgtctaagggtcagtgtcttgagaccctgggcaggattttaaaatttagaagtgttctataatcctcttaaaatctatactatcatttttacgggtaatatgtcatgcaaactccttttggcttggaacagatataatagaggctcattatacacagtgatatcccaaagackgatgaacaatgtaaatgactgaaacatgtcgataatatggaaaatgaaaaaaatgcctgcatttttactgtcagctgctcaaacggcacatatggcttgtatccacttggcaaatgttttcaattaacttggaatgtgagtattctttttacatttttctttgtaaataattcatgtattctgaatttatagtaccttgatccataagcttgggggcttcttcatacgacgaaggctcgatgaaacaccagatggacggaaagatgttctctatagagctttgctccatggggtatgtgtgatctctaattatccttagggacattgtgttggttatcacagtggaaggaaaaatgactcttttgagttgagatttttaaaaactgctctttgagtaactggagtgattattgctkgagtttggtaatttgttgttgttgttgttgttgttattaccaaaatatagcattggaggagctgttttattagtgtgaataagatactttgtcagtagtgaagttatygttttttctgttttgcttttaaagatttaatttttctgagctcattctaagttgagtggtcttgaatgtatgttttactttcttcttatatcccagcatatagttgaattacttcgacagcagcaattcttggagatcttcctggaaggcacacgttctaggagtggaaaaacctcttgtgctcgggcaggacttttgtcagttgtggtagatactctgtctaccaatgtcatcccagacatcttgataatacctgttggaatctcctatgatcgcattatcgaaggtcactacaatggtgaacaactggtaagggtacctacacaaaagttttctttgcttatcaagtcttttagatttaacttttagaatttacatttgcttttagaattaagaattttttttggtactccctatgtttaaagcactgtatgaaatgtgattggatgggcatggtgagtagctttcatgccctatctttaacttgattggtagtgcttatgtggtgttttcttgagcttggcagaagtgacctggttagatttatcagtgccgaccttggtcatgggattgggaagtgggagaagacttgccaccgtgttgccatctctgctgtggaaggttatctgcggtttgttctccccagggcttaatgaatatgtgcatattttaaattgggcttgaagaacttgtggggtcatgttggcaaaaacaccwacagattaatttgagaggtagcaatgactttttcagtatacctttttattgaagtataatagttacaaaagagtatataaatcataggcatgtagcttgaattatcacaaagtgaatacatctatgcaactagcacccagatcaaggaacaatattaccaggacctttgaaaccctccttgtgcttctcctatcatcatccccgcaagggtaatgattaatttcatttcttacagactgggttagttttgcatatttttgcacttacgtaaattggataacatgtggtctgtacgcatctggtttcctttgcttaagcaggtgtttgtgagattcatccacrttgttgcatgtagtctattccttctcatagctgtgtagtattccagtgtatggtataccataatttattctactgttaacaaaatgtttggctgtaaycattcttggatattttttcttgatgaccatatatattcattttgttgggtatgtgcctaggagaagaactgatgggtcttaaaaaatatgtattttcagctttagtaggtactgccaaccactttatcagaatggttttaccagcttaccactccagtcagcagttagagttcaagaggaatttagttttgttcttatttattgtggaaattttggctgaggtacttatttcaagcttacggctccagacatgtcagaaattcaaggacgtctgacaatcagaggctttagaaattaagtgataggcttacaaattaagtgatatgatctgtatgacactcttctccttgtgttctatgaatctgtccttgatgtataccctactcatcctgactgtgtctcacgagttcatatctgagtctgtgaccgttatatgtcctgtcattgtgccttatgtgtaatagatactaggtatttactgaatgaatactcagctcaaaggccactgtaaggctggatttgcaattacttgcctaatattagacatttagactctggtgatcatcagacctcagataaatggcctctttgatgttttattcttgtttaagaaccacagaagttttccaggctatgtcattttttccttcattagtttgcaattgtatttttgtgaattgtgtgaacatgatactaaatgaaatagtattaaatgttttgtttttcattgactgaattccatctcccaatgacatgattacatctttgaatactaaacgttttctgacaggccgcagttaatgawtrcctcctttccttcttcattcattgttcttcttcaagatraacttacagtttccataaaacaagttattctgtggataatagaatgtttgtgtatgtgttggctttatttctcaccatgttattctcactattggaatttagggcaaacctaagaagaatgagagcctgtggagtgtagcaagaggtgttaytagaatgttacgaaaaaactatggttgtgtccgagtggaytttgcacagccattttccttaaaggtgagtgtctgttgaaatgaaaccatgttgaagcatctacctggagtcaggaggctccagtgctgactcttaacagcacctctctgtgtgacttggggctgcagtttgctctcctgtaaaatgaggactatgataaaggtggtgttgyctaaatttttccacaaaatttgcctattgacaaaggagagtgagtatctgtttttgggagatatcaggctcracatttattgctattattatttttttttaattcatgaccatctaaggggaacaaaaaacaggtagaaggaataagttttagtatttgatagtacagtagggaaattatagttagcagtaatttattgtatatttcaaaataactaaaagagaagaattgtaatattcccaaccccccacaaaaagctaagtgtttgaggtgatggttatcccaattaccctgattttatcattacacattgtatatagatatcaaaatatcacatgtaccccaaaatatgtacaagtattatatatcaattaaccccaaaagtcaaaaaaattttgagatggatgaatgaataaatgaataaataattgtaaaaaaataaaaattcatgggaatcttgcatgtgcctttataatacgtatttatatcttatgtttcaaaattgcctttaggggaaatttttccaaacacctcccctaaaagctgggtaactttttttttgagacggagtttcatgttcttgtagcccaggctggagtgcagtggcgaaatctcagctcactgcaacctctgccccctaggttcaagcaattctcctgcgtcagcctcctaagtagctgggattacaggtgcccgctaccacacctggctaatttttgtatttttagtagagacggggtttcaccatgttggccaggctggcctcaaacttctgacctcaggtgatctgcccgcctcctcatctgcctcccaaagtgctgggattacaggtgtgagccacttcgggcagccaaagctgggtgaatttgacaggataatgctctctatgtcctattgtgtagaatccagtacccacacatcccaaaggatagtgccatcctcattgaaagtctgggactggcaggtccctgaggcccttgctggtttaaattcttaaggtattcaaattgtaaaggagaaggagaaaaatgggtacagaagtagggagcccagggataaggagcagaaggtcccgcctctccttttattctacttcctggcttaactttaagagattccagctgctgtggtagatgcttgctaaccttaaatgctttgatcttttagaaccttatcatttcttgccactttctttctctttattttttaaatggtcacatagcttctctgtcttgttatgatttgcttttagattgaggttcttttgaaaataatgtgacccttgggttgccagatttttttaagtatgattatgtctatcatcactattaatgatattaagaatgtcagttttatgatgatgtgtgagaaaagttaaaaatttcttttaattttaaaatgattttgtttaagcatcctattctttgtgtcttcagtgttcaagttcagtttcatgcttagcagcattctgtgaatcattctggacttctgaagacagtttaggatatagaaagtatttcccatgctctatagcatggcttatttcataaacaactcccttttaacctttggaagatgaaattacattttatatgttggtgcgaaagtgagggtaaatgatcatgttgtgtttttttctccaggaatatttagaaagccaaagtcagaaaccggtgtctgctctactttccctggagcaagcgttgttaccagctatacttccttcaaggtaaaatttgtagaattgtttaatgctaatcaagctaccaaacatctgttatttcttgtattgcatagattaaccttattaaaaatgcgcacattcttattttcacttcttaagtaacttttctcttagtccaataagggatattgagatgacatgttttcatattagtttggaagttttyaattatttgcttataactttttgattttgtgactcatataggagttcytaattgatttatgctttttgaatgcttgaactgagtttttttggtagtaggttatgcatattgtatgtaagtgaaccatatgaaagaattttgctgtttgaatttttcrgaattcaaattgaattcaaattgaattttaacttagagaaattgaatatgaagcctttcctttaatatgtggaagtgttgaattttcagaaatgttttaaaataaggcatcttgaattatgtattctttctgccagtggttttggaagtggtgtatcaacagactatttagtcataactaaataacatgttttggccaggccataatgtagtatattatggaggaaaataagccatagaaataatctgtttgtggtttaaatttaaaatatatagtaatttaaagtatctaattcatttaaagatcagttccacatggtttgccttgtaaaagagtgcggttgtgtgttsatttttgaaacactttttagacccagtgatgctgctgatgaaggtagagacacgtccattaatgagtccagaaatgcaacagatgaatccctacgaaggaggttgattgcaaatctggctgagcatattctattcagtaagtagaataccagactctttaattctacaatttagattcatcatggtatggtgcaaactatacagattttggaatctgctgaggttagtttccacttctattaattcacaggtggtgataggtaagttattagaaagaaggtgataccgtgaggatttgagataattggagttaaacatcttatacagtgtctggtaattagtaggtgttcatgtggtagttgttgtactttttaaaaatagwtattaaaatgatttgttgcctctgttgctcattaatgtgttttatttgaactacttgaactaatttgtggtacaacgtctagatttatagttgcatgtccatttctcctttgaccccatgagtttttgtaatgcagcaaatatgagtggccttgtataaagctttgccttagccgtggagaatacaaaatgaataattaatggttctgaactcaatgagcttatgttcttgtcagtgggatggttatacacaaataattaaagtgaacctagagaggagaggagtgtgagttcactgcaggaccagtcttctttaagttccaagctgtacaattgtgtactgttgtggaggctgctttaaaatcccaaggcagcacagtggttctttggtgctcagcctagttgtgatttctttcttgctgctctctgggccaggaccctgatgatactctccgcaccccctgccaatgctactggggaggycttcctccctcaccttgctcctcccattctggaggcccctattcctgcttgactttgggtcagaggattctttctcaagcacatttgattatgtctctatcctgcttaaaatctggatacaaaaaataataccttattgttaaaaagtttgaaaataaagatgaaatagacagcaaaaacccattacccaaataaccagtggtgttgctgtgtagtctctaaaaatattttttacagttttgtattgtgcagctttccatttataacacaatattcatatttaaaaattctttataaatatttttaatagctatacatatagtactgagtacttttttttaacactggagacgacttcagttaccagtggtgaatgaagtattcttaaatttattgttatcttagaaaactcacaaatgttatcgtgatttaagattattccatgggtgttctcagatttgatttatataattataattttatgcaaattcagtgtaggggtgtgcactgtagtcattctcaaatgtgtgtctgtgcccttccttcttacctctgggtcaggttgaaagaggaaatacaaatatgctgagcacccattactgtggctcctgtgccgggccagtcattttattctcatgtggtctaatgagctaggtaggattttcattttatcagcaaggaaggtgaggccaggaatttaagtaatttgccccaagtcatgaagttagttagtgagtaaattaggatttgagyccagatttttctgacttcaagtcagctgttatccttctactacaccttckttttaatayggtgaataccagcaagaagagtgaagyagagttgtagttataatagactgtaggtgggagcaagtaaaggaatatggaaatgggagatccygtagaactaaaacagccttgtactttgggtcttgatatttcaataaaagtgtctcttcgtcattcagtaactaaattccactggcctggattgaagttggacctgtcttacttagcctgttgtatgatgaatagtgatctctaatgaggttccattataccagaacactgtagtattataacttccttttggtaaatcacacttatgggaaatrtgatagaagactttcacagttttaaatactcctgtttaaaatttaggtatttcaaaaaagttcagctatgtttgtaaaaagtgcaactaaaaaaagctttgtgtttgccttccagctgctagcaagtcctgtgccattatgtccacacacattgtggcttgcctgctcctctacagacacaggcaggtatgtctgcaatgtcacctgcagttaagtaggaagcaggagaatgttttgtcagctgctcagatacataytcaggggcagatttggcccactcatggctagtactatgaggtaaacagtaaaataagctgaggaccctgcccaaaggagcttatcaacttggtggaggaagaatctacatttaaaaacaaaacaaaacagactgcttaatatatatagtactaagctattgcttgattaatactgttaatgtaaataaggtctawctcattaacatgtggtatatattctgaaagcaaatgctttccaaatgaattgactggcattttagaacccaccctttatcctcccaaaatacatttgtctgagctttatgatggaagagaccacaccagtcttgttcagtcatattctcaayaccaaacagtgccaatatatataggcaccaaataaatatttgccagataaatatttaaaatgaaggaaattttgctaaaaaataagcactccttacttgcagatggcttttttcctcccccttgtgatcttatgtgtgcatatcatgtgtcatggctagagtgttcactagcatgtgtaataccttgacattcctggaggaccagctttttaagtagttttctgactcgctctgcattggtgttctggccctacttctctatgtgctagcagtgagctgcaggaaagccaaggcaagaagaaagtcttggaatgttggcctctcagctttttggaaagtaggttttccaccatcntgataccgtttccatctttctttagggaattgatctctccacattggtcgaagacttctttgtgatgaaagaggaagtcctggctcgtgattttgacctggggttctcaggaaattcagaagatgtagtaatgcatgccatacagctgctgggaaattgtgtcacaatcacccacactagcaggaaygatgagttttttatcacccccagcacaactgtcccatcagtcttcgaactcaacttctacagcaatggggtacttcatgtctttatcatggaggccatcataggtatgtcagaccttgaaatattttcagtaattttcatggaaaataaaaaggcctaaaacacatagtggtatctgctttaatttgggtgatagccccttgcttgagggaatgtggctataattttagttttcaaacgaaaatgtaatctcctgttatatcactgtttacaatgagtagttactgaattaccgtttgtatagcattacccttatttttcaggagaggtagagtgtcttgctatccaggagctgaaaatctaactgagatgagacatacacagagcagcaaagtgagtggagggcctcatttgtgattaagagaaaagagaggaaggagagaagagggggcttatgtctttggagaaggtttttgatgcagttgggatcatatggaatcataagaatttagtcttatgggatttacttaaatttctccaaatacaggccattatttttgatgtattaataatctcttaaggttattcaagccagttgaagtttttcttggagactttgagctggcaacttcattgttgcttttcttttcttagcttgcagcctttatgcagttctgaacaagaggggactggggggtcccactagcaccccacctaacctgatcagccaggagcagctggtgcggaaggcggccagcctgtgctaccttctctccaatgaaggcaccatctcactggtgagtgaagacccttcagtgttgcctggtctcttttcttgagcgttttcatgaaaacgtaaccccccgtdtttttctgttagataatgtttgacccattgttgatactttatattccactcctggatttcagtgaccaccaaaccaatatgtcatttactatcttggtttgctctctgggtcactgctccactgaatctatcctgcagctatgagccatgataggacagattgctcaatgttctcaggcagtcacatccaaagctagtgagcacgtattgtgtgtgaggcactgggtcagtggtttgtaaataattaacacacccacctgtagatgatggaaccacagatggtaagagtcagaagcagccttaaaaatcatctgctcggccaggtgcggtggctcacgcctgtaatctcagcactttgggaggctgaggcgggcagatcacgaggtcaggagatcgagaccatcctggctaacgtggagaaaccccgtctctactaaaaatacaaaaaaaaattagccaggtrtagtagcacmygcctgtagtcccagctactttggaggctgaggcaggaggatcacttgaacctgggaggcggaggatgcagtgagctgagattgcgccactgttytccagcctgagtgacagagcgagactccatctcaaaaaaaaaaaaaaaaaaaaaagaaaatcatctgctcaacacctctcaatttacaaatgaggaaaaccaagcccagcagtactaatgagcatttatattatatacccaaacacttttaggcatttatcatgagacatatgtattaagtagtagatttccttcttctcaaagtcatcaacatgtagaattcatattttatttgaattccgatattttcttttgtatgaatgtgtcttgagatgttgacgagatgagtgcatgtgttaggagtaccgccccctccatgccatgctttgtgtgaggtgtgctygtggtcctgttggggaatctgttttgcatgaaccttgggtggtgggatggaagggatgagggcagataagacttccaagattgaccttgtcctttctctggtatttatttacttattccaatgttgcctttcctcaatcaccacttttgtgtacagtatttattataagataactattgcagagaaattgtcttataaagtaaaagaaatagatggtggggggctgataagcagtcttcagagggctttccacactgtgggtgtggggagagaattgagctcaggagtaccccttgcaggtggtgcagtgttgggtgctctgccaactttaagtgacagaggtcttttcttgggctttgtccatgaccgtgtgtgtatcaagacagtgggcactgggaatcacaggacttgctcagtggggtgatggaggtaacagaatggaaggctttggcagctaccttgtaccatgttttctgcgtttaaaaaaagaagtataaaatggtggcatttatatttaaatgaattttcttttcagccttgccagacattttaccaagtctgccatgaaacagtaggaaagtttatccagtatggcattcttacagtggcagaggtaagaggtagagctttcctttatttgtctttatacttactcttcattcccttaccttttctacaacttatttaaaccaataattggccagccatggtggcatgtgcctgtaatcccagcamtttgggaggtgaaggcgggtggatcacctgaggtcaggagtacgagagcagcctggccaacatggcacaaccctgtctttcctaaaaatacaaaaattagctgggcatggtggcacacgcctgtaatcccagctacttgggaggctgaggcacaagaatcggagtggtggaggtttcagtgagccaagatcatgtcagtgcactccagcctgggtgacagagtgagactcagtctcataaataagtaaacaaaccaataattacatttggtatatagtcatgttcagatgtagagaagcaaaaaataagaatggggagaataagtgtcctttgggattatttaatattttggttcctatttgtaagttgtgttgtctaaaacatatcctgacttgattccgtgacatccagaagtttgtatgctaagttgagaygttacacctatcagtatgcttgcagcttgcacatctgcagttttcatttttgagattctattttaattttggtagatttagtgtagaggagatggcctggaaaagtacatatcaatttagaacatgtgggggtacttttatttgatctttctttctggtagctctcccctcccacctgccctttcttttgtctcctgctgtctcctgactgagtttgagtttggaagggaagtggactgacattatgagtggctaaacagagaagagccaggaagggtcagagaagaggactgccttgtcctggctccactgggcagttgtttgtgtgccagtgcatatttatttactrtccatcatctccttggcctagcacgatgaccaggaagatatcagtcctagtcttgctgagcagcagtgggacaagaagcttccwgaacctttgtcttggagaagtgatgaagaagatgaagacagtgactttggggaggaacagcgagattgctacctgaaggtacttgggtgaagaattctggtggatattacagggatatgttgaggtttatgctgcagtgagatcagctggagtcctggtgatgtcttcttatctaaagaatcccccaactagctctggtaccttctgtgtggtaaagacactcaaactgtttgagttgaattaatagcaktttaagtagaaaaggaaaggagagtctgaaaagtcaggaagatgaatgtcataggtgagactttcaccatccttttatgaaatacacaggtgcatacctgtttacctacacctgcacccctcatgaggcagcagttttgctattgagctgccactgacctggctgctctttttgagtcactcttgctgtccctcccaaaatttcatatattaagctctttgctgtcaattaaaacaaataccattataggagaaaattgagattaaaaaaaaagtccctgatttagaaaaatcaattttgtctaatttataattttagaacttagtaataatgacccgtcttttctgaatactctaagaggattactcttttttgacatttagaaattgtcttctttttcacttgggtggtattagtttagtttcaagatggggcagtgatcttgctttcacactccagaggggcttgaccgaaccagtgtgttttgggtaggtacagtgagagcctctcggccataaagcacygccgtcacrgtggccatcattccccacagtgctggactgtgggcaaaggccatttaggggaggcagggaataggtgctgcagaaggagtgagataatcttggtggtctcccattggtctttctgcagacttgagtgactgttgagcccaggcttcaaaccatggagggcctggtcttaggagcggctatttttagtgatgacagcgtatcacaagtagggcattcatttatgaaaatttcttctaggtggctgttcaatgaacacaagcctcaaataccataaaaaagtgaatgattacaataaagaatgtgtttgaaagccagcagttgtttccagcagagattctctgcatgaggggcagggggccgctttcatgtagtgctgatgtgagtggccatcttctcacgttactggctctccagagaaagtcctctgtccacttgccttgtgtctcttgtcccttcctcatgacttcatctcctgcttttgcacactcaggtgagccaatccaaggagcaccagcagtttatcaccttcttacagagactccttgggcctttgctggaggcctacagctctgctgccatctttgttcacaacttcagtggtcctgttccagaacctgagtatctgcaaaagttgcacaaatacctaataaccagaacagaaagaaatgttgcagtatatggtatgttaagtcactatttattcttttaaaatctttttttttttttttggatttcagaaatttgctaattgtagaaaattggaaaaatgcaaacttatcctgacctctaacaccgtagagtattactattatcttctttggcatgttatataagttgaatgatacagttatacactcttacatctggcttttttcacgtaacgttatttttgagattcatacatgttgcatatagttgttcctttgttcttgttgtgtagtgttccattgtataaatatttaccacattttattcattctgctgttgatggatatttgggttgttttcagttcacagctgctttgaacagtgttgctatgagcatatttgaatatgtcttttggtgaatatctgtgcccctatatacagcatgtatgtgggaacagaattgcctggttgtaggctctgggtatattcggctttggtagataccaccaaacagtttccaagggattatacctacttgtactcccacaacagtgtgtgtttcacttgctgcacatcttggccagcgctccgtcttctttgttttaggaggtgtgattggggtgggagtactattttatacagttgtagtttggagctgaaactacttgaatcactttttagagccaaaaggaatctaatctaatcacctcattttatagttgaggaaaataccccaggtcacactgctaattaatgggtaatctcgggatcagaattcttgtttcctaacctcgaggcctgtgctttctctggttccactgatgtacaatcatctgtgtaccactgggtagcttaaagaatatttatacactatctcatttgattctmacaacagtcctggaaaatggatgttttaggtatttctacttccctctgttctccctatttctctctctacaccctcttttctttccccttccctttcttatttacctcaatataggacaaagtaggtgtaagcaaagtaggtttaacagcaagtcatctgagaactcacaggttgccagtggtggaagtggggccccacccttgtctgctgacttgccctcattctcttcctmgctccccatactttcttactgtggctgctgggattgtcatgatttgttgagcgtaaccatttgacagggttttattctctctcttcagctgagagtgccacatattgtcttgtgaagaatgctgtgaaaatgtttaaggatattggggtaggtgtccaccatttatgktataaaagctatctcaacttctgttctctttagatctagtctgtttgagctacctttgtggtggggtggacccygagagaagcagtttctgctggcttaatgataaaggcatttttgggaacggggcatgtaggatgggttgggctatgttgaaggtgaagcccatcagtgtagatttatttgaatgttctggaattttactggtttcacatttattcccaagctgctatatataactggtatcaatatgtttcaaggtgctacaggttgaatatcccttatccaaaatgttgggaccagaaatgttttggatttcagatttttttgggattttggaatatgtgcattagacttacaggttgagcgtctctaatccaaaacccaaaatgctctgatgagcatgtcttttgagcatcatattgatgttcamaatctttcagattttggagtacttcagatttttgattttgggattaggaccacaatcttggctcttaattattccatatgatttttagttactttcttgtatttttacaagaatttctagaagtatcctcaggtgtcctttaccttcatgattcatggggaatgtaagttctatagagatactagcggccttttgtgagggactgtttgtgactttattctaagtcattttagagtatagttatgttggttgaaattttagaatatagttaatgttggttgaactccatcaaaacaaaaaaaaaaamtagaaaaagraaaccttgtttgcattggaaactcccacctcatgctcacacacacccaggcatacatttacttaawgccaggatatggttttttgtgcctttactgccttctgaggtctaggacaccacaggtcaggttggtaatggaaattttttttattttttattttttgcctttaatttaatctaaaccttttctttaggttttcaaggagaccaaacaaaagagagtgtctgttttagaactgagcagcacttttctacctcaatgcaaccgacaaaaacttctagaatatattctgagttttgtggtgctgtaggtaacgtgtggcactgctggcaaatgaaggtcatgagatgagttccttgtaggtaccagcttctggctcaagagttgaaggtgccrtcgcagggtcaggcctgccctgtcccgaagtgatctcctggaagacaagtgccttctccctccatggatctgtgatcttcccagctctgcatcaacacagcagcctgcagataacacttggggggacctcagcctctattcgcaactcataatccgtagactacaagatgaaatctcaataaattatttttgagtttattaaagattgacattttaagtacaacttttaaggactaattactgtgatggacacagaaatgtagctgtgttctggaactgaatcttacatggtatacttagtgctgctgggtaatttgttggtatattatctggttagtggttaatgcttcctttaaaaataattgagtcatccattcactctttttcagttttatctgtcaatagtagctacatttttaatgggagcaccttttatcccaaagtgctttataaattgagtggactgatatatatcacacccaggtatcactgtgctgtcctttgctgtcagatttagaaatgtttttaagagctatgtgaaaacagacaatattagtttaggtcgggaactgagatattgtaatcaaatagttaacatcaggaagttaatttggctggcaaaattctagggaaacttggccagaaaactggtgttgaaggcttttgctcatataaacaagtgccattgagtttcaaatgaccagcaaatatatttagaacccttcctgttttatgtctgtacctcgtccacccctcaggtaatacctgcctctcacaggtacagctgtttcttggaaatcctccaaccaaatagcagttttcctaacttgattagcttgagctgacagactgttagaatacagttctctggccacagctgatgagggctttctgtactgcacacagattgtgtactgcaccccagtccaggtgactggtacccactcgagttgtgccgtgcacaacctgtccagtatatgcatgtggtggccctactgactggtaatggttagaggcatttatggatttttagctttgaggaaaaaccatgacttttaacaaatttttatgggttatatgcctaaacccttatgccacatagtggtaaataattatgaaaaatggtctgttcataattggtaggtgccttttgtgagcagggagcataattattggtttattatggtaattatggtgattttttaaatatcatgtaatgttaaaacgttttctaacagtttactgttgcttatctccaagatattatggaattaagaatttttccagatgagtgttacatagattctttgaatttagtataaaagtactgagaattaagtttgtacttccataagcttggattttaaacactgatagtatctcatgagtaatgtgtgttttgggagagggagggatgctgattgatatttcacattgtatgaaataccatgtttgaaactcatagcaataatgctatgctgttgtgatccctctcaagttctgcatttaaaatatattttttctttataggaattgatgtataccatgaagtcattgtcagttgtagtagctctgatgttgaatgagatatcatgttttagcattccattttactgactagggtagaagaacacttttcttggctacatttggaggatacccagggagtcttgggtgttccttatctggggaagcaaacatttcactagtctctttttttcatcctttaaattgtaaattaaggattactcaagctcaccattattcaagattgggactcgcttcccagtcgacactctgccctgcctgtcattgctgcaaagagctgctgctttgccaacctaagcaaagaaaatacggcttctcttgcattattttcccttttggttggtttgttttctagaagtacgttcagatgctttggggaatgcaatgtatgatttgctagctctctcaccacttaactcactgtgaggataaatatgcatgctttttgtaattaactggtgctttgaaaatcttttttaagggagaaaaatctcaaccaaagttatgctcatccagacaagctgacctttgagttaatttcagcacaactcattcttcagtgcctcatgactgaaaacaaaaaacaaaaaaacgaaagcatcttcacaatgaagcttccagatagcaccgttttgctaaaagatacattctcattgttttccaacagtgatggcttccacataaggttaaacaaactaggtgcttgtaaataatttattacagtttactctatcgcatttctgtaacatgaaatgcatgcccttcttcaggggaagactgtggtcaagttaaaaaaaaaaaacaatattaaacaacatgaaactgcagtctgtttttgaaaatgagaatgtcctaagtgattcagaagagaggagggaagttgtgcactctgaaaatgcatgaaaaacaaaggcaaaaactagtgggaaatgtgtagaactgttaactgagatggcttcgagtcttccttctggaatctgttaaatttcacaaagtcatgagggtaaatggagaaaatatttctgggattacaatgaatgtaagcccaaattgtggaattgccagtaacctggatggggaaaagcatttcccatagcactccatgtaatatgagtgctctgtgagatgttcatcagtgttttatagaaatggtgttgctgggaaaccaagtttgcacctggaaacttacaatgcactttagcgcagtaagggcttggcatccggtagtgaaaaactgtctaacccagcattgcccaaactattttgacaccaggacctttttctcctttgggatacttatgaacctctcactaatgtcctgtggagaacattttgggaaacactatgttagatagttctttaaggagacaaaacggtaatgaacagatagcactggggcagaatatgcatgcattttgtaacgtccagtgtggcgttgaatagatgtgtatttcctcccctgcagaaaataagcacagaaaattataatgtaggtgatcggagctctttcctttgatagagagaacagccccaatgatcctggctttttcactgaacgtatcagaatacatggatgaattggggtaaataaggttttaattcagatctagaagaaagtattgtaygtttgaatgcagatttttatccacagatagttgtagtgtttagacatgacaggacctatcgttgaggtttctaagacttactatgggctgtaaacctgttttttaaaactattttagaaacctgagacttgccgtctggcattttagtttaatacaaactaatgattgcatttgaaagagattcttgaccttatttctaaacgtctagagctctgaaatgtcttgatggaaggtattaaactatttgcctgttgtacaaagaaatgttaagactcgtgaaaagaattactataaggtactgtgaaataactgcgattttgtgagcaaaacatacttggaaatgctgattgatttttatgcttgttagtgtattgcaagaaacacagaaaatgtagttttgttttaataaaccaaaaattgaacatactcttgatgtgtttgatttgtatttaaaacagtttcctacataattcattatacgaacaattattgttttctgactttatatagcaacttattaaaatgcttaacgataccttacataaatgtatgaacctacagttcatgcttttattattgacccacagctttccaaatttgatcaagcatttggagatgtaggtctgcttcttagctattgctctccttttatttagtaaatattcatattctagggagattctgtgggtttttgtaaagatttctttaagcttggtgctttttgttatatttttatatatttaagtttataaaaagtgttttctccactagtttatcacagttgctcaaacaatattagtttacttttttgacaagaaaattatttcttttatcagagcacagattttgtggattctttgaaagttctcaaatacagcctgatctccagagtgttccttctagaaacggtggtaaacgtgtgcctgctgatgatgtccgtgtcctttggatgcatgatatggctgtgaaactgattgacgcccaagaccatcccatccgttctccagccagcctctctccctaaacttcctacttgaacgcttctgattttctctgtgatgttgctgtgactgtgcccttattctggcacattcattctttacattagcaactctcttgctgctgccaaaggttaccttccttttattgtagctaaattctaactttcacagccactaggtaagtggatgttaattttgaagtctcatctcgttgtttagtctactctctaattttagtcctgtcattttcctttttaagcccttgctgtcttctacacatctagctagtaaaattccaacatacctccttgacatgtacaagggcacttgtggtgttgacacccctacctggcttctcttgccccttcagtttccatggccctattgtctcctgtctcccgtcacgactccgtgcttctccaactcttccttgcctcccatcccttaccagatagtcctggtggtgttgcctgatcctctgatttgaaaaaaaaattttttttcagtgtaatctggaatttgtatttttatgtgaaagcatctaatttttacacaatggtccaacaacatatatggatcaagtaaattgcctttccaggccatttctatcttgtcaactgccagtttgtatcttttggcctaggaaaaagaagcatgaaaggaccagtttcaaggtgccccttccaggaggagctagtaggcaatccccaggggagagaaagctaaccttggtcatctgacttaggcaggactagagcttgaggcaaatatctgatgaagactggtgatgtttaactaggcaatgagcacgtctgggtcagcttttgacatctgactcactcctgtgcccatgtcaaagaaactgtatcgaaacaagctagcatttgctgctggcagtgggctacctgtgacaggtgattagagtaaatgagtggacaaacgcaatttccagccctctgggaaaacatctttcctcttttgtcttgcrggttggtggacaatcagaaaggaaagaacgcaagtggacacaccctcaaccacctgctgaaagttcccaacctacatagccaagatacatcgtacagaacttagtagaagtgaggtgactccctaaggcaagagcagaggtagcatgcctgagtgtgcatttcaccttgttcctcactccttactggtgggctaatcctatgcccataccctcctttttctttgtaattattaacaatgccctctttgactcttagaagagtctaggtgtgcataatagactatatggttgctgtatccatgggctctgcagctgctagtgacaaggaatcctgctggaattgagaacaaatctaccttaagaatatatattcaggtttttatcacctgagaattttaagagtctttgagtttacttgtaaggaaatgtttatgcactataaaacatctaacttctgcttcttgaaccaatcttagcacttgttggggagagctcagaaatagcccaattgtccccaagtaatctctctcgaaaagagaatcctacaaagcccatctcttctcctacttttggagggtttgaggcccaatttacttgctttattatttctccattgttgaaatggtgggcaaacatcccacttctatttcatgattctaggtgtgcgtggtggtgaagggagtgctgactcccttcgcctagcaagggaaaagtagaacagcatgcggcccacagtgaggattttaaggagccatggaatacggtggctctgtctagaccagtgattgtcaagtgtggttatcagacaagcagcatcagtatcacctgggcaatttcagtatcacctgggaaatttcagtatcacctgggcaatttcagtatcaccagagcaatttgttggaaatgcaactactttgagccccaacccagagaccagcaatacgtattttaacaagtcctcaggtgattgtgatacacatgaagtttgagcacccttgctctagacacttggcacaatcaggcatttcacagttctacacagtgtactctggaagtaaaaatgagggagagggcatgggtgataaatgcccttctaaagtggcttttcctccaggacgtgttaaagtgatcaagtaaacgggacagagctgggctttcaggtaacagtgcttagatcctttatgtacctggagatgtttctttctacaatgggaaatggctgccttgagccttgtcattgtctagccatctctgtagatgctggcatagctcgcatgcagttgggtgacttacaccacaaagtttggcattgaggtgcttcttagccctcaatctatgaaaaggaggcttgcccgagttgaattgtgtgtgtgagctttacacagtcctttaaactgatcccttggtcagtaaacctaggactgagagctggctttcttgtgcgcatgcagactctgagctgatcatgtcacttctgtgggcatggttgttctccgtatggcataggggcaaatgcacagtggatttttgaagatgaaattaggtttaatgaaggcggaagtgttttgtaggccggcaagtgtgaaacaactgtgtgtgttttgtatgctttcatgtgatggccagtcaggtgtggccacagaagagacacaatttattatagtcataggtcgtagagacaggaggcatgggacaccccacacagggccacatgggaaagacacaggggtggtcaggaggcagaagacaggagcgtggtgggggcttgggtcggagcatttattgatgcttctgagggaaaggcagggcagggcagggtgaactgtttagcattgataatggaatagtctggataatttcactgggctctaaactataggagtggtccttagttttctgttatcagtccctgggatgagttaggtagaggaatattgcttgcaagggtgtatgggccagattgagaaggcatggctctggattaattagtgtgtatatcaaagtaggctcctggctgagtcctttgccatctctaagaattgactagtgccaggaggggcagtctctccccagccagacagtctttttaagatgtcaaagaatcatgggttagaaagtttagctctgaggaagcttatgcgtcgttcagagggaaattaagcgtcacctagtattctgcctccaagttttacagaagagaagattaccagtgctcacacagtaagttgatagaatctagaccagaagcaacattgtttgacacagtccagtcaacaccagccaaagggaacacagacaagtcagtaaaatgaccaagttttcctgcagcaaagtcaaatcatgca

SEQ ID NO: 96032 - DNA, 91127 bp, Homo sapiens
  misc_feature (1)...(91127): n = A,T,C or G
tgagtcgatgcagctgtgcaggtgcctggcttgttcgttagagagcaggcagagagggttcagctatttcttgccttttggtttggtgcctttgtgcaggatacaacctccatatctgtatctgatggccctggttatccccgttttacagagaaagattaaataacttgcccaaggtcatatggctaataaatgaataatcagagattaccaatgttgaattcacagccaattcctggtgactttcctcctatttgaaagctataatccttcagtcttgggagaggtagacaaaaagagattcattccyggccaaggttcatggacagggtctggtcactgcttctcctcctagggtactatgctttcctagtgactcttcactaaattccatagttcactggtcaaacactgttctgtgacaaagggccaataagaccccttggtctaaggaagtattgtccaaggtaacctgacacagtgtttgacttttatccttcacttactttaagctctcattaaacacacttataacagagtttaggtgccactgaatgtgttaatgtcatctaggaaggctggttgattgcaaacaggacctctcaggaacactagttaagctcaaacaagactgatttgtaaaccagaatttcaatgtatgaattcataataaggagcaagtaaggcttgtatgtcttatttatgccacctcctttcccagtatccaatcacttgggaaattgagtgattagtcaagaagttgctaagtaagcatggaatcagaacaggtgctgatgaaatatctttactcataatagagaacacttctctagtggccagcccccagatttagagtcttttaaattttcaccagtgtttcccaagcttcagtcatttgaataccacctttatgattttaccattcctgcatttcaatacacacatacttagttttcttcctttccttcctttccttcccctccttctcttccctcccttccctccctttcttcctcctttctttccttttccttcctcctttctttccttttccttccttcttttcttttctttctttccttccttccttctctttcctccttccttccttccttccttccttccttccttccttccttccttccttccttccatccttccttctctctctctctctccctttccctctttccttctcttctcttcttttctcttctcttttctcttctcttctttccttggagtcttgctctctcgcccgggctagagtgcagtggcgcgatctctgctcactgcaagctccgcctcccgggttcacgccattctcctgcctcgagtagctgggactacaggcgcccgccaccacgcccggctaatttttttgtatttttacttgagacggggtttcaccgtgttagccaggatggtctcgatatcctgacctcgtgatccgcccgcctcggcctcccaaagtgctgggattacaggcgtgagccaccccgcccggcccttagttttcttaattgaataagtttttaaaacaaaacatttactttagcttctttctaagcaattatatttctgaaatcatatttggtgtgctagttttctaacacatattgaaataaatataaacattaaaataactaccaaaatgaaaatgtccatgaactgcttaaactcagtggtgtatataccacaccttagtaaatattgccctagccattactggaaaaataaaatacgtaagtttctctgaatcctagttggtgtgttgaacacctctgttgaatttcttcctcaggtgtgtactagcgtcatggtatcttgtaccatcattgtacccaccccctctattttgtgttgattttacagggctccaacctacagtattttattctattttatttttttgagatggggtcttgctgtgttgcccaggctggagtgcagtggtgcaatcttggctcactgcaacctatgcctcccgggttcaagtgactctcgtgcctcagcttcccgagtagctgggattacagatgagcatgcccagctaatttttgtatttttactagaggcagggtttcatcatgttggccaggctggtcttgaactcctgacctcaagtgatccacccacctcagcctcccaaagtgctgggattataggcgtaagcccccatgccccgccttcaacctacagtatttgaaagataaaatatgaaattttatctttagtatttgtgattttgtgcatagtaagagattctcaaatatttgtgtacctaatattcttgaatattttctaactattctcaaatatttatagtacctaagaatgaacatatactctaccatttgaggtgattaattttggcctactggtggattaaaagaatttttaacagtgtcgacatgacgctagacacaatccacatcaataaaaaatcattatttgaataagacgaagataatgctgaaaatataaaaagactaaaatatcagttctctctatttgtattaactttgagaattcagtgtttcaaaagtgtgaagggtcttaactacaaactttgatttaaaactgagacttctttgaggaaattgttttgctttaatccgtccttctaaaaatgggatttagagaatttggaggaaactgtatacaataaagttttttttttcacctaagctttctagttaatcatttgacacagcagtctgaagattttaaattccagttgccactgccattctttccactagaatgttgcttgagatatgggccaattttacttagcacctagcctggtacctggtgtatagtaggtgctcatttaaggcttattttacaactaagcgaattcctaccttttctctatgttacagaatatcactaacaccaagttaagatctataagagggaatcagaaaatagaatattagtttcactttcttggaacacacatgaaggagcaaatctttacaaaactgtcttttttcactattcatggtcaatatttgaattatattatttttatgcactgcttatttatcctttcctcaatattgaacttcagttctcatcagaattcgctttttcttaaccaaggattcctctcacacactatacatgcagactttttcattaagtcattttattgcaatacctgaaagcaacaagaatctgtactctccaagtgagtgaatagcagagaatgtttgctaagtgattttaaaaaatgtcttcattttagaaaatttgcccaagttttccatacttgaaaaaaaacctagttgtcattctctctacatgattttatatcttgctttttctgcttagtaaatattttcccatagaattaaaaattttgcaggaacaatctctaatttgaattgaattaatttaattcaattgaattgaattaaaatacctcagaggaatacaaattcagaaccttgaagattggttgctgtcctccaccatgccttgagggtatgtgatgtgaaaatttggtttaaaaatggaaattatttaaaatgaattatatcaaactgtattttggtttggcctttgttaaatataatctttttttttttttttttgagccgagtctcgcgatctcagctcactgcaatctctgcctcctgggtttgaacaagctattctcctgcctcagcctccgaagtagttgggactatgggtgcgtgccaccacacccggctaattttttgtattttcagtagagacggggtttcaccgtgttagccagaatggtcttgatctcttgacctcgtgatccacctgcctcagcctcccaaagtgctgggattacaggcgtgagcctctgtgcccagcctaaatataatcttttaaggttgggtgtggcagcttatggctgtaatcccagcactttgggaggctgaggcaggaggctcacttgaggccagaaattggagaccagcctgggcaacacagggagactcttgggaggctgaggcaggaggctcacttgaggcccggaattggagaccagcctgggcaacacagggagactctttctctacaaaattttttttaaaaattagctgggcatggtggcttgtgcctgtagtcccagctattcgggaggctgaggtggcaggatcacttgagcacaggaggttgaggctgcagtaagctatgatcattagtgcactcccctctgggtgacagagtgagaccttgtctcaaaaataaataaataaataaataaaaaatatattcattttgatcatcttgagaatagtctgacaaagtttattgctaactagatgaatcctgaaattcttggtggtgatggttctagagataaaaagtatgaagcaagcctgagcctattaagtgctttatcctttatgtaccagtatcaaactgtgttgctatttatgttcctgaatgagataggaatttcttcagattcagagaagggaaaatgacagaaacgacaacaaaaatgagaactacactttttttttttttttttttttttgaggcggagtctcggtctgaggcccaggctggagtgcagtcgcgcgatctcggctcactgcaagctccgtctcccgggttcacgccattctcctgcctcaacctctggagtagctgggactacaggcgcccgccaccacgcccggctaattttttgtatttttagtagagacggggtttcgccgtgttagccaggatggttgcatctcctgacctcgtgatccgcccgcttcggcctccccaagtgctgggattacagacagacgtaagccaccgcgcccggcctctgagaactacacttttaaaacagcccatggtcacgcgttttgaagggctggggaaatactgagggattttacctgcttttggggtggggggtgggggcagaacaagaaaatctgattgaagacagcatgaagtatcaaaataacccttggccactttggctagtgcccgtaggaatataaacaggtgggccacaaatccaagccttgatgaatgacctatgccagcaccaatttcctccctccttctggatcagagcctgtttccttccaaagtggtggacccccgaaatcttacaggcttttttttttttttttttttcctctgtctcactctgtcgcccaggtagagatcaatggcatgatctcggttcattgcaacctctgcctcccgggttcaagcggttctcttgcctcagcctcctgagtagctgggactacaggcagccgccaccatacccggctaatttttttaattttagtagagacggggtttcaccatgttggctaggctggtctcgaactcctagcctcatgtgatccgcccgcctcggcctcccaaagtgctgggattacaggcgtgagtcaccatgcccagccgagtctaactttctttacgatttcctggggtcccagctggacggagtctcatccctgccccccttactgggaggaaaagggaatgcacctcctccatgagcctcagctgcactttgaggcacctggaatccccggatgtggagcgagtctctgaaatgcagaacccgaggggccaacccatggactgtgatgggtaaaaggggagagagcactaaagaggccaagtagggaggacattatccctttccccttttattattattttttgttagaaaaaggcaggtggacatatttagcttgcgaagcttgcacaaggaaaatccagagcgtctccagaataaggatcccacgagagaacgtggacacaagtaggccctcagccagccttgtacccacaggcccaacaggccacttggctatgaggccagagcgtcgccataggggcccgaacgctagcgtttagggaatccgcaggctagaagtggaggcgggacgccactggtcgtctgagcgctgattggctggtggcgctagtcaccagccaatcgtcaacagacgccatttgttgttggagccacgcacctgacgcagtgggcgtcttgcacgtgcagccgtttaagtcgcgtgggcgcctgcgagggcttgggagagcaagccgcggagaggtgagtgggccgcttttctacgggaactggcctgaactcggccgtacgggctccccagtaaccgacctttggccaaagtgtggatggagtaggaggagttttgaagccgtccttcgaagcctttctgcctcggggtctcagagtcccacgggtgcccaragtctgggcttgaggcctgcagaggaggcgaaggggccttattcctggcttcttcactgcgttttctctgaacagacatggtccgagtaycatttgtgtacaaatccttcttgatgaagctggttgtcctttgtcggcaggatttgggcaaccatacccttcttcccttccccactaaaatccaaggcctccctcttcaccgagtcgccgcccycctacccagtcgactcccgtacccctgtccccgccyccacgcacgccacaaacaccccaaagcaaacatcctatccaccttggatgttaatcatgcgaagggagaaatcttaagtagtttctgaaaaaagttgcctctcccttaatattcagtaagtcgtttggggaccctttgagggaggagataaagtctatgaacagatgtttgggaaaagcctaagtcttgctggggacatggcgattgctagaatgactaggtaagaggttcaactagtttctaaagctaagaaaggatggagataaatgccacctttagataagaagagacctaattccttctttggaaaaaacttttggggtatcagcacctagttgggtagtttcaagatgtatgtgaaacaatgagtttatgcttttaaagttatgattctgatctaattgagtccaaatgtgcatttttttttttttatgaatagaacttgaagccaccatgggagatgaagattgggaagcagaaatcaaccctcatatgtcttcctatgttcccatatttgagaaggtaataacatttaaagtttagttattaaatgctacggattttatcaaagttgaaaatcactgtggtgagagttctaaattatacagtctgtgtcagtgtttatctccatgtgattgttattaactattatatggggaataagagdcaacctaagcctcgtataggatacaatagcttgaggcaatttgataattaaaagctaaaatagatgtaaaaatattaatgacctaatttaaatctcaatgatttaggacttcctcaggtgaaagcaaacttgggcaaatgtggttgatatcagtgaaagacgcttgtatggaaaattgaaaacaataattacgttttgggagatattttaaattctgaaaattgattttgtgcaaggagggttctcaggataaatgatactaggctgattgagttggtaacatcagtttgtatgaatcttcagatcttttttcttaatggcatttggggagttacattgtaatttaggggacagtggggtaagttttttgggcttcagttctgacttggaaattggctttaaaaagatgaatagaaggtactttaaaagataatagattatttttgcatgtgttacttactatatggtgtctctacaagttgatttttttgttccccttcagaatttccagtttgagtgtatgtcagttctgacactttctgatttcaagttttgccttagtggaagttcttattttagacaaaaatataaaatatgcaatcttttgtcttagttgaatttgatctatatgtgaagtttatattaaaatacccaaaatactaatataaatttatcatgtttcttttcttggaactttttaaaagaaataacatgttacctttttttttattttttaaaatttttgtagagatgaagtctcactatattgcccagactggtttccaactcctgagttcaggcgacattctcaaagtgttgggattacaggcgcaagccattgcacctggactgtgttatctttttatagttctcttctcataataaaaatatagcttttttgggaaaagtggagaaagtcacctacaaatcttgcccaatagacaagcactcctgttaaaatttttagtcaattttcttctgttttttccaaacattttttgtttgtttttgatacagtgtcttgctctgtcacccaggctggagtgcactcatgcagtgtgggctcactgcagcctctgccttctgggttcaagcaattctcctgcctcaacctccctcagcgagactacaggcgcatgccaccacgcccagctaatttttgtatttttagtagagatggggtttccccatgttggccaggctggtcttgaactcctgatctcaggtgattcactcacctgggccttccaaaatgctggattacagtcatgagccaccgtgcccagcccaaacatgttttatatagttttgatgatagtatataacagtaatttttttttttttttgagatggagtctcactctattgcccaggctggagtgcagtggtgcagtctcagctcactgcaacctctgcctcctaggttcaagcgattttcctgcctcagcctcccaagtagctgggactacacgtgtgtgccaccacgccccgctaatttttttttttttttttttgtatttttagtagacacagggtttcactatgttggccaggctggtctcaaactcctgacctcaggtgatcctcccactttggcctcccaaagtgctgggattacaggcatgggccaccacacccagccatataacagtaacttttgaatccatctttcttgacacttcagcactaactattccatattacaacttttgtgggaatttcagtggtgttagcttctcactgtgtattgtcattaatgtttacatcttacttgttttaatttggtaatttttttcaaaaatggaattacttgttcagaggacattttttatcattctttttcctcsttgttctcaatagatttgttataacacaaagtttaattcacagatagatactttattccccctggtcttaatagccatctgtccaatttcttttttcttagtttgagatttttgtcttcatgaagtgtttaagcagcacactgcactatagcgtgttgtgcatatttattgcattgggtttctgaaattaaggatgactgtcaaatctttcaaatttccctttttgggatctttatgctattcaataacatagtttcttcacattgggaatactaaattgaatatgttgaccagtctaccttatgatgcttaatacatttgtgttgggtgaatttgtagtgtatcttttgcatttgtctgcaaacttaacacctggtgttgtgctggttgtgccattagttctatgcttagttgactcgaaggaacatggtgcaatcaggatctttatttgccttcctaggttgaataaaaagtgcaggatggccaggtgcggtggttcatgcctgtaatcccagcactttgggaggctgagacagccagatcacttgaggccaggagttcgagaccagcctggccaacatagcaaaaccccttctctactaaaaatacaaaaaattagctgggagtggtggcacacgccagtagcctcagctacttgggaggctgaggcaggagaatctcttgaaattgggaggtggagactgcagtgagccaagtccgggcagctgcactccagcctgggcaatggagcaagactctgtctgaaaaaaaaaaaaagtgcagaaactagagatgaatacattacatttttatgtagaacaaatctaaagtctttcattccgtttcttttaaagacaccattttgatttgttctaactgaatttggttttcaagaaaaagctggccttctcttttatagcggctttatctgtgatcatccttttctgagtgcttctcaggagctttatttggagacttaatgttgacatacgcttatataattttgaaataatttgtcattgttctagtataacagatagaattttgggtagaacttctcaattctaaattttaaagtgagtgtaccacctgggaatagaacagcgaaagatgtgaagttaagaaagattttataatgtggcaattatatagtccagaaatctcaaccattaggcatttgcacgttgcctgcaggcttattggggtgagtgttagaatggatgggtatggtgagtgtattagataattccgttgcttacttactagctgtgaggcctcttgttaactgaccgtgaatgtaagcctgtatagtgatcacttctgtctgatctatttgccatttttgtggcacatttcagaaggcaaaatctcttgtggttaaagtggaaacagtaattgagtaattagaccatccacaattataattttattaagcagcagtagcaatgttagcaataattgttgagataagaaaataaacatatatatgatattacaaaattgaaagtaagaatacaggtgaaaaaaatgtgttcatcaaaatgcaaaaggattatttgtagctgcatgtgagaacacttatgtgttaaacattcgaaatttctgaattggtgcatttgggtggtttgagagataataatggtttacagctaagtattttaagaggtaagctaaagacaagacctatgattcattcaacatatttttgagttctagtaggtgctggagagagagtggtgaatataaggtgcttgctgttacattgtattttactggagaagacagaataagcgcgtttgagaaccaaataattatagtgaaaagtactataaaaaattagagaaatgtgtgtgtgagactggtgtggggtggatttagttggagagggaaggcttctctcagacagtgactcatgagcctgagacttaaaggagtcccagcaggacatcaggtgcaaaggttctcaaggaacctttgagaaggaggagggaacaaacttggggtattagggcaacaagaaggccaatgtgttagttttctgtggctgctataacaaattaacacaaactgggtaacttaaagcaacataaatttattctcatagttctggaagcctgaagttaaaaatcaaggtgtcagcagcgctgccctccctctggaggttctgggacagaatctttgcttcttctagcttctagtggctaagggcattcctcggcttgtggctgcatatctcttagctctgtcttcacattgcacctcctttgtgggtctttgtgttatttccctctgcctctctattataaggacacttgtgatggcaattaggactcatgccgataatccagggtaatctcatctcaaaatctttaacttaatttcatctgctgtgaccccttttctctctctttcttttcttttttgagacagagacttgttctgtcacctaggctggagtgcagtggcgcaatctcggctcccttcaagctccacctcctgggttcaggcgattctcctgcctcagtctcctgagtagctgggattacaggtgcccgccaccatgcctggctaatttttgtatttttagtagagatggggttacaccatgttggacaggctggtcttgaactcctgacctcaggtgatctggctgcctcggcttcccaaagttctggaattacaggcgtgagccaccgcgcccaaccagttaagcttttttaatgataaaattctgttggaaattatttttgatgtattttttcaaaattcatcttggaatttgtaagttggatgtatgtgggatattaagttccatagcttgaagcttaataataagtttttcagttctttagtgtaagagtgttttataacacttgtaaaaccagcctttttttttttttttttgcctctattcactctatagtactttgagccttacaaacaagaaaaaagtcttcagattttaaatagaaaatattggataattgttcttgttttaatgtctgtggtagtaataaactggaacttttttttactgtagcaattaccaaaaccccaagtcatttcaagtatgttgttatttttgtgcccttaatgatgactcggaaaaatgtttggatgactcttgagctttttaaaagtagttttaaaagtcagtgtctttgagaaagaaattttagcaaatagatgttacctaaagaagcctaccttggtgcattctctctaggtttgggacttagttaaatgaacttatttgaaggaacattgtaactgttgtaatatagttagttgattaagagatcatctgtagatttcctttcattcttaaattattaaattctgattgtcatgtgcaagaatttcagagccgtattctgaacttttgccataattaaaggaagtttacgtgagaagaaataaagatgtggattaatgatgataaggacaccctaagagttagtgagaaaaaaattactcaaattgtcattaatctagagctatccagagaaatgttggaaggttccaaaattaacctgcattcagctattgattttataataagttgaattttctaaatctggcagtcattctaccactgctaatgtaatgcatgtgtgttaatagtaaatgattttctttagcctaaagtagggaaagtgaacagttagtatttgggagcaaagacagtcttcagctactgctgtgacaaatgtgattaaaattaaccatgaatattctgatgctacagctgaggatataccttttcattgtagttgtagtgcagtggcaggttgcatatataaattgtttccagtccataagtgaatttactttacagtgaatccttttttttctttttttttgagatggtgtgagacagtgttttgctcttgttgcccaggctggagtgcagtggcacgatctcggctcaccacaacctctgcctcctgggttcaagcgattcttctgccttaggctcctgagtagctgggattacaggcgcccatcaccatgccaggctaattttgtatttttagtagagatggggtttctccatgttggtcaggctggtcttgaactgctgacctcaggtgatctgcccaccttggcctccccaaagtgcttggattacaggtgtgagccactgagcccggccagtgaattcctttttaaaacatgagagtaccattaattggtttcactataaatgcagtagagattttaaaaatttctgtagtacttttctagagcaaagattagtgttaaatcactaatactctgtaatattgatgaatatactgtaatatatggaacttggcatacaatagtgtgtattgaccagtgttgatttattcatgtattacttgtcagattttataatgatattttattatattttcttttctatttttattttttgagacggtcttattctgttacccakgctggagtgagtggtgtgatctcagctcacttcaacttctgcctcccaggcgaagtgaacctcccatctcagcctcccgagtagctgggactacaggctcatgccaccacacctagctaactttttgtatttttagtaaagctagggtttcaccatgttgccccggctggtcttgaactcctgggctcaagtgatcctcctgcctcagcctcccacagtgctgggattacatacgagagccaccacacccagcctgattgtacttttcaggaatatgggtgacttaaatgactaaacttttactttaagtcaggtgtcagcaaaccctttctataaagggccagataataaataatttagactttataggccttacctgtctgtcacaactttgctgttgtagtacttcaatcaaactctttacagaatcaggtggcccaccagatttggctggtggctgtagttttctgaccactgttctattgatatatattagtactatatatacagtgttaaagtgaagatgtcttggaataattagtaaaggaacatccagtgatttagaaaaccttacagtctatcattattttgttctgaacaaagctcaattgttataattttctagtatttgtgaaataaatgacacrttcatattcaaagtaggaaactagttttttctttcttctttctcacaggataggtattctggagaaaatggagacaattttaacaggactccagcttcatcatcaggtatgtgttatgggaaaaaggtaaaaccctttttagtttaagggtttcatctagtgaatgaagagcagcagactagtagacatcttgtagagggtgttttaaaaaatttcttagtgaaagttccttctgatttggatattgtggaatgggggtacttctagttagaggaattgagagagggaaaagaatagactgtattatttgatttaatggattactataaaacatttgcctaacttggaagttgcacattcagcttccaggctgctagggcatcatcatcatcagggttcctgacataagggagtagaatataggactataaggttgtcgaagcaggttacaatggtgatgacctgtcaggataataactgtttaagccaaatctgtcataccatcaggatatcttgagtttctttgggatcagaaaactaatttgggaaaggtcttaggagaacaataaaaacgtgtcaaggtaaaggaacccatatccttcctgttgcgccctcctcccaaccccactctgaacttgttttcactttggttgcccctcccaccatcatttttccccttgggttgtccaactctattttacagagtggatgtagatgggaagatgggtggaagtggtaggactaggctgggaaattgaactcatggcagtagtttttcacattgttgaagtccaaarcaggatgaaatgcaattgttactatattaaaataattttgaccggactctggctcatgcctgtaatcccagcactttgggaagccgaagtaggaagaccatttggggccaggagatcaaatgatcatttgaggtcattcgagaccagcttgggcaacatagttggagtctttgtctacagaaaatttaggctgggtatggtggctcatgcctgtaatcccagcactctgggaggctgaggcaggtgaatcacaaggtcaagagattgagaccatcctgaccaacatggtgaaaccccgtctctactaaaaatacaaaaattagggtgtggtgctgcatgcctgcagtcccagccactcggaaggctgaggcaggagaatcgcttgaacccgggaggtggaggttgcagtaagtcgagattacgccactgtactccagcctggagatggagtgagactctgtctcaaaaaacaaaaacaaaaaaaattaaaaattagctggtcatggtggcctgtgcctgtagtcctaactacttggcaggttgaggattgcttgagcccaggagttcaaggctacagtgaactatgatgatgccactgcacccttgcctgggcaatggagcaaaaccctgtctctaaaaacaaaacaaaaacattaaaaaactatgatgaagtatacataagatttaccattttaatgtgtacagttcagcagcattcagtacagtctcattagtctgtaaccatcatccaccatctacccccagaactttcttgtcttcccaaactggaactctgtactcattgaaaaataactccccatttcctcctctcccctgatcctggcaaccaccatctacttccggtgaatttgagttactataactttactatgagtctctaaatcgagttactactatttttaaggcagactagcataaggaagagggcctggtggtatcaggtagtaattttatcatttttcttataaaaaattagtagatgaggtaaaacattttatggtcaagggagctgcatgctcactgaaacctggcctatggtggaaaacacccatggtgaggtagtttccaaaatgtgaggatagtttgagagtcagtttatcaggttaaagcaaatctaattctcatgagcatcttaagttcagggtaaatatcttgacaaaagttaagtttaaaagagatgactttgctattttcaaaatatgtttatcttttataagcatttaaacacagtggtttaatacagaaatattcagattctcagaagttcttggaatcctgcctgctgaaaccccagcaaagggctaattttgcttctaccatataaactctgtgtgtacttagagtattccagaaagacaaatggataaacgtaatagataccttttaacatgtctatttacatcgattgctgtgtaatcaggagaaacctggttttttgaggtatgaacagaagccaatatttgtaaaggaatgaaagtttaggtctatagtatattaacgcataacactgttttgtattggaattttcaagaaactagactgaaataaccaccaactaaaagctaagtttttttttttagcattagacctatgaatgtttaggctaatgaaatgaaatcattaatgaaaatcactaatgaaaaatattgattgcctgcttaccttcttctagataacaagtactttttgtagttcttcataattttttatttttttatgaaaattttcttattagagaaatataaaccaggacagtgaatgtaagccaagccaatacctaaatatgcttattgttttaaaaaaaaggaaaaagggagaaataaaatatgaaatcttagcccctaaatttagctaccattgatgtctattgactctgattttttagattcctgtgtatattcccacatacatgatcgtatgccactggcataatatattaatacatatgttccttttttataaatacttgtcttgtttttcctttgcttacccatgcttaccttccatgcccttttcatgctcttaaaattgtatttagacatgcgtcttttcattctgtattttatagaaatggaatcgtgttatatcacatcttgcttttatttaatagtcatggaaacccttctaaacaactggtattatctgattatttccaaaattaagcgaaaacaatttcacattacttggctttaaaatgtcaataggaggcaggtgtagtggcttatgcctgtaatccctttgctttgggaggctgaggtgggagaattgcctgaaactgggagttcagaaccagcatgggaaacaaagtaaacaaagtgagacactgtctgtacaaaaaatttttaaaaattagctgggcgtggtgatgtgcacctgtaatcccagctactcaagaggctgaggtaagaggattgcttgagcctagaattttgaggttacagtgagcattgatcacactactgcactccagcagggctgatggagtgaaaccctgtctcttaaaaaaaaattctgctgaaccttgcctgccttgtatttgagggtggatcattaaaatcctggttagaaagtcagctctgtgcagggacgcactgatgggctctaccgtcaagtgattgggccagggctaggctgttttgtttgggagagcaggatcctctagtctctgagatttaagtttttgtaactgtatatgctagttccagcctttccttcctcccrctctgtcctcactatattgtacagcttctatgttgcttttgctgatttctttattactcatgtttgatttgaaacaagctgtttgtgggaggaagttttagggattttttgccctccccttccccaaaggagcaattcttttgtatgtgtgtgtcttttttttttttttttcccagaaaactttttgcaagttgtttwatttgcaatgccctttgaaaggccacgaaagttaactggattacaaactaggcagaaattgctttacaaaaggagggaaataccaaaatgtcagtttctgtagagaatccacagttcagttttattcagagcaaaaaaaaaaaaaacttttaatcacactagaaaaaactcagcaatagatttggaatctgtactcaaactacacatgcaatgacagtattctgctaatgcagtcgatttgctgttgtatttgtctacttttttatattaataattataaactctaaagcagtgcaactagtatttggaacaatctttacagtgtcaggcacatttcacttttcttcacaccattggttctgtgtacgtgggcttcctccccttcagtaaagtcgttttgatattgaaggtcttgggaatgtccacaggtgttttctccttgatcttattggcagcagtcttgcatgtaacaaacctttgataatagcttgcagctagaataaggtcaaagagagttccttggtgaattttcaggaattcytggtcccaaacaggatttttatctcttcatttttcttctcattattctcaggaggaggaggagggtcatctttatgggggggtgcrccactgaatgaccttttaaaatactgcttcattatttggtagaggactgggtcatcatatccttcaatcattcattcccaaatcttccaacgtgatcttgatagtatagattgtttggcaatttctacattaacctcaaatatttcttcattggaactccataactaattgaaggcaggctagaggctgacatgagccgggcagcatcagcacagaagggaagggtggaggacatgactgctctgtgtatgtttttaaacgtgtgttttctgagcatattttgatgtgtatttttaacttagaattttttttttacttttccccctcatcactgtttaagatatattcctaattgataattgatttccttatttctaatgactgtgtggtatttcatatacttttatcaccaagttttatctactcccattcttcctccatgataggcactgagattacctcctgttcccctctgttaccataggatgggcattcttgtatatgttcatttatgggccagagtgagaattactttggatagtggactcgagtagaattacagggttatggaaaggagtaatgtacttaatttgtctaaatatttcaaaaattgctctccagaatagctataccagtttatactcccatcattaggatgtgagggttctcatagtccctatattcccaccaacatttgacatttttaattttaattaattttagccagtctatttgggtataaagtaaaatcttttttttgttgttgttttttgagacagggccttgctctgttgtccaggctggagtgcagtgctgcagtcatagctcactgcagcttcaatctcccaggctcaagcaatcctcctgcctcagcctcctgggtagctgggactacagacttgcaccaccatgtctggctgatttttaaaatttttagcagagatgaggtattgctatgttgcccaggctggtcttgaactcctgagctcaagtgatcctcctgccttggcctcccaaagtgctgggattataggcgtgagccaccatgcccagcatcattgctttactatgcatgtatctgactgtctcttcatatacatgttgttattctgtaagtttctacttttgtaagttgcctgtttgtatttttagtctatttgtctattgagctagcttttcctattgttgattggcaggcattgttaatattctagattttaggctctttcctgatttagacactgaatatcttcttccattctgttgtctgtcagctttgttcatggtatgccttattaatcaaaaatttaattctgaagttattaaataatttttttgcttcttgatttgattttgtagtttaagaaattcttcaccatctctgtcaaaaagtagcctcctacattatcttccttagacttttgcctttcacattgagcttttaatcgtctgaactcatcctttttgaatcatggtggccatatttatttgagtgtcaaatcaagacatagtgtatgcagtatgaatatacctaaatgactcacaaaaaaggaatctttgacgctaaagtttttctggtcagccctgaccattggtctctagttattgaggagttttgtttgtgaactgtggtaaactagacataatagaaaatttactgtcttaaccatttttattttatttatttattaatttttttcttttctattttttattattatactttaagttttagggtacatgtgcacattgtgcaggttagttacatatgtatacatgtgccatgctggtgcgctgcacccactaactcgtcatctagcattaggtatatctcccaatgctatccctcccccctccccccaccccacaacagtccccagagtgtgatattccccttcctctgtccatgtgatctcattgttcagttcccacctatgagtgagaatatgcggtgtttggttttttgttcttgagatagtttactgagaatgatgatttccaatttcatccatgtccctacaaaggagatgaactcatcattttttatggctgcatagtattccatggtgtatatgtgccacattttcttaatccagtctatcattgttggacatttgggttggttccaagtctttgctgtcgtgagtaatgccgcaataaacatacgtgtgcatgtgtctttatagcagcatgatttatagtcctttgggtatatacccagtaatgggatggctgggtcaaatggtatttccagttctagatccctgaggaatcgccacactgacttccacaatggttgaactagtttacagtcccaccaacagtgtaaaagtgttcctatttctccacatcctctccagcacctgttgtttcctgacttttgaatgattgccattctaactggtgtgagatggtatctcattgtggttttgatttgcatttctctgatggccagtgatggtgagcattttttcatgtggtttttggctgcataaatgtcttcttttgagaagtgtctgttcatgtcctttgcccactttttgatgggattgtttgtttttttcttgtaaatttgtttgagttcattgtagattctggatattagccctttaycagatgagtaggttgcgaaaattttctcccattctgtaggttgcctgttcactctgatggtagtttcttttgctgtgcagaagctctttagtttaattagatcccatttgtcaattttgtcttttgttgccattgccctatgaagtccttgcccatgcctatgtcctgaatggtaatgcctagattttcttctagggtttttatggtttctggtctaacgtttaagtctttaatccatcttgaattgatttttgtgtaaggtgtaaggaagggatccagtttcagctttctacatatggctagccagtgttcccagcaccatttattaaatagggaatcctttccccattgcttgtttttctcaggtttgtcaaagatcagatagttgtagatatgctgcgttatttctgagggctctgttctgttccattggtctatatctctgttttggtaccagcaccatgctgttttggttactgtggccttgtagtatagtttgaagtcaggtagtgtgatgcctccagctttgttcttttggcttaggattgacttggcgatgcgggctcttttttggttccatatgaactttaaagtagttttttccaattctgtgaagaaagtcattggtagcttgatggggatggcattgaatctgtaaattaccttgggcagtatggccattttcacgatattgattcttcctacccatgagcatggaatgttcttccatttgtttgtatcctcttttatttcgttgagcagtggtttgtagttctccttgaagaggtccttcacatcccttgtaagttggattcctaggtattttattctctttgaagcaattgtgaatgggagttcactcatgatttggctctctgtttgtctgttgttggtgtataagaatgcttgtgatttttgtacattgattttgtatcctgagactttgctgaagttgcttatcagcttaaggagattttgggctgagacgatggggttttctagatatacaatcatgttgtctgcaaacagggacaatttgacttcctcttttcctaattgaataccctttatttccttctcctgcctaattgccctggccagaacttccaacactatgttgaataggagtggtgagagaaggcatccctgtcttgtgcctgttttcaaagggaatgcttccagtttttgcccattcagtatgatattggctgtgggtttgtcatagatagctcttattattttgaaatacgtcccatcaatacctaatttattgagagtttttagcatgaagggttgttgaattttgtcaaaggctttttctgcatctattgagataatcatgtggtttttgtctttggctctgtttatatgctggattacatttattgatttgcgtatattgaaccagctttgcatcccagggatgaagcccacttgatcatggtggataagctttttgatgtgctgctggattcggtttgccagtattttattgaggatttttgcatcaatgttcatcaaggatattggtctaaaattatctttttttgttgtgtctctgcctggctttggtatcagaatgatgctggcctcataaaatgagttagggaggattccctctttttctattgattggaatagtttcagaaggaatggtaccagttcctccttgtacctctggtagaattcggctgtgaatccatctggtcctggactctttttggttggtaagctattgattattgccacaatttcagatactgttattggtctattcagagattcaacttcttcctggtttagtcttgggagagtgtatgtgtcaaggaatttatccatttcttctagattttctagtttatttgcatagaggtgtttgtagtattctctgatggtagtaaccatttttaaatgtaccgttgaatccctttttttcaatatggtgagaaatagggatccaattttatttctgtccctataacaacctagttttttccagcaccatctaagcattctgtcttttccttgttgatgtgtgatgcaaatttcatttcttaawcgattttgttctttgttgtcttaaagcattggataaaatctacagttcattgacgagtagtagaaataacaaacatctaggcttttcctcacttcaatgggaatgctcccaaatttttataattatgatgtttgcattaggctactaatagttattttttaaaatcatgccaagagagtttcttttcatttctacttgaatatttgttttgttcaggaatggcagttgaatgttatcaaatggctttttagaattactgatttctattatttctcccttatatctattaatgtagtaaatgaatttttaaatgaactttgtgttcctgggctaagccttacgtgactcttttattgtastattggatgaaattagatattttatttagcacttctgaattaatgtaagattggcgtatagttttcttctgtcatgtcgtcctcacttggttttggtttcaagcttttcatgttttccagtaagctccggaacatgaaaattacctgtttttttacaagttgtatagaatttgttcataaaactgtctaggccagggcagattctttttttttttaaactttattgaagcataatgtacacatagattcaatatgtatttcagtaagatacacagcataaatgtacagctcacttaattatcagaagctgaacactccctgaaagccagcactcagatcaagaaaaacagcattattaacagcacccttgaagccttcctttttcttccaggcaccgtccctctgtccagaagtgactattatcctgatttctaacagcatagatcagttttccctataaatggcagtcatataaaatggcgtcatacattgtgttctttttttgttgaggttttctccaggttgttagaagtagttataggttatttgtggatgtatgatattccctatgtaaatataccgtaaattaaaatattgatggtcatttttatagtttccagtatttgcctgttatgagtggttctcttaagaatgttttccaattcatgtctttcggtggatataaaaatcttctctgaatgtgattggcagaacagtagcattggcatcacctgggaacttgttagaaatgaagaatctcatactgcacccagaactactgcatcagaatgtgtgttttaatgagatcaccaggtaatttgtatgcacattactgttacactctgaagtctctatttggaagacttgacactgaattctaagtgttagtgtttcagctacttggggtaatgaaagggattagaagtcaggagagctggcagccctaagcaccactaaatagtttcaaaactctttgcccctaagtcttttctcatcttcctttaattttcctcactctggtttaggcaaatcactgtggagaaaggttggaagattatagagtcttagagcgcatactgaagtctcatacataattgggttcttttgcttggtggttttagtatatggaattttttttaagttcttgttcaatatttgagcctctttggatttggtccaagtgtaactatattgagagatattctttgtggtcagttgttggggattgtgtacactaacactaaattcattttaaatggacttcatttttatttcttttggtttattttggtggatttcatagcattcaagaagagcatctatactccatcatttattggtattagagtcttatttatttttattgctatgtataatatgtattgtggggattgccgtgatatatatcaatgacagcatatcattacattcatgaaagtgaatgtaaactttcacatttacatgtgaaagtactgtgagatttaaaactactaaaaaatggaaaggaaataattgtatattttccttaggattgtgtgctaataacaaggtaaactgggttaattctttcttagaaccttctactcttgtaccatcatttttatgtattttttatttacataggtttttggggaacaggtggtgtttgcttacatgagtaagttctttagtggagattcgtgagattttgtgaacccattacctgagcagtatgcactgtacccaatttgtagtcttttatccctcacccctcatcgcactcctttccccaagtccccaaagtccattgtatcattcttatgcctttgcatcctcatagcttagctcctgcttatgagtgagaatatctgctatttggttttccattcctgagttaattcactaagaataatggtctccaattccatccaggttgctgcaaatgccattatttcatttctttttctggctgaatagtattccatggtgtatatatacaccactcattgattgatgggcatttgggctggttccatatttttgaaattgcgaattgtgctgytataaacatgcgtttgcaagtatcttttcatataatgacttcttttccaactagtgagaggtaggattcccaagaataattgttaccctgtgactttattgtagaatctttattgaagaccttttcatgaaaaaaatctactgtattgaagtcttatgtaaaccataaagcttaatgttttgaaccaccactaattttaagaacattacccaccgggcgcggtggctcacgcctgtagtcccagcactatgggaggctgaggtgggtggattacttaaggccaggagttcgagacctgcttggccaatgtggtgaaaccctgtctctacaaaaaaataaaaaaattagctggatattgtggtacacgcctctagtccgagctactcaggaggctgaggcaggagaattgcttgaacctgggggtcagaggtcgcagtgagcggaaattgtgccactgcactccaacytgggtgacagagcaagactccatctcaaacaagacaaaacaaaaaaattctcatgcacatttgggttgtttccttttttgctgttatgaacaaactctcatcattccttagtttgctaagtatatgttaagtcatgaaaggtgttaaattatgtaatatactttatctggagagattagttattttttattaatgttgtgtgttacctttttttagatatggtagtgttaaatacccttgcatactgggataaacccaattagtcataatatattttatccattcagtttactgttgggtttggtttgctaatatttgtttttgagattttgtatctatgagtaaggtttataattttcttctgaactttcatatcaaggttatgttggtctgtagaatgagttggtgagtaatttctctgtttcctggaagagttgtatgacagttgaattatttgtcctttgagagtttggtagaactcacctgtaaaacccgatctctctgcatctttctgatgcagaaaattaagtactgatttaacttctgtaggagagttgggttttttattgattcttgagtcacttctggtgagtcaattttctaggaactttttcatttcttttaatttactagcataaagttgttcagagaagttctctagttgtctttctgttctttgagattctttttaaacacatttctaatactgttcacttgtgtctttgtatctgttctcccttcacccccattattagtcctctagtagttggttaccctggcaaattttataggtcttttcgaagaaccaagttttggcctttttgagctgctgtattacgtttgtttccttaaaaaaaaaaaaaaaaaaaaaaaaaaaaaagaggcagacagacaaggtctctttctgtttcccaggctggagtgcagtggtttaataataactcactgcagccttgaattcctgggctcaagtgatcctcctgccttaacctcctaaatagctgggtctacaggtgtgcaccaccacacccagctacttaaattttttttttggtagagatastgtcttgctatgttgcccaggctggtctcaaatttctgacctcaagcatctcttcccactttggtctcccaaagctgtttcctattttattaattttcgttctttatttcctttacttttgtgtgatttactttgtttttctaatattcttgttgagatggctattaagcttattgagttcttattttctagtataaatatttaaatactgataaagtcacatttttatcatataatttgaagtatttttaaacttccattgtgagttttttttttgagctgtgggttatatagaaatgtttttaaaaatacgtcaccaaatgggattttaaacaatttttttcatatttaatagcttttgatttgattgcattgtgataagagaatctcrtgtatatgaattgattattgaactcttgttgaatttgcattatggcccttctacatggccagtttataaacactctccattgttgaagaatgtgagctctttaatgttgaatgctgtatatttctttggaatccttgtgcatactattgtatggatgaccataatttctttattccactttgatcatttatttggtattacagacagtgcttataaaaatttttttatgtctgtctggataaccatgtgattatatccagaggagaaattcatgttactgtactttcagagtatatgccttttaaattaggatcaagattgatctagtttataatctaaatacagtgtatgtttcgtgcctgtttccctgtgtccttgttctggctattagcaaatttaagactgttttccattttttaaaaatttatttattttgttattttctttcagggaatagaarggacttttccattcaattatgaggttaaaaattgctgtcttttgatttctagttctttatgaatcagatttagtcacaatttatttttctttaggagaactgtctattcatgtagccatttttttttttttttactgggctgtttgtcaccttttttactgctatataaaatttctcctttgccacatgtggcacagaaggcttaaggtttgcaagtactagatacttgtttttatttgacttacttcaaaatgttgtttgctttagaaatggatgatggaccttctcgaagagatcatttcatgaaaagtggatttgcctctgggcggaattttggaaacagaggtaagcatctttgtctttccttaatctcctgaactgttgaataattggatatatagaggctttcatggccatttggtacaaagctaagtctgttgtaagtcagtgtgtagtagacttggtgttgagataatgagttcatcatttttccaagttcattttcttttttctgttttacttctttgggatagtagggagtagtgttaagttgattagacagattggttggagggatggatgggttggatggatggatgattcacagagctgctgcttaatgtgtttgtgatattgatttccaacaattgatgtgggaagaatatttgtaaaagcttcagggattagaggtgagagggactctttcttgaattttatatttttcaagaaaaggcagtataggaaacatttgttagctcattagtattaattttttaagagtttattttgccattattggatttttaaattttacttttagaacaaccacctgatatgacagataatgacacagcaaaacacctttctacagtccatttttagacttaatattaacatgctagaaatatgtgctatattttattatagtgcaataacatattagaacttcaggttaaatttatttgaaaatccatacggtcatttttttatcttttaggggatgccatagcgagggctatttgttaaacatacttgacacttattcttgaatttatgagatgttattttttgaaaaactctattgagacttgcagatatttttgctgtggaaactaaaagatgcatgatgttttatttgacatttggaaaatttaatttctttagatacaataaacacaaatttgagttttatattttgacatgtttctgccactaatagaaatgatttattcaaatatacacatatatattggtttttaagcctgcatattaagatgcattgtttatttggacaatgtaattgtgctaagagattcagatgagattttgttagctactattaaaattagaaatattttaatattacatttaggagcatatttattatttacgtatcttttaaaattatattttagtagaggttatgtgatattttgatacaggcttctaaatattattgaataaaacctttttcagtgagaaaatcatcactgaggcagattttaccacaaattattttcatgttttaggttgaaatacacataaaatttccgatcagaactctcagttgttaatactttaaacaattagctttatattacctgggacattgtagacccatgagtataacttattttccatatgattcttctaacattttatatagtttccttttttttttctttttcttttttgagacagttttgctcttgttgcctaggctggagtacaatggcacaatctcggcttactgcaaccttcacctcccaggttcaagtgattctcctgcctcagccttccgagtagctgagattacaggtgtgcgccaccacgcccagctaattgttttttattagtagtagagacagggtttcaccatgttggccaggctagtcttgaactcctgacctcaggtgatccacctgcctcggcctcccagtgtgctgggattatagacgtgagccaccacgcctggactgtatagtttcaatcttgattttcttctcagtagaacttgcataactaataatgtggtttttgaagttgactcttcattgcttaaaatatcgactagcttgttatgtcctgtgaagtatgtctgagtagcttggacttcttgaatcacacatctttgaaatctgattaaaatacttttatagttgggcatacacaattttacaggtggtttcaggagttacacagatcccttttaactcccctctacaagggttttacagaggtaagtaagacagtatatagggatcacagggaatgctttaatttttttctcagtgatagtttaaagcatcattttatgctgttttggatgtctctcctgttctttttttaatgttttattttaaataatcgttcttgctatcacatctctgctctcgagatttttaatttagtggtagagaaacacatggaaagaaatactactttaaaaaggtacagatagtatgctgtgggaatgtggaagaaggataaattatgactggagggctaaaggaagacttcacataattggttttttgaagaatgaagtgaattttgataagacaaataagaaagtagggaatgccatgccaaaggaatagcatgtacaaagatacaaaatattagcagttgacagtgtggagtattggagttgtttggtgtgaattaaaatgttgggtgtttagaattacatagtgagaaacaaagctaagaaggttagtatggggaaatagtatggcgagatggggaggccaggaggggagtggtagtcttaggtttttcccttatgtagccccttgttttaattttaaaaatggaaaggatatgataaatataagaaatagaaaaataaaaaatagaacagttaaacaggacacgagtgtaagattttcaatagcagtgactttcacacagggcagagcgtaatagctggctctatcaggatgagaattcaacatayagaaaactatggagcagaattttcctgcttgaaggtctccaatataataccaactagtagaaagctgtgtttcaccggtagtagatttgtttttaccttggtatcataatttaagagtttttcttttaagttgcaggtatattaattaattttaggtttctgtgctactcttttcccatccttggaagtctctttacgccagaaattcatttaattcttagtttttgatgatgacacacttaattttrtatgttaaagagtttaactgtccancctttttcagatgctggtgagtgtaataagcgagataatacatccacaatgggtggttttggagttggaaagagttttggaaacagaggtaattacttggttatgatatcttacaatcaaaacttgagtgattttttaataattgagtttaaatactgattgacagacattccataytgacatttaatttcaaggtatatattctgtgagtgcctttgcactaaagattatcttattaaaacttattwaaaacattttttaattttatgaaagattactgatgaatgcttttaaaattaattctagagacatgtctgtatgcttcagagatgcataactcttagacataggtttttaggaaataagtttgaaagcaaaacttgacgactttttaaaaaagagtaaacaaaaagaagctaacaagattttcatgttattgaggagaaaatcattgagttattgggttataatttagttgtattgtccttagcagatgaagagattgagtttgtaaaattttgagaattttgatggttttaaatagaaaacatatagtggttacactgayatattcctctgttttgcccatgtgcatacagaggagtatatgacaattgaggtaatacagaattggctgaaaagaaagttgtttttaaccttaagagaatggagttgataaactgacacaaagcagaaattgttgtacagcctgagtgaatttgcatgtgatagctatgtatacaattgtgtatckcttatcttagaaggcatcataactagtagttcctgtgtggttatcatttttaccacagaggtacaggaaattgtttcattttatattttgtataggtttttcaaacagcaggtttgaagatggtgatagctctggtttctggagaggtaaggttgatatttttgtgttttaaaatttaatgtcaagagtacatgctaaaaaagagaaattaagattaagtctcttagtccgggccaattctaacttatttaaaccagattttatgaagtagctatatccaaagccttaaccaaggatattactgctttgtacataaagaattcaggcatcctaatttggcctgttgccatctgccttaatccatgaggtacaacttttgaatgctctgaaacttaagaaaatggggatagataataaaaagaagtagtcaagaagtgaaacttcactctctatataaatacagtttgtgatgtatagggtcacatttagattcaaataaatctaagaaaaagtttcatgagaatgtaaatcagtgctgaaattaaagacaattccattgaaggtactgacactctacaggaatacagagaatgatgagaatgatgaaaataatgataccagaagatggactacgataaaccagtgcattcccaaatctgattgagtygatttgggtgaggtcttagaacctgtatttaaaagcatccatggtgatcctgatacctcctgtgtttggtaatcattgatgtatgaaatctttataacatagaacactttagggtgccaaacttggcttcatgtctctgccttgctacctgctagttgaagtagaacaagttgcttaatttttctaagccagttttctgttccatagaatgraaggtattcattttataggtggttaggcagrctaagtgagaatgcgtgtaaaagcacacagctgaataccagacacattcatgacaaacactcagatgtcatccatctatcttcattaaatatttgaagctgatcttattaaacactttgattcccaaagtcaaaaccaagcctagacctgatcaccttaaaacacttttggtataaggccggattttaattatcaaatgagactgtttctccaaactattgccagtctctttctccctacttctctttttttctcctatcccgttcaaatgaaaacatatatgatgtagaactagtatttgtgagagaagaaaaataccatcatttttattcttttccatttctatgtgtttctgttctgatctcttttaactcatttaatattcaagatcatttctacttatacacagacctttctacctacttgacccctttgtagagatggtgggccagggagcttttgaatacaaattccagtttctcatggcacttgagagaacttctctccgaagtggcctgcttgctttgttttgatctactttcttcttttttcgtttttagttcccctaaaaaaaaaaaaaaaaaaatatatatatatatatatatatatggattgaattcattcattgtctcagttgttagcaagcccaagttctgagctcacggtagaagctttttactctggacacaaatggatagtatgtttttaaatttttttcccctgtcatctactttgcttaagctggtatattgtagtgataaggaactcagatactggatttgaacacgtaggtgtgagactcagatcctcctcctggcaattgtattatcttgaaaaagcctgtaactttctgcttttcattttctctatttgtataatgatgactatatctacttcacaaggtttttgtgaaactttagactaaagttaatacatgtgatacatttagaacacggccaggtacatactttatgtgttgttattattatttttcgagacggagtctcgcactgtcacctggcctggagtgcagtggtacagtcttggctcactgcaacctctgcgtccagggttcaagtgattctcctgcctcagcctcctgagtagctgggattacaggggcccgccatcacgcccgactaatttttttttttttttttttgtatttttagtagagacggggtttcgtcacgttggccaggctggtctcaaactcctgacctcacgatctgcctgcctcggcctcccacagtgctaggattacaggcatgagccactgcgccaggccatatgttatttttgtataattaataggttgtaactaatcttggtatcattatctcatttttgtttgtgcttagctttatttcctaactgtatagagatcacttattttttaaagtaattttttattttgaaatagttttattcataagaagttgcaaaaatagtacagaggtttttcatgtacccatcacccaacttctcttaatgttttctatttttattcccactgtgatcaaaataactgtaggtttattttagggaaataattggccaaagatattgtgagactctttcccttgccaggtcccagattagtagttttgttttttttttttttttctcgaaagcagtaaatattagttatcatcattgttattccagggccaacttttcaaaacttatttctttcctgcccttctacattgtattaagtcctgccttccagaaagttgtcttgttaatggctcttcaggattgtttgtcagttgtcagctgcagctgaaataggagactgcaacaagagctttgggtcactgtttattgtagaacattattagttgttaaatggattgggactttcacacaggaacttagctaataacctgcaagctgtttggtcacttgctgtcattattttgacttaatgttcccagatattaaatattaatgatatgtacaaagatcccttgaaaccatctttgtattcccaaatgtgactttttttggaatcttctggaaagcctgatgtcatagtaataacatagaacttttacatttcgaaaaatcattcctttcagaataaacatttctggraatggggyctaggaatttatttttaaccaactctccaggtagttttcaggcagccttcagtatagtaatctctcatactactattttaaaactctgggaatgttacttactaatatcaaaaatggagaagctaggatatccccaaattatttcattagsatgaatgggggaaagtttgcatatatttaagaaagcacaaatgtcttgagtttattaagaatggtaaattggccgggtgtagtggctcacgcctgtaatcccagcactttgggaggccaaggtgggcgaatcacctgaggttcaggaattcaagaccagcctggccaacatggcaaaaccgcatctctcctaaaaatacaaaaattagccaggcatggtggcgcatgcctgtaatcccagctactcggtaggctgaggtggggataatcgcttgaacccgggaggcggaggttgcagtgagcagaggttgtgccagtgcactccagcctgggcaatacagcttgactccatctccaaaaataaagtaaattacagaaaagatatgacattataaatagaagagtctagtggtctatggaccttatgtgagaaccacttgattacttaatagcttagatgttcctgaaatcatttttggtcaaactgaaatttatgaaattcttattttttgttttgttttgctttgcgtagtataatgcttggcaaatagtaggttctcaatttcatataataaacatttaatatttagatacatgagatgatttgtatagggaatcgactctgagtaatgtctttatatatctgttaaaattatttgaagaaatatgtttatattttaacttatgaaaatattttgtcttcttactaatttatcttgtgacagtgctattctttatatattgcatcatttaagttaattaaatgctatttacatgttaaatttttattgaagagtctagtaatgactgcgaagataatccaacacggaacagagggttttccaagagaggcggtaaggaccacattttggaacaatttgtacttaacacagagacactaaactggtaaaactgattttgaaggagcyggatgaaaaacactgatcgtgaaaacctttgaagaaaaatactttggtatatgttttctgcttttaatatttgagtgagtattcagtgggtgcccctcctttcactcttttattttatttttttaagtttttggttcaggggttcatgtgtaggtttgttatctaggtaaattgcatgccatggggttttggtgtacagattattttgtcacccagataataagcatagtccctgataggtagttttttgatcctgtacctcctcccactttctaccctaaagtaggccccagtgtctgttgttcccttctttgtgtccatgtgttctcagtgtttagctcccacttataagtgagaacattcagtatttggctttctgttcctgcattagtttgcttagaataatggagctccattcatgttcctgcaaaggactttatgtcattcttttttatggctgcctagtattccatggcgcatatataccacattacctttgtccagtctactgttggtgggcatttaggttgatttctgtgtttttgctattgtgaatagtgctgtggtgaacatatgtgtacatgtgactttatggtagaattatttatattcctttgggtatatacctaattatgggattgctggatcgaatggtagttctgttttacgttctttgagaaatcgccacactgttttccacaatggctgaactaatttacactcccaccagcagtgtataggcattcccttttctctgcaagcttgccagcatctgttattttttgattttttaataataaccattctgactggtgtgagatggtatctcattgtggttttgatttgcatttctctaacgattagtgatgctgagcattttttcatctgcctgttggctgtatattgtcttttgaaacgtgcccatgtccattgtccactttttaacggagttgtttgtttttctgcttgtacatttaatttccttatagattctggatattaggccttcgtcggatgcatagtttgcaaatattttctcccattctgtaggttgtctgtttactctgctgatagtttctttcgttgtgcagaagcttgttcatttaattaggtcccatttgtcaatttttgtttctgttgcggtggcttttggcatcttcatcacagaatcttccagggcctgtgtctagaatggtattttgtaggttatctccagggtttttatagttttaggttttacatgttattctttaatccgtctggagttgatttttgtatgcggtctaaggaaggggtccagtttcaatcttctgcatatggctagccagttatcctagcgccatttattgaataaggaatcctttccttattgcttgttgttgtcaaccctggcaaaaatcagatggttgtaggtgtgtggaattcctatttgcagatggtatgattttatacctagaaaaccctataatctctgccccaaagttccttgatctgataaattacttcagcagaatttcaggatacaaaatcaatgtacaaaaatcagtggcattcctatccactatattgttaaaatggccatactgcccaaagctatttacagatccaatctaccaataacattcttcacagaattagaaaaaaacaattttaaaattcatatggaaccaaaaaagagcatgaataggcaagacaatcccaagcacaaagaacaaagctggaaagcgtcacattacctgagttcaaactatactacaaggctgtaataaccaaaacagcgtggtactggtccaaaaccagatacctagaccagtggaacagaatagagagcacaaaaataatgccttcttttactttttttttttttttgagatggagtctcactctgtcacccaggctggagtgcagtggtgtgatcttggctcactgcaacctccacctcccaggttcaagtgattcttgtgcctttaccctctctagtagctgggactacaggcatgtgccagcatgcctggctaagttttgtatttttagtagagatggagtttcactatgttggccaggctggtctggaactcctgaccctcaggagctgtcacctcagcctcccaaagtgctgggattaccggcatgagccactgtgcctgtccttgttttactttctaatgtcactggatctgttggttgtggtttttttttcccccctatgatctccagaatgtgctatcaattacagaagagggacaatgtgaatcttggtcagttgcaatttagatgaactggggatgtctttgtctctgaatagagtcattggaaatttgaggggggaagaaattgtagattattttttgttcaagtctagctgtatttcaccatactctggtaattcagcttctattgaatttgagatgagattgtatcaaaaattaccatgcttaattcttgattatatatgggcagtcatgttaaaatagcaatgacaacaaaacgtatgaagaatatagtgaacttactataaaattgctgaggatgtgcaaatctatgataagaggttttattgtttggaactacatagtaatcagatacatcagtgtttttaccgcaccttggagacattcttttcctttgcccattaggtaggtagctggctgaattaggccctccctagtgaaggtaggacttgtggatttcataatgagggaagactgtctccttaattacttcttatgataattgtggagaggggtggtggtggggagaaagttaagctaagaaaaaacaagactcatcttttaccatattttttttaacaagcaatttttggcacttaatgttcctaaaacatagctcatatttgaaatttttttcttcagaccagtgaatatcttttgtactattaacatttactttaaatcaatttaattcatatttaaatgaggcagtcgaaaccatttgcagctctatgtgcttggtcctgacttacagattagtgtaggataattagcaggggcacagccattttgcagggtatccctgatttccattctctgtagatgtatacatttgaggataggaagtttgcatataggggtcactcagaaaatacacgtgtgtatatatgtttatattaaaatatgtagacaggtacacataccataagtgtatagttcaattatgtttcacaaactgaactcacttgagttcagtgtgttcaccagcattcaggtcatgaaatacaaattactggcacctcaaaagccccttttcatgttcattttttactcactaatgactcattacccccaaaacttctgttatgacttctaacagcatacgataatttcgtctatttttatacttggtataaatggaatcatatagtatgtagtgttttatgtttaccttcttagtgtgtttgttgcaattgtagatcattattactgtttagtattcttttgttttactgtttttctattagtgataggtatttggattacctccagtttggggccattgtgaaagtgcttctgtaaacattctagtattcttttggttgtcattagtacatactcagaagaagaattgctaggtcataggctatatatatttttggctttaatagtattgtcaaatgttttcagcgtttaaactaagatacactcacattctaaccaatgcttggtattttctttttctctccttttaaccattctgctggttgtgtggtggtgtactcattttgtattaaatttctatttttttggactaatggaatgtggagcacttcttatgtttattggccatttggacatctggacatcttttgtcaagtcgtttgcccatttttctgttgagtatctttacttttacctttttatttgtaaatgatttaaaacttaaaagttgcaagaatagtacatacagataggccggacgcggtggcttatgcctgtaatgccagcactttgggaggcgggcagatcacttaaggtcaggagttcgagaccagcctggccaatatggtgaaaccccgtctgtactaaaaatacaaaaattagctgggcgcatgcctgtagtcccacctactcggcaggctgaggcagaagaatcgcttgaacctgggaggcagaggttgcagtgagctgagattgcgccactgcactccagcctgggcgacagagagagactccgtctaaaacaaaaaaaagtaattgtcattaatctggagtttatttttgtatataatgtgggaatcaatatacattttttttccatatagatgttcagttgacctagtatcacttactgaaaagactgtcccttctgctttgcactacagggctgcctttgtcctaaattaggtggcttatatatgtgtatctgtttctctaggttttattccgttggtcagtttttctatttttgtaccattgccccataatctaattactgtggtttcataataggtcctgatatctggcattgtaagtctttcaagtgcttgtttttcaagtgctatggtttggatgtttgtccttctcatgttgaaatttgattcccagagttggaggtagggtctaatgggaggtatttgggtcatgggggcgcagatctctcatgaatagacctgtttccttgtggggctgttgagtgagttgcctactagttcccttgacagctagttgttaaaagggcctggtaccctctacttcctctgcatcatatgatctctgaacacaccagctccctttcaccttcagccatgggtggaagcagcctgaggctcttcccagatgcccagtcttgaacattttcagatatcaaatcttgagccaaataaaccttttttttcattaattatccagtctcaggtattcctttataacaacacaaaacaaatgaaaaacctcaagattgcctgttatttttagtcctttgcattcctgtgtgatttttagaatgagcttaatcaatttccagaagaaaaagctatcttaatttgcattgctataacaaaatgctataaactgggtagctttgtaaacaacagaaatttatttctcacagttctggagagtcagaagtctgagatcaaggcaccagcagattcagtgtctggtgagggcccatttcctggttcatagatggtgtcttctctctgtgtcctcacatggtggataaggccaggcagctctctggggcttcttttataagaacactaattccattcatgagggctctactgttgtgtggttacatcacatttgtttattcttcagctgatgaatgtttgagttgtttccacttttgggctatcatggctaatgctgccrtattcatttgtgtacaagtttttatgtgaacctgtgttttcatttttctggagtatatacttaggagtggaattgctgtgtcatgtgctaactcttaatgtttaactttttgaggaactgccaaattattttctatagtagctgtaccattttatattaccactctcaatgttatgagggttctgatttctccacatccaccgatactagttattactggtgtttttttaattatagccattctactgagtatgaagtggtatctcattgtgggttttttgtttttttatttttttgagacagggtcttactctcacccaggctggagggctctgtcacaatttcggctcactgcagcctcaacctcctaggctcaaataatccttccacctcagccctctgtgtagctgggactacaggcgtgtactaccatgccctgctaatttttgtatttttttagagatggggttccactacattgcgcaggctgatattgaactcctgagttcaagcaatctgcctgcctcagcctcccaaagtgctgggattacaagcatgtgtgccacagtgcccagcccttattgttgttttgattgcattttttgatgactgtgatgttgagcagcttttcatatgcttattgaccatttgtatatctttggagaaatgtctttcagatccttcactcattttaacaattgggttgtctttttatgttctaagatttatttatatattctcaatgtgagtatcatcagctacctgatttgcaaatgtttatttttttttaatttatctaatttttttttttttgtttttgagacagagtctcgctctgtcacccagactctggggtgcagtggcacagtcatggttcatgacagcttcaacttcctggtctcaagcagtcctcccacctcagcctcctgagtagctgggactataggcatgtgccaccatgcccagctaatttctttattttttgtagggatggggtctcactgtgttgtccaggcttgtctcaaactcctgggctcaagcagttctcccttcttggccttccaaagtgctcggattacaggtgtgagccactgcatctggcctgcaaatgtttaataacctcctgtgggttgtcttttccctttcttgatagtaccctttgaaacacyaaaatttaacatttttatcaaacccagtttatctttttatgttcttttggtgttataactagaaaactgttgcctaatccagagtcatgcagactttttcctttgtttccttctaagaattttatagttttagttcttacacttaagtctttgatgcattttgaattcatttttatagatggtgtagggtgggggtccaaattcttttgcatatggatacccagttgttctagcaccatttgttgatgttttatattgatgtgtctagatgtggatctttttgggtttaccctccttggagttgagcttcttggatttatagattaatagttttcatgaaacttgggatattttgagcttttttgtggtaagatctctataacataaaattcccatattaactattcttaagtgtataatttttggcattaagtgcacagtattctgtcatcactatcatcacccagatagaaactttgtattccgttagacaacaattccctgtgtactcccttaaccctggtctttggtaacctctattccatgttctctatgaaatttgtctattttaggtatttcatacaagtggaatcgtacaatatttgtcctgtcgtatttggcttattttacttagcatcttgttttcagtgttcatccatgttgtagcatgcatcaaaactacatttcttttaatggttgaataatataatgtatttaccacattttgtttatccatgtgacggacacttggattgtttcttctttccgactattgtaagtccgctatgaacattcacctacagttatctgtttgagtccctgttttcaaatcttttggttatatacttacaagttgagttgccgggagatggaactaggtaagttaaaatgctgcgaaatttgctgtttaaaagaaaaaattccctgggttgcttcaagccttttattgatttctagagtttggaaaaagttaattctgacagttcttgcccatttttttccttgcctttttggagtagtggaatttagagttccttacttggccatttttgctgatatcagtgatacatatcattttagtgttttcattttattcattagtatgtagaaatataataactatctggtaagtatttttttaaaaagtaataaaagatgttccattttcttttatacaaaggttagaggatttataaggtaatttctttctgaagatattgtcaccaaacatctttaagagttagattgtcagctgtcccttatgaaatgcagactataccttctgggaggactcaggttactttaagaaatatattttgttggccgggcgcagtggctcacacctgtaatcccagcactttgggaggccgaagtgggtggatcacctaaggtcaggagtttgagaccaacctggccaacatgttaaaaccccgtctctactaaaaatacaaaaattaactgggcgtggtggtgcagccctgtagtcccagctacttggagtctgaggcaggagaatcacttgaacccaggaggtggaggttgcagtgagctgagatggcgccactgcactccagcctgggtgaccgaacgagactctgtctcaaaaaacaaaaaacaagaaaaggactcaatttgaatttttagaaacttacagaaaagaacagagtgattaaaggtaaagattaaacacagatgaagagaatgaattaattcaaagataaatctgtggaaattctctaaacttggaaatggaaaacacgagagtggttaataaataaggtatggaagatagactaagacctgtggttcaacatatgactgtctcctgaggagtggccagaaaatgggaggaggacaggaaagaagaatattcaaagagaatagatgagacttttccagagttagagaggcacaagagtcctcagcaaataaaattaaaaaattcatacccttatgcatgtattgaaattatagtattacaaagattttttaaaacctataaaactactagagaaaaaaggtagattcacctttagaagaacattatattcacaacagaattttcttcagtaaaggtagatttcagaatgtaatagcatagtatattcagaatgctgaaggagaatagctctgaatccaaataactatattcagataattaggtgccagggagaaataatgccattcagataaaaatggtgtttaatactctcatattgttgagtaagaactactaaattgtatacagtagtaagacaactgattgcaggaagaaaggcataggaaacaagaagcaatgaggagcgaaaaaaaagatatgtaaaacaggtaaacatattggtaaacttaaataagtattgactatataaactagcaataatgactattaatttaggggttccagaaacaaaagtgaattaaaatactagcaaatgaaaagactgaaattcttgccagctcagttgaaaggaaaaatatttcttaataagtaaaatgaagggtaatcagagaagggataagataaaatgtgtaacttgctgatggaggaaatccaatagaaggacagagctttgtaggaaggaaggtagaktgaaaatagtttatttcctaaatattcgtggtgaaaattggtaaaaataaaatacatagctttaccatttggggaaaacaggacagaaaggagaacaaaaagcatcgaaaaaactctgtaargagaaaacacaaagattgtagaaataaaagacctatgtatcagtaatcataatataggtaagcatatttcaatatggagttgaaagtaaagaggtcaggcatggtggctcatgcttgtaatcctagcattttggcaggccaacatgggagggatctcttgaggccaggaattcaaggccagcctgagcaactaaatcttgtctctacaaaaaaaaattttttttttaaattagaaaataggctatggccataccaccctgaacgtgtccgatctcgtctgatcttggaagctaagcagggttggacctggttagtacttggatgggagactgcctaggaatactaggtgctgtaggtgtcgggggagggcaggtgggggaagagagcattagggaaaagagctaacgcatgctgggcttaatacctaggtgatgggttgacaggtgcagcaaactaccatagcacacgtttacctatgtaacaaacctgcacatcctgcacacgtaccctgaaacttaaaagtaaagagaaaaaagtgttcagtaactcaaagctgaatagaaatagagacaaagtatactgtaaggtagaattattaaggataaattcatcaggaagacattatagttctgaacatggttctaatctaacaatatactaagatgcacaaaggaaaatagacataaggaaaaattcgcaaatcctagtaagttgagacagcagaacagagattaataagaatatagaagatctgaatgccacttactcagcttgatttaatatttgtttggaatcatatactctaaaattataaatcatatatttttccagcatgtatggaaaatatgtacaatttgatcatcttttaaggatgacctatgataaatatatcataggtcatgttctcttattaaaataaaagaaatcaataagtctaaccttcatgatttagaaactgaatttctcagtttatgaataacagttcatatggaaatcctgaaatatttagaatttaataacagtaagaacagagcacatgaaaactttgaggatatagttaaagcagctgcctcttagaggaaattttatagccttaaatgcatcagagaaaggataaaatgtaaaacttgctaatagaggaaatctagtaggacagaactttgtaggaagaagactagattaaaaatagtttaaatatttcttttctcagaaaaaataatgagttaagtgttcaagccaagtagttagaagggagaaaactcaaataaaaaaggtagtagacataaatgaaatagaaacagatacaatagagtgttcagcagtaaaagaaaatgaggtagtttcatatgtcaacaaagttgaataaaaggaaaaagacgtggggccaggcgctgtggctcacgcctgtaatcccagcactttgggaggccaaggtgggcagatcacctgaggtcaggagttccagaccagcctggccaacatggtgaaaccccgtctctactgaaaatacaaaaattagctgggcatgttggttcatgcctgtaatctcagctacttgggaggctgagacaggagaatcgcttggactctggaggcagaggttgcagtgagccgagatgatgccactgcactccaacctgggtgacagagtgagacttcgcctcaaaaaaaaaaaagatgtggaagacgataagttccatttagttcgtaaaactctaacataacactaatatgttgcttaaggctaagtacatagttgataaaattaagagcaaggaaatgaaaaactattcaggatattggcttgttggatgttagttggaaggagtgctcagggagaagagaagcatagggcaaaagaaaaacatgggctgcaaatatgttggaaacattttagtcttaatctgggcagtggagataagctttcattttattatatttttaacttacatatgtgttcttttactttcatgaaaatatacctttacagaaaaggttccagaagatacaatttttttgaagagttttgtttcatttttaaataggttttaaaatacatatactctaatattcagaaatagcatatatagaatttatctttattcatcattctctttaagtataaatagttgcaagtttacaaacggaacagtctttatttcctgcccagttggcactttggttttgcattaatctggttctgccctatgagtctgccctatgagtctgctctatgtgcaattaaattttacttgaactgcttctactaatcttttggtattcaattcaattaaaaattgttcttacctggaaatcagactttatatgtgcctgcatgtctgtgctttgagtaagatgtttactatattctatatggagcagatacaagcctaggatttatttaattcttttgtgcattgtggaaatccagttaatggtgcagttttggtgacttttagtgttttaattcaagtgctactttttcctttaggtgatttttagacttgattctcaaagcaagcagtgaggttttaaaaaattgtagccatatctatttatattagtaaaattgaacacttaataggtcaaaatgtcatttctttttgacaacaatgcctttaaacacttgtttaaagttactgaattattcaaggcttaaattaaatttgaccatgtccccaagatttctttgttgttgttttgtgttgttcttgtgtgtgttttaacattataggctatcgagatggaaataattcagaagcttcagggccatacagaagagrtggaagaggtagtttccgaggttgccgtggaggatttggtctaggaagtccaagttagtactggatttgcaaatgatgtgcttcattaactgttaaaaagaaaatgatttaaaaaaatacgtatcaaagaaggttgttatgaggattatatgagaatagcttagctcagtgactaatacacattaatcaccacattgtatataacattattttttagagagatttgattgcatattggttaagttaaaatatatgaatttaaaaaataagtttgagtgactcagtactttaatattacatactgttcattgttttagagctttgataatatggctgaccttataaacaggtgaccttctatgtggctttacctccccacataccttctttcaccagtgtggctttctaccttaaatttttccagccatcattttttagagataaggtactgacttcagaggtcactgttggaatgtatgtgcctcttaacagaggagaacagatttatggttttggaagctaaaaacataaatttgtaataatgatttaatagatgcgtagcagactagtgaattgtcactttcacagaagtttagggattttgaagggttaccatgcaggactggtaaggtttgatttggcaacagtgggagcaaggggtgctattttgaagaataagtagtgaaatgatgcaatgtgaagtttctcaggcaatttctagagatttaacttgcttgtatcatattttggcatagcactggccctaatttatttaacgaaatattttaaatacattttgaggaagtaatttatcattgaaggacattatttgtagagaattcctttgcacaatacttagtttaacttggtttaatagaatagtttaacttagtttaatagaatagtttaacttagtttaataggacagtatttttctattttaccctgcatcttttaacttctgataccataacttgatttttttctgtttactgaacgattaaaaaacttcttcaaagtaatgtaatctaattttactttctgcaaatcaagataatgacttagacccagacgaatgtatgcagcgcactggtggcctttttggttctagaagaccagtattaagtggcacaggtgagaaatagaacttattactgaatattagttactgatgtatgtttttagcactaggattagtaaacctaatatatatgttaaagtatactagtttggcttatgattttctctgcttttagatctgtaggtaaaaatatgtggacaattttgtctcccttataaaatttgtgcaatgtgaattatttattctgtgttatctaccagttaatttgaggtgtgaattattaactagaggartaaaggattctgagttaggggaaaaggatttgtgtgagttgaagtgaaaatgaaaacacaattgatgaaaaatgttcaaatgaggttaaggttaaagttaaacctagaggccgggcgtggtggctcatgcctgtaatcccagcagtttgggaggctgaggcaggtggatcacttgaggccaggagttcgacaccagcgtggccaacatggcaaaaccctatctctactaaaaatacagaaattagctgggcgtggtggtatgtgcctgtagtcccagctactcagatgcctgaggcatgagaattggttgaacccaggagatggaggttgcagagagccaagatcacgccactgcactccagccttggtgatagagtgagacttgaaaaaaaaaaaaaaaaagttaaatctaaaattaagagatggatgggttaaaggaccaggattcctaagtaataactttgttgaatagaaataacaacatggtttgtgtgcttgagcagcagctgtgttttatctaaatatgttgtgaaacaatgccttacaggtaatggtgatacttctcaaagcagaagtggcagtggaagtgaacgaggtaagttcttattttgtttacccgaaagaagttaaaatcattgtattccaaatttaatttttttctgtacttcactggttggaaacaaatttaatttttgaagttaaaggtaactgttattgcttttatacactgtgaggaccataaatttacacagcctgttttagatagttccttaataccctccaggttattgcctctctgatccagcaattccattataggaattatatactatagatgtatttggaaatamatgtacaaggatgttcactgagatgtcatttataataagtaaaaactgaaaatcacctaaaattcataaataaaaaactgtttaagtccgggtgcggtggctcatgcctgtaattctagcactttcggaggcctaggcaggcagatcagaaggtcaagatgagaccatcccggccaacatagtgaaacccccgtctctactaaaacaaaacttagctgggcatggtggtgtgtgcctgtagtgccagctactcaggaggctaaggcaggagaatcgcttgaatccgggaggcggaggttgcagtaagccgagatcataccactgcactccagcctggtgacagagcgagactgtcaccagttttttgtttgttaaacaaaaaaaaactgtttaataaaataataatcatgaaatgagatgctgtgtggaagttaaagacagatataatatgtacaaatccttattaaaacaatatgctttttcttatggaatagttgatttggtctgaaggataaagttagctcaatatataattttttactcttaaagttttttcttttctttytttttttttttgagacagagtctcactctgtcacccaggttggagtgcagtggtgtgatctcggctcactgcaactatcgcctccagagttcaagccattctcctgcctcagcctccctagcagctggattacaggcacctgccaccacacctggctaatttttgtatttttagtagagatggggtttcacctttgccaggctggtctcaaactcctgacctcaggtgatctgcccacctcagcctcccaaagtgctaggattacaggcatgagccactgcgcctgaccttaaagttttttcaaagtataaatacttcagtgtcatataaaagttaaaatgctctccagactagtaaatcaatgaagcttgctcgatgtatttggaagattctcagtaattattattagtctgagagaattcagagtgacatttcccccacccctgctgattcttggattcttcaatatagaaagagtttattaaagactagctaaaccaaatctcctacaaatattcacagcctatatgaaggaggatttcaagacctgtggacatacaagataagaaaattagagttcacatataaaaaatgttacatctcattagcttttgaatctaatgcagtcatagtacctaaaagtggaacaacagattactcgttatctaaaaaccagaaaggtaatatatagaaaggagttaacaggcctgattgttcatmaaaaattcatcagtaaacgaaattgaaaatcttacttaaaaggctgttccttggctagtgtatattagttagggttctccacaaagacagaccaaaaggaaggagggaggagatggatggatggatggatggatggatggatggatggatggatgaatggatggatgaatggatggatggatgagaaggaactaattaggggaattggctcgtgagattatggagcctgagaaagtcctatgataggctgtctgcaagctaagaaccagggaaaccagtagtattgttcaattcaagtccaaaggaaccagtaaagttttttttttttttttaatactttaagttctaggggacatgtgcacaatgtgcaagtttgttacataggtatacatgtaccatgttggtgtgctgcacccatcaactcatcatttacattaggtatttctcctaatggtatcccttcccctgtcccccaccttccaacaggccctggtatgtgatactcccctcctcgtgtccatgtgttcttattgttcatctcccacttatgagtgagaacatacagtgtttggttttctgtccttgtgatagtttgctgagaatgatggaaccagggaagttgatggtgtaactctcagttcaaggccaaagacctgagaacctcttggtggggcggagtcagggggcgggggattgctggtacaagtcctagagtccawaggccagagaacctggagttctgatgtccaaggacaagagaagaagggtgtcccagctccagaagagagagaaaatttgcctttcctctgcctttttgttctgtctggcccctagcctattggatggtgcctgcccagattggatgagggtcgatcttcttactctgtccactgatacaaatgccagtctattctaaaacaccttcacagacatacccagaaataatggtttatcagctacctgggtatcccttaatctggtcaaattgacaccgcaaattaaccatcacagctagcatctgaaaacttggatttgggacgggttcccaccatcctgattggtaagagcaactcattgtgtgtaaaccatttgtgcattgtggtttttgctgaatatttgctttccttctgggaatctggaatttggtatgtgccaggcagaaggtgagtacattattagcccctaataaaaaccctgggtactgagtctctaatgagcttctgagtctctaatactcttctctggtagagtttacatgtgttgtcacagctcattgctgggagaactaagcacatcctgtgtgactgcagtagaagacacttggaaactggtgcctggttttctctgggttttgcctatgtgccttttcttctgctgatagtactccctattttttcactaataaatcataaccatgagtatgactatattctgagtctggtgagtcttcctagcaactactgaactgggaatggtcttggggacacccctccaacacaggttcttttagaaaatacmttcctttgctgattaggaaagaaatataacagtttaaacaaagtgtagtaatatgtaatagtctcctctacgtaaaatcatcttgaatactacagaaactaaaaatgtacaaggttctatttaattgttycaagtatttgtaagaagggaatttaaagttttttggaacttgttctctttgaagacaagcaacgaaaataaagatgtgcacagccttacatcttgaccrattgtcacttatgaatttctttaataggtggttacaaaggtttaaatgaagaagtaataacaggctctggaaagagtaagttttccttaaacaaggtgtttgatttttatagtgagagttcttttacctttcaattttaaaaaacatgtatctcttttttatttgatcctcttcaagattcttggaagtyagaagcagaaggaggagaaagtagtgatactcaaggtatattaacatttgtgtgactcacatagaagtatgttgtgttttaataatgcttaagtattttacttaaaaacaaagttatcttttaaaaatttgaacagtgaaaactttaaaggtaagcagtgggaagttccatagtatttaaaatttgatsttgtcaatttttgtctattttctcttatattttcttgtagtctctgtaaygtacattatgtttttaatttaaattccaaggaccaaaagtgacctacatmccccctcctccacctgaggatgaggactccatctttgcacattatcagacaggcataaacttcgacaaatacgacactattcttgtggaagtgtctggacrtgatgcaccaccagcarttctggtcagtgtattaattgtttctgtattagctatgtagcacactttgcctttaaaatacattatgtagtttgtaaagctgatatcaacacatagatttcacctttcgtatataaggtcttaggttggaaatttagaatgatgtcttaccatctataatrgaattaattgctatgtcaaaagagagtaatagatttcatccccactccccataccaggatgagaattttatttaaacttacttaaaaaatgcttttcctagtgattcaagatrttttcccaagattgtgagaaagtgtgtcttagggcagtgatttttctgagagggggagccctctgtctcctattgataattatacttagaacaagccattactgagcagaattcttcatatctcataggttttaagggggcaggaaaaatgtttttaaagccaccatttgtggagaatacttcatgattctgtcaaatcatattataatatacaggctttgaatatttacttctgagtggaggcatgttactaaagtcactttagtatataaagtagaattaacagaacttggaaagtagctcgaatgaaatatgcttataaatgatctgcatatgatatatagaatgtaatcactgcttttttttaaattttcagacttttgaagaagctaatctctgtcagacactgaataacaacattgctaaagctggttatactaagcttactcctgtgcaaaaatacagtattcctatcatacttgcaggacgagatttgatggcttgygctcaaacagggtctgggaagactgtaagtctttccccacatgtccaaactgttaggttttttgagctttggttcttccttagtaacttggtttcttcttttgagtagaaggtttgtagatggtttcagttacctgtcataagtattgatggttttgcttctgatttttattaggatttgtgtacttcggaagaaagaattctgaactattcctggggtggtgttgctgtccatagatgtttaatcttttctgtgtgcagctctttctgaaacatggtagtatcttaaacaaagtgactgaaagtcaaagcagagcttataaaacagagagggagaaagtaatttctgtattatagctggtacactcgaagtcaaaagattaaagaatgagaaacagttatgcattgtgcatgattccttagtattcagtgacctcaggttatgctaattataaaagaagtctgatgaaaccagttggttttaggactaatctgggagatttgtgtgttaattaacgactccataagatgagactcttatttctatgatcatagagtccatgaggtcataccattttagtcttaatcagccttcatagtagaattgtagggaaaaacaggtattgtatagcagctgatgagagtgttaaacrtggttttggaggtggattttagcaagtgtcttatttgcttaaatgagaaaactgtagcacaaaatttctgttgccagatgtaacttcaataagggtaatgtgttcagtaatacagatgatgatttctaagtttttactctgtgggccacttttgtcatccattctgaatgataattttatgacctcaaaaggactaacttagagtaattgttcactgtaatgatttgcagcgattacatctatcatattcctctataaatatgctaatgttgttgatctgtttagaattcgtgggtatgcttttgaaaatacactgaaaaactttgataggktagattaattttaccaaattttatattgtataataagagcataaagacataaatgttaagaacaccttgaaatgaaagttgttttcatttctcatsttaaatttaccagtaagatggaagtagagtctaaaggctataaggacatgaggattagctttccatagggataaaagtgttgtgctataagtttgtaaactaagcaacttaacttctaggcggcttttctcctaccaattttggctcatatgatgcatgatggaataactgccagtcgttttaaagagttgcaggaaccagagtgtattattgtagcaccaactcgagaattggtcaaccagatttatttggaagccagaaaattttcttttgggtaagtacatcagagtgctactcacaaaatagttttttctttagagatttttttcccctcacttttggaagaactcagtaataatgcactcatgtaatttttagcattacttaaagtatttttttattatcttgtttatggaatccttttcatttttgaaaagaaatatgcttattaaaaattaggttaataggttggacttggtggctcatgactataatcccagtgctttgtgaggcccaggcaggcagactgcttgaggccaggagttcgagaccagccagggtaacatggcaagaccccatctctacaaaaaataaaataactagccagcatgtggtgatgcacacctgttgtcctaggagtttaggaggttgaggcagaaggattgtttgagtccaggagtttgaggctgcagtgaactgtgattgcaccaccacactcagagcgagaccctgtctccaaaaaagtaaaattttaatttaaaaaacagataatactagaagtagaaaatagtgaacatactggtattatttcttggtagtttttaatgtatatttaaaaatgaactcagggtattctaataatttcctattcttttacataaaactttataacacagaaaattcttatttcataataagaactgatttttaatgacttttaaattgcccatgtgtatacattttatttctctgttctgaggtatttaggttctttctaacttggggctattgtaaacaaaattgcaatgtacatcttgctacatagtttttctgttttggccagatatgatgtcttacacctgtaatcctagcactttgggaggccaagatgggcagatagcttgagcccaggagttcaagaccagcctggaaaacatggtgaaaacccatctctacaaaaaagaacaaaaactagctaggtgyagtggtgcacccctgtagtcccagctacttgggagcctgagagattacctgagcctgggaggtcgaggctgcagtgagctgtgattgcgccactgcattccagcctagatgacagtgagaccttgacttatatataaaaaaaaccaacagttttctgttttaagtattttcttagaatagagttttatcaattttaatgttaaagagcaggaacttattttaaagcttgtaattaatgtatatttgtgcctgcagtctatcagaagtccaatttcagtataccctttgccaacatttagttatcgctgcctaacaaactcccttaaaacatagttgctttcaacaataaacatttactgtctcaccattttgggggcttaggaattggggaacagcttggcttagctgggtccttctgagttaagagtttcttatgagattgtaaacgagatgtcaaccaattctggttttattgtcaaccagacaagatgtcaaggcagtcatctgagggcttcattggatctctccatagggatgcatgattaaatggcactggcttcccctagattaagtgatcagtaagaacaaagaggaggctgtaatagcttttatgaaatagtcccagaagtcacacattgtccttctgccacattctctttgtaagaagcaagtcactaagtttgaccccactcaggagtggctatattataatttattggaactagtgcaaaattgaaagtgcagggtcctttgttgtaaaattattacaaatttcaaggcagcgacaacagagcattaaatgaaacacgggattcttctgaacttgggactctgtgtgactggacaggttgcacactcatgaggccagccttrcccacactgaagggggaaggtagaatccatatttgaaggaaggaatatattgaagaatttgtatatgtatgttaaaaccaccacaggtgattttattcttttccatgcttgaaatcactttaatatcaaacctgatagatcttttggaaaaacatgtggattgcttatttcagtgtttatatcttgctaatcctcatgtaacatgttgctttcaggcttttaaatcaagtaaaagatctcagaaatcaccactaaataacttatccatgtaacgaaataccacctgttcccccaaaagtattgtaattaaaaaaaaaaatcaagtaaaatatcaccttttttttttttttttttttttttaagatggagactcgctgtgttgcccaggctggagtagagtggtgggatctcggctcactgcaacctctgcctcctgggttcaagcgattctcctgcctcagccacctgagtagctgggattataggcgcatgctaccatgcctggccaattttttgcatttttagtagagactggattttaccatgttggccaggctggtctcaaactcctgacctcaggtgatttgcccgccctggcctcccaaagtgctgggattacaggcgtgagccactgcacccagccagaatttaatatttttttagatagttgaatgtttgtttttttctttttggattttgttttatatcttgttagaaacagatgcctaatttttaagtaactagaaaataacatttagttttcttgttaataggacttgtgtaagagctgttgttatatatgggggaacccagctgggacattcaattcgacaaatagtacaaggctgtaatatattatgtgctactcctggaagactgatggatatcataggcaaagaaaaggtacgccttataggaataatgaagttgtgagattgatactttttgtttggtatgggaaaaggaaagaatgaggtaaagacagatgtatttagtagagcactatttatgtgttagcctccatcacattctttgaatgcattcttatataattctcaagataatcgcagggaatagtgttttctaatttatacttgggaaaacaaactcaatgagattatgtaatttattttaaaaatccctgagttagctctagtaagtatagagctaatgttagaatctgggtctgattccagaatccatattctacatcccactacgctgggggaaaaatgtagttaataactttttatctggtttcatacatgtcttggggaaatagtttttctcctgtaagaaaccctttgtggcatcaataattctgtctcctatgtaagcatgggaatgatattaaccaggattgttaattttctaaatctttaaaaagattttagggccatgtacttatttaggaattcatatactatatttttgtatctctcaatcagtactttcagttcaccttaatgaaccagatttgctttttaaaaactctttaaagggtgcttctgagttaagagtcattttcatccctctgggttactcaaaaaaatgttatttctgcataaacacacctttcttagtatacttattaaaaggacccagagatatctaccttactttcttgctaaacatcttcatagtggtaccaaaatcactttgcaagtgtgttcttctgtttatagtaaaagatgttcatgcaaaggtaagaggttcctgattgttcccgagtgattagagaatggagaatttactaaggatttaaagaggttagaaaaaattttaccagttagaagatatttgaatatgtcatgctgttaggatattttctttcttacattagagtctaactttatcaaatactataatctagatctgtattgtccaatacagtaaccactagccacatgtaacaatttaaatttaagaatgataaaaattcagttccaagtcacagtagccacatttcaagcgcctaatagctagctacctttggctaatgactaacacgttaaacaatgcagataggctgggtgcagtggctcacgcctataatcccagcactttgggaagccgaggcaggcatatcacgaggtcaggagatagagaccatcctggttaacatggtgaaaccccgtctctactaaaaacacacacacacacacacaaaaattagccaggcatgggggcatgtgcctgtagccccagctacttgggaggctgaggcaggagaatcacttgaacccaggaggcagaggttgcagtgagctgagcttgtgccactgcactccagcctgggcaacasagcaagactccttctcaaaaaaaaaaaaaaaaaaaaaaaagcgcagttaatagaacttttaagtaattgcagaaagttttattgcacagtgttgatctagacatttggtttcttttagacttaattttaaaaatgctttataacagaaaattgaactgaaatatacagtaatattatctaagcatatcaattctcattttatacactaatttctagtcttttttcttaacagtattttatttttttttatttttatttttttcttttttttgagacggagtctcgctatgttgcccaggctggagtgcagtggcgcgatcttgctcactgcaagctctgcctcccgggttcacaccgttctcctgcctcagcctcccaggtagctgggactacaggcgtccgccaacacgcctggctaattttttgtatttttttttttttcttaacagtattttaacagttggaattgtagagaatagtttaatataaactaatatgcattttctgttttacctttgaaaatatccttaaagattggtctcaaacagatcaaatacttagttttggatgaagctgatcgcatgttggatatgggttttggtccagaaatgaagaagttaatttcttgcccaggaatgccatcaaaggaacagcgccaaacccttatgttcagtgcaacttttccagaggaaattcaaaggttaagtttttttcttaaaaataatttaattatmtatatatacatacttttatcaaagtggaagcactgtgaatatcctatttttagagatttgtcgttaagattttaatataggtagtttaaaaagtagatgtatttctaaaacgtttgccacattttccattgtttcttacctttattcctggctttgtgttaacatcacattttatttaaaaaktgtgtgtgtktgtgtgtgtgtgtgtgtgtgtgtgtgtgtgtgttgttgttgttgttgcatagaatccagctagggtttaataagtgcttactaaattaagttatttttattattatgccttcttttcaaacctaaatctataggatttgggagaactgaggctttggtagaaaattcatataccaattattggcagatatttgaggatcatgttatataccatggggtctaatgaattcagagattagggtgacacatccctactggaatggtgactctttttcctgccagccccttgtctcaaggagccagaagtgcccaggcaacagcagaagcttatacagatgggtcctatggttcaacataagattttatgatttttttactttataatggtttatcataggtattaattgcatttttgacttaagatattttggacttaaaataggtttatcgggatgttaaccctgttgtaagttgggaaccatctgtaattcagcaggactcttgctattttctctagtggaactgcgttctctttgggaaccaagacgtcaaaacctgtagaacataaagttggaggacaagaagggatgggaagcatagatttccctagtgggtcattgagagtgatggtaggtgggccagtagtgcttgctctcctggattcccagactcatgcaccatatatggatatttgatttgaggaattaccgtgtcatgttggataatgccctgtcttcataaagagttgcctccaaactcacccttgarctgttttttctgcagacagttccaatgttccaatgttctctcaggttggcagcttctgagtggtgcagtatatatattacctgtgaatcctatggttatgggcctgtcccaacacctcttttgctttaaagttggtcccctggtttgatagaatgttacatgggatcctgtgctagtatatcaaacattcccaaacccttgaatagtggtgctggctattgatttattttttatatggtaaatctttgtgtaaagttaggaagagttctttattgggggaaaatagaactcataagacagcattaggtcaattggcaggatatttttctttcttagtggtacataaaacaatcatttcttaacaattgaatagtattttctttctttttttttttttttgtgatgaagtcttgctcttgctcttgtcccccaggctggagtgcaatggcgcgatcttggctcactgcaacctcaatctcccgggttcaagcgattctcctgcctcagcctcccaagtagctgggattacaggcgcctgccaccacgcctggttaatttttttttttttttttgtatttttagtagagacggggtttcaccatgttggccaggctggtcttgaactcctgacctcaggtgatctgcccacctcagcctcccagagtgctgggattacaggcatgagccaccacacccagccctatatagtattttcaggtggaratggggtatttgcattcccaccatttgctttggtaactatctaattagcagcctgactctttttagattcaccctgaaatgggaaagtatttgtatgttggccacccaaaatggcaaacgtactattgtcagtcagtaatatttgtcgaggatcttttgtgaatcatatttgattataagctctggggatatatgttaaacaaaataagctcctatctgaccttgagttgtttacattctttgcttcctgactctccctcagttgcttcattttatctgttcttaaatgttaccagttgcccatcattctgtgcgaagtccttttctcaatgtgcatattccctgagttatgatatatccgttcccttggcttctacttatacctgtaactctcccaaatttcttccctgtattcctaatctctctctgtagccccagaccttttttttttttttttcttgagacagagtttcgctcttgttgcccaggctagagtacaatggcacgatctcggctcaccgcaacctccgcctccagggttcaagcgactctcctccctcagcctcctgagtggctgggattacaggcatgtaccaccacgtccggctaattttgtatttttagtagagatggggtttctccatgctggtcaggctggtcttgaactcctgacctcagctgatccgtccgcctcagcctcccagagtgctgggattgtaagcgtgagccaccgcacccggcccagacttttaaatttaacttcttggggtgtttgttctcccagatgaatgactagtaactcacgttcatgtccaaaatagaacgtaatttttcttcagttccctttttcccgttttctttattctggttattggcatcatgatcttttaaagccagaattgtttgaatcgtggtgattcttctctcacagtcttttaactccgcttttaaaaatactgaacttgggccaggcgcagtagctcatgcctataatcccaacactttgggaggctaaagagggagaagcatttgagcctagaagttcaggcccagcctgggcaacatagtgagaccctgtctctataaaaaacatttaaaaaattagctgggtgtggtgacacgcacctgtaggttcagctactcaggaggctaaagtgggaggatctcttgagcccaggaagttgaggctgcagtgagccatgattgtgtgcccctgtactctggcctgggcaacagactaagaccctgtctcagtacaacgtggcagtgatattagggttctccagaaggacagaaccaataatatatatgtagatataaaaggaagtttattagggaaaattggctcacacaatcacaaggtgaagtcccatgataggctgtctgcaagctggagaagagagaagccagtagtggctcagtccaagtctgaaagcctcaaaaccaaggaagctgatagattcccccaagaagctgctggtgcaagtcccagagtccaaagtccaaagaacctggagtatgatgtccaagggtagtaggagcagaagcaagcatccaacatgggaagaagaaagagagccagaagagtcagcaggcaaagttatcccaccttcttctgcctgcgttcttgtagctgcgctggtagccaactggatggtgtccacccacattgagggtgggccttcttctcccagtctaccaactgaaatgtcagtctcctctggtagcaccctcagagacacatccagaaacaatgtttcactggccatctaggcatccctcaatataatcaagttgacaccaaatattaaccattacggtagtaatctctaaaatatttcacatctgttagcttctctatttcccaccttaatttaggtccttatcaattttgccctgctcactggaagtggctttttaacctgtctccctgcttctagtgtcacttctgcattagtggcaatgccaaaataaagtctgattcttttaaacatttatttaaaataaaccttcccatatctttccatcttcatagactgatttttaaactctttaacacatgacagtctcaggctcacctgctactttcttacctggagtcgtgtgtttctagtctactagagctatttcctcttggctgagaaagctgaattttactttcctcattatttgtgcttgtttcttctttcctactgcttagaatgcctttccacaatcattagtgttccacattcttgcctgctgcttccctagatcaagcttcaaacttgaagacttttcttttctttttttctttctttcttttttttttttttttttttttttttttttttttggagacaaggtctcactcttctcgcccaggctgaagttcagaggcacaatcatggttcactgccaccttgacctccctggctgaagcgatcctaggcccacctcagcctcctgggtagctggaactacaggcatgcgcatacacacctggctaattttttattttttgtagagatggggtttcaccatgttggccagaatggtctcaaactcctgggctcaggtgatccacatgccttggccttccaaagtgctaggattgtaggcatgagccactgtgccccgcctcaaactggaggatttttctaaatagacatcatttcatccatttcctgccagtgtatcttgtgaaagaaactgtttaagtcactttgcacatttcttggaacatagtgttcagtaaacattaactattctaacactaaactgtaatttttcttaatatatctttcctacttgaagtgaggatctcataggctaacaccatcatgttcatctttgtactcccagtaccttgtacacatgacacaaaacactcagtagttttagtgaatgaaaagggtgatggataatcatctgaagaatttcagatgatttcaagatttgtgcctgggtgagagagtgactctaaaagaaggtataaaaaagcttttcttttatgataagagatcaagtaaggagaaagaagaagcagtgatttattaagagtctggatatgctgaatttgagctgttttcatgaaggactcagctggtaaataagggactgctacataggagggagaggcattgaagagagatttgggcctccccatttatccctaaaaactcatctttctcattagcaactttgtccactcccctatatttctatgtgatctaaagcaagacttctcaattgcagctgatagtgagttaactgtgtgtcaagatattgatacccttaacctttggggcaggcacacctatcctgattccgctatgtccctgggcctttcatctcgtctcacttgttttgcccaattgtgctatgcaaatactmctttctatgtgtgtcgtgacagacagagcactgacctaagatctggtttgcttgaaatcattcatttgaagtagagtaatttaataggtaatattttcagaaaacaactaataatagcatamataaaagcaatgagtggagaacagaatttgtgtctcaggcttacatttcaggttttactaaaaaataattcctgcttattgcagtttatttcttttagttcatgcttttttttaagtgttatacacatattttatatagttttgcgtggatagcaaatccacttgtaattaccatatccatactttgacaaactttttntctagtagttatgtattttgcaaaatcctaatattttatactgatctttcacaatagtacttgggtgatataagtaaccaaccatcttatagctgttrtaatctgctgtctgattaatattgagataacacctacaggaattcagtggatattatggatactgatggagaggaggataagttaaagaataatcttttgtttttcaaggttggctgcagagtttttaaagtcaaattatctgtttgttgctgttggacaagtgggtggagcatgtagagatgttcagcagaccgttctccaagttggccagttctcaaaaagagaaaagctcgttgaaattctgcgaaacataggtatcttaygttgatacatttttttgtcatgattttgattttttttaatgaataatttaaaaaatcactaaagaattgtttggtctgacttttcataagtttgttttaagtctctctccctctaaagctcttttataaaaaattttatgattcagttttctgggtaaattatataaaaatatggtcgtttctccaccattaagtttgaaaataggaaggatttgagacttcattttaactattccaccagaartgtatctattttttgttttaggaaactagaaaggcttagtagtgacacatatttacatcacactattactccatcaaaagcagattgtttttctgtttctggttcctagctcttgcttcctaaggcttcccaaattcatagatttgaataatttttttagctaaaaggggcttaagatctagttctcttccttcacaatatctgtgggaatttttttttctcctctactcccccaatcaatttttatttttattatctttttagagataaggtctcactttgttgctcggcctgaaataattgtgtagtcatagcttatggcagcctcaaactcctggcctcaagcgatcctcccacctcagcttcccaagtagctgggactataggcatgcgctaccatgcctagctaattctattattttttgtagagataggggtctcactattgaccaggctggccttgaactgttggcctcaatcctcccaccttgtccttccaaagtgctgaggttacagccatgagccactgtactcaccccaattttactttttattatttttaattttttgagacggggccttgctttattgccaaggctggagtgcagtagcatgaccatggctcactgcagcctcaagctcccaggctcaagcagttcttccacgtcagtcccctgagtagccgggactacaggcgtgcaccaccatgcccaaccagttttttagtttttgtagagatggggtttttaccatgttgcccaggctggtcttgaactcctgggctcgagtgatccactcacattggcctcccaaactgctgggattacaggtgtaagccaccattcctggcccaatttttatttttgaagtcattttttttrgttcggttgtttagccttattttgagactggaagcaaaaattttaaatatgttcattttaataccttctcattacctcataggctaggtctacttacatgttacactttctccatccacaccctccattttagtacttgcgtttcagcttgaatgtcagtgttgagagagaaatgcgaaggtggttcatcagctaatttccaataatgagcaaaaagaaaaaatggaaaggtgacttaaaaagcacttacaggcttctggtctttaatttgtcctaagttttataaaaacttttaaaaaccaaatactcatcttgagtttgagaaattttattggttggcttcatcaaatgtttcataatatacactaatagcatataaaaataataatagctatgggccacatactgttctaattattggacatgtgttagctcatttaattcccaaaacaaccttatgaagtagattttgtcattatccccattttagggatgaagaaacaaatatagagaggtcaaataacttgtccaccataaattgatgctgctaatgccgaagagatgagcactatatggttttgctgaagttagaacatatttctaatatagtcaccttaagtttttttttttttttttgagatggagtcttgctctgtcacccaggctggagtacagtggcacaatctcggctcactgcaacctctgcctcccgggttcacgccattctcctgcctcagcctcctgagtagctgggactagaggcacgtgccaccatacccggctaatttttttgtatttttagtaaagacagggtttcaccgtgttagccaggatggtcttgatctcctgaccttgtgatctgcctgcctcggcctcccaaagtgctgggattacaggcatgagccactgtgcccggccaagattttttttatatatgagcttgtgggataaagtttattttgcaagtaatccaaaaggagagagtttttcagaagagctggtttgcccttgagaaaaggtcaatgtattatatatgagcactattgatatacttctgtattatttaagctgtgaaatattttttttggtttagtgttcatagttgatacctttttaactttgcatgtaatatccatccagtatatcctcaaattatataaattttgttcatatgatttatctccttttctactctttcacttaattatgctatttttttccttttgcctttaaatatataagtttatttcggagtggcatagcccaactgcctttttcataattttaattttaagtcaacagagatcaaagagtttattgagctctttagttacgaaaggaaccagtaagatgttacagctagtcaaaaggagaattaaaaaaatacatgtatatttaggccaagcttgtccaacccacagctcacaggccacatgcatccctttgatgtggatagctttgaatgtggctcaacgcaaattcgtaacctttcttaaaacatgatggggtgttttttttttttttttttgcgattaamaaaacatttttttaaagctcatcagctatcagtagtgttacggtattttatgtgtggcccaagacaattctcctaatgtggcccaaggaagccaaaagattggacacccctggtttaggcaattaggaatgctaaaattaatttagaggtagatgtaaaactggtcattattcaaatgcaataatcacatttcaggggaaaactttatttgcatttttactgagaatcattggcattgctatccattgcaacagttatgaaaaagaatatagaaggcacaaagagtgtgctagacagtaatcttttttgcttacttcaaattcttccataattttttctgacagcctgtgtctacctcatgaccataataatctcagagatagtcttgatgacaagaagtttggtcttatgtttggcttgcttattggcatgggtgcagcaagattgttcattaacaataaatrggcctccttaagtttgctgaacagtattgacttactaaagtcacaaaattaacttttgtctggaagttttcataaggaatgtcagattgaactttaaaaatcctttattatttgctatctaagggataggaaactaagtctcagaaactctctctactaggtttcacctgcagtacctataaattggagtgaatctcactctacgaaaggtcccccatatttcctgtggttcctgtcctgtcaggaagtgtatgaccttccttaaaatctccaaggctgggccatgtaagccaagcaccaggtcagcttatatgggaggtctttgtaggcattggttccataaggaaagccaacctttgttcyttaaaaaaaagtatctggtcctacctaccattccattttcaaatacgaaatccaggtgagatgttagttggacaggtaacttgtccacttatatcttggttaaaggaggcagacagattcttatttaactgttgcaggtaactaccatgaaaactaaggagacttagttaagaaatctgaatttgggttgggatggggtgtcagtgagatgcgagatcagatatgattttagaatgtttgattttagtttacaaaagcagagtctactaaaatgtgtaaatgacagctagcttaagaggaaaaaagccttcttcatatatccagaaaatagaatattaaaataatattaacagtattgcaaacaaatggccayagagagatattctccataagctcattcagtccttatgtaattcttatttcattgtatatgttagggatcagcttgcatgattctgtctgtttctaraaggactagtcctggaaatctcactcagtccagtgatagggtctaaaagttgtcaaagcagtcaactttagaaccttctacccaagactctattctttgaagtattaatagttcttcacaaggcttggagtctgtcctttaggacatagactctgatctatagcttacagcacagcctttgggcaagcatctaaagaaaacaaaagctgtctgaagatgacagatttaatgatcatggtaaatttgttaccggtaattgttaaatattgagggtctgaggaaggttcatgataagaataatgctactgataaatttttttctatgacatgcaaaataaaggtaataaagccatttaaaaaatactaggcaaaaaatctgattaagcttattttctttctttttttttacagtaaaccctttttttattatatacttttttagggtacatgtgcacaacatgcaggtttgttacgtatgtatacatgtgccatgttggtgtgctgcacccattaactagtcatttacattaggtatatctcctaatgccatccctcccgcctccccccaccccacgacaggccccagtgtgtgatgtcccccttcctgtgtccaagtgttctcattgttcaattcccaccgatgagtgagaacatgtggtgtttgtttttttgtccttgcaatagtttgctgagaatgatggtttccagcttcatccatgtccctacaaaggacatgaactcatcattttttaaggctgcatagtattccatggtgtatatgtgccacatttttattattattatactttaagttttagggtacatgtgcacaatgtgcaggttagttacatatgtatacatgtgccatgctggtgagctgcacccactaactcgtcatctagcattaggtatatctcccaatgctatccctcccccctccccccaccccacaacagtccccagagtgtgatgttccccttcctgtgtccatgtgttctcattgttcaattcccacctatgagtgagaatatgcggtgtttggttttttgttcttgygatagtttacttgagaatgatgatttccaatttcatccatgtccctacaaaggacatgaactcatcattttttatggatgcacagtattccatggtgtatatgtgccacattttcttaatccagtctatcattgttggacatttgggttggttccaagtctttgctattgtgaatagtgcctcaataaacataygtgtgcatgtgtctttatagcagcatgatttatagtcctttgggtatgtacccagtaatgggatggctgggtcaaatggtatttctagttctagatccctgaggaatcgccacactgacttccacaatgactagtttacagtcccaccaacagtgtaaaagtgttcctatttctccacatcctctccagcacctgttgtttcctgacttttgaatgattgccattctaactggtgtgagatggtatctcattgtggttttgatttgcatttctctgatggccagtgatggtgagcattttttcatgtggtttttggctgcataaatgtcttcttttgagaagtgtctgttcatgtcctttgcccactttttgatgggattgtttgtttttttcttgtaaatttgtttgagttcattgtagattctggatattagccctttgtcagatgagtaggttgcgaaaattttctcccgttttgtaggttgcctgttcactctgatggtagtttcttttgctgtgcagaagctctttagtttaattagatcccatttgtcaattttggcttttgttgccattgcttttggtgttttagacatgaagtccttgcccatgcctatgtcctgaatggtaatgcctaggttttcttctagggtttttatggtttctggtctaacgtttaagtctttaatccatcttgaattgatttttgtataaggtgtaaagaagggatccagtttcagctttctttttatggctagccagttttcccagcaccatttattaaatagggaatcctttccccattgcttgtttttctcaggtttgtcaaagatcagatagttgtagatatgctgcgttatttctgagggctctgttctgttccattgatctatatctctgttttggtaccagtaccatgctgttttggttactgtggccttgtagtatagtttgaagtcaggtagtgtgatgcctccagctttgttcttttggcttaggattgacttggcgatgygggctcttttttggttccatatgaactttaaagttggtttttccaattctgtgaagaaaggcatyggtagcttgatggggatggcattgaatctgtaaattaccttgggcagtatggccattttcaygatattgattcttcctacccatgagcatggaatgttcttccatttgtttgtatcctcttttatttcgttgagcagtggtttgtagttctccttgaagaggtccttcacatcccttgtaagatggattcctaggtattttattttctttgaagcaattgtgaatgggagttcactcatgatttggctctctgtttgtctgttattggtgtataagaatgcttgtgatttttgtacattgattttgtatcctgagactttgctgaagttgcctatcagcttaaggagattttgggctgagacgatggggttttctagatatacagtcatgtcatctgcaaacagagacaatttgacttcctcttttcctaattgaataccctttatttccttctcctgcctaattgcyctggccagaacttccaacactatgttgaataggagtggtgagagagggcatccctgtcttgtgccagttttcaaagggaatgcttccagtttttgcccattcagtatgatattggctgtgggtttgtcatagatagctcttattattttgaratacgtcccatcaatacctaatttattgagagtttttagcatgaagagttgttgaattttgtcaaaggccttttctgcatctgttgagatgatcatgtggtttttgtctttggctctgtttctatgctggattacatttattgatttgcatacattgaaccagccttgcatcccagggatgaagcccacttgatcatggtggataagcttcttgatgtgctgctggattcggtttgccagtattttcttgaggatttttgcatcaatgttcatcagggatattggtctaaaattctctttttttgttgtatctctgcccggctttggtatcaggaagatgctggcctcataaaatgagttagggaggattccctctttttctattgattggaatagtttcagaaggaatggtaccagctcctccttgtacctctggtagaattcagctgtgaatccatctggtcctggactttttttggttggtaagctattaattattacctcaatttcagagcctgttattcgtctattcagagattcaacttcttcctgatttagttttgggagggtgtatgtgtccatgaatttatccatttcttctagattttctagtttatttgcgtagaggtgtttgtagcattctctgatggtagtttgtatttctgtgggattggtggtgatatcccctttatcattttttatgcatctatttgattcttctctcttttcttctttattagtcttgctagcagtctrtcaattttgttgatcttttcaaaaaaccagctcctggattcattgattttttgaagggttttttttgtctcttatttccttcagttctgctctgatcttagttatttcttgccatctgctagcttttgaatgtgtttgctcttgcttctctagttcttttaattgtgatattagggtgtcagttttagatctttcctgctttctcttgtgggcatttagtgctgtaaatytccctctacacactgctttgaatgtctcccagaaattctggtatgttgtgtctttgttctcattggtttcaaagaacatctttatttctgccttcattttgttatgtacccagtagtcaytcaggagcaggttgttcaggttccatgtagttgagtggttttgagtgagtttcttaatcctgagttctagtttgattgcactgtggtctgagagacagtttgttataatttctgttctttaacatttgctgaggagtgctttacttccaactatgtgatcaattttggaataagtgcggtgtggtgctgagaagactgtatattctgttgatttgggttggagagttctatagatgtctgttaggtccacttggtgcagagctgagttcaattcctggatatccttgttaactttctgtctcgatctgtctaatgttgacagtggggtgttaaagtgtcccattattattgtgtgagagtctaagtctctttgtaggtctctaaggacttgctttatgaatctgggtgctcctgtattgggtgcatatatatttaggatagttagctcttcttgttgtattgatccctttaccattatgtaatggccttctttgtctcttttgttcttttttggtttaaagtctgttttatcagagactaggattgcaacccctgcctttttttgttttccatttgctyggtagatcttcctccatccctttattttgagcctatgtgtgkctctgcacatgagctgggtctcctgaatacagcacactgatgggtcttgactctttatccagtttgccagtctttgtcttttaattggagcatttagcccatttacatttaaggttaatattgttatgtgtgaatttgatcctgtcattatgatgttggctggttattttgctcgttagttgatgcagtttcttcctagccttratggtctttacaatttggcatgtttttgcagtggctggtaccggttattcctttccatgtttattgcttccttcaggagctcttttagggaaggcctggtggtgacaaaatgtctcagcatttgcttgtctgtaaagtattttatttctccttcacttttgaagcttagtttggctggatatgaaattctgggttgcagattcttttctttaagaatgttgaatattggcccccactctcttctgacttgtagagtttctgccgagagatcagctgttagtctgatgggcttccctttgtgggtaacccgacctttctctctggctgcccttaacattttttccttcatttcaactttggtgaatctgacaattatgtgtcttggagttgctcttctcgaggagtatctttgtggcgttctctctttcctgaatttgaatgttggcctgccttgctagattgaagttctcatggataatatcctgcagagtgttttccaactttcttccattctccctgtcactttcaggtacaccaatcagatgtagatatggtcttttcacatagtcccatatttcttggaggctttgttcgtttctttttattcttttttctcgaaacttctcttcacatttcatttcattcatttcatcttccatcagtgataccctttcttccagttgattgaatcggctactgaggcttgtgcattcatcctgtagttctcatgccttggttttcagctccatcaggtcctttaaggacttctctgcattggttattctagttagccattcrtctaattttttttcaaggttttwaacttctttgccatggctttgtattcctcctttagctctgagtagtttgatcatctgatgccttcttctctcaactcgtcaaagtcattctccgtccagctttgttccattgctggtgaggagctgcgttcctttggacgaggagtggcactctgatttttagagtttccagtatttctgccctgttttttccccatttttgtggttttatctacctttggtctttgatgatggtgacgtacagatggggttttggtgtggatgtcctttatgtttgttagttttccttctaacagtcagcaccctcagctgcaggtctgttggagtttgctggaggtccactccagaccttgtttgcctgggtatcagcagcggaggctgcagaacagcagatattggtgaacagcagatattgctacctgatcgttcctctggaagttttgtctcagaggagtacctggctgtgtgaggtgtcagtctgcccctactgggggtgcctcccagttaggctccttgggggtcagggacccgcttgaggaggcagtctgtcccttctcagatgtctggctgcgtgctgggagaaccactactctcttcaaggctgtcagacagggacatttaagtctgcagaggattctgctgccttttgtttgtctgtgccctgcccccagaggtggagtctacagaggcaggcaggcctccctgagatgcggtgggctccacccagttcgagcttcctggccgctttgtttacctaagcaagcctaggcaatggcaggtgcccctcccctagcttcgctgctgccttgcagtttgatctcagactgctgtgctagcaatgagcgaggctccatgggggtaggaccctttgagccaggtgtgggatataatctcctggtgtgccctttgctaagaccattggaaaagtgcagtattatggtgggagtgacccgattttccaggtgccgtctgtcacccctttctttgactaggaaagggaattccctgaccccttgcgcttcccaggtgaggcgatgcctggccgtgcttcagctcacgctcagtgtgctgcaccaagtgtcctgcacccagtttctgacactccccagtgagatgaacccggcacctcagttggaaatgcagaaatcasccgtcttctgcgtcacttatgctgggagctgtagactggagctgttcctatttggccatcttggctccacccctgattaagcttattttcaaagaagaaacctgatttatgaaaatgagcagatataatttttcatatcaagaatataaagtaaatagatttagcagtataattatgaaatcattgtttttacctctcagacctctttagaggatcttggagactctgggaaagacttactttgtcataaagtgtcagtttgttccagaacattgaaaaagcacaatgaaagacaaaatgggaactgagttcacctgtagatgtagaatagggtccagacatttatatttttacagaatgccatgtgtaagtctgatgtacatccctagtgaagaaccactgaagaagatgttagattcaagttaggaaagaggtaaggttagagacgttttaaaaagtgaaattatgactggcaacactgtactattgcatcaggcmgcataccttcaagactttgataaatatagggaaactctatagaattactttatagaattttgagcagtgtttctcctgagggtaaaagtatactttggatggtgagagaacttacaaatcatgagggactcccgtaaagcatacacacacacacacaaaaaatagaggccragtatcacttatccaaaatacttgagaccagaagtgcttcatattttttttttctttttttggagacggagtttcgctcttgtcgcccaggctagagtgtgactgcgtgatcttggctcactgcagcctctgtctcctgggttcaagcgattctcctccctcagcctccccagtagctgggatttcakgcacctgccatcacgcctggctaatttttgtatttttagtagagatggggtttcaccacattggccaggctggtctagaactcctgacctcaggtgatccgcccgccttggcctcccaaagtgctggaattacaggtatgagccacmatgcctagccatgtttcggattttttttaattaacttttggaatatttgcagtacgtttatcacttgatcatccctaatccaaaactctgaaatgctccagtgagcatttcctttgagcatcatgtcagtactcaaagagtttgggattttggattttcaaattaggaatgctcaacgtgtattaacattttatctattctctttaatcttggaaaagtgtagtcttttctggtttgacaactcttaccatacaactcttaaatagtaatacatctaaaaaaaataatttctagaatcccttcctttataatgaaataataaacctttgtgcttttcctggggctctctctgagaaatctcaaaagttttctgggtgaatttcttcttctaaatttttaatttgatcttaaaaagacaaaaggagttgtcagaggagagttgaatatttgattagtgtaggattcgtgggtatcagaaaaactatttggttatcaatttaattgaagtgacaaaacatttagaagtaaacatagaaagtgacatggttgtaaataaccacagctctttcataaatagggaaccttttctctttagtctttttttcttctttttttcccttctttagtctttttttttttttaaacagacctaataaagtcaacagaatctctgctgtctaggctgattacaaggaaggtaaagaataactttttatccagtgtaatggctctgaggaaaaaaaactctcataagcgaaagcattaaacagtaaattaagaaagtaattccatacaaactgagtgacctttgctagaatattaacaccttttatagcttattttaacccaagtgttttaaatcaaagcagataaaattcagtttccaagttttatctttcattgtgctttttcagttttctggaacaaactgacattttaggacaaaatgtgtctcccccaggttctctaagatcccctaattgggtctgcaaggtaaaaataattttcatgattatactaagaattatttattttaatatgcaaatattgttcaaataaagattatcttggtgttaatttttaatatggtaaatatcaaaacacacaagaaaaactccaggattgtcagtgttttatgagtttaaaggtaacactgaccaaaatgtttgaaagccactaaactactttttttccttgaagcaaaagcaattacagtttttatttctgtcactgttattcctagtgtagttgcaaccacttatgttaattatatcttttaatcatagtaacttctatttcataaaggaaattgggagcagggagatgggaaactgggagatgtcatacacaagcattgtctactgttttcagttacctgaagattttggaaattatcttcaagatgatgtttttcaaaacataaatactgttgaataaatgactaaatttagttgaacacagatttccgttttcatactcttaaacatcatgaaggaataatactagcttatttggctagtaaacctctatacattaggaaaaacaaacccaagtagagtaagtgtattaagctttacactgataatagggagaagatgttttggttttttttaaactaaaggtattagtctcatttaccaaagatttcacttaattatgtaaacttggattcttaaaatgattctgattcttgtaatacgttttttcaaaagtttaatatagtttaaagtatatttttcaaaagtgcaagttcaatttctttactttctgagattttaggaatatttaccttgataacatttctcttttattcatctttataaacaaatttgaatagaattcctttaagagactttgtaatttaatgtgttaatacttccgtaggggccgggygcggtggttcacgcctgtaatcccagcactttgggaggccgaggcgggcggatcacgaggttaggagattgagaccatcctggctaacacggtgaaaccccgtctctactaaaaatacaaaaaaaaattagctgggtgtggtggcaggtgcctgtagtcccagctactcaggaggctgaggcaggagaatggcgtgaacccgggaggcggaggttgcagtgagccgagattgygccactgcactccagcaagccgagattgcgccactgcactccagcctgggcaacagagcgagactgcgtctcaaaaaaaaaaaaatgcatttctcagaggcttagacttgtctttcactcttccttaagctcttttcctagatacctgcacagttcactatctttatatctttactaagataccatctaattggggtatctaaagtaggcctgtctaataagcctgtcttaaagtatctaaagtaatcatctctggaccctttatcttgctgattttttcctttttagtactaaatgcgtaatatttatttgcctccccatagtgaaagcaggggcttttatttccgcatttccaacagaaacatgacaggcatctagtaggcactaaatgtttgctgaataaatgaatgaagtgagattacagagaaatggggagagagattatgaacagtaatacatttttatatgctttaaagctataaattatctttcttctccaacattttatagggaaattccctgtgtgggaaaatctccggcccatgcttgaatttctaccggttaaatattttaaggagtaaatattccttaacaagttaagaccctgggataaggttgtcatttaattttttaatatgtaagatattttgggaatgaagggatttgaattagagataatgtttggaacactaattatatagagttaagcagccccaggtcagatgccactattgtaaacacctcaggcaatcatgggagaatgaaagattggattatcttgagaggtagacagcaaaaaacatttatagagcgagggaaatggaggggaggaaaggactgagacaattttatattactaagagttggcaggcagatatgatttacctttccctaaggttctacttcttgtgttggcctgggaggaggaaagagaagctaattttttaaatccctcaactaggaaaacagtcctgtgtctttgacatccattctggaattagagtccctcttatgtaccaggcttggctgtggtgctggtagtaaatacagtggtggacaamgtttcatattcaagcactgcctcctatccctgctttatttttcatttcctgattttgaagtttgaatattaataatttcattgtcttgtaggggatgaaagaactatggtctttgttgaaactaagaaaaaagcagattttattgcaacttttctttgtcaagaaaaaatatcaactacaagtattcatgggtgagtagatgaatataattacctattaggggaatgacttctatttggtatttaagaaacatcagtttatataactaatatgatataatcctaggattgggattcagaattctctcagatctaaactgttattctcctttatatgaggaaaaggataatacccaggagtactaaactattatttttcatcctcattcttagtttttagaactaagtggttgtggtgggtaagataaaggtctgccttactctcaaaataaggagtggaaatttctcaagagatctcacttaaggatctctggccccttatcaaattttcctttgctaaatctaatctttcttagagctttttaaaattggagtgctttaaaatgtcatattaataccgttttatgggcacttcattagtagatcctaaaatatcacgtagtatatagtgttgtgaaattatactttaaaaatatgtttttaagcaagcattctaatcaagtagttgtatattttatgtcaagactataaagcatagagattataataggatttgatttttgtcagacttgagattgtagtctgtctctacatattagctgttactttacctcatttgcaaatggggataatttttgcaactcaaagtattatattgaggattaaataaaatggtagcttggaaggaattagtatagtacctggtatgtaagaagtgaacattaatgttaaatgctgctattcttttttttttttgagaaagtcttgcccagtcatccaggctggagtgcaatggcacgatctcagctcacctctgcttccccggttcaagtgattctcctacttcagcctccctagtagctggaattacaggtgcatgccaccaygcccagctaattttttgtatctttaatagagatggtgtttcatcatgttggccagactggtctcgatctcctcaccttgtgatccacctgcttcagcctcccaaagtgctggggttacaggtgtgagccactgcgcccagccaaatgctgctattcatactattattaaaaagaaatttgtatgttgaactttaatgattcactttaatgattttaagagtggttctaataacatgctttcttttctttcaagtgatcgggaacagagagagcgggagcaagctcttggagattttcgctttggaaagtgcccagttcttgttgctacttcagtagctgccagagggctggatattgaaaatgtgcaacatgttatcaattttgatcttccttctaccattgatgaatatgttcatcgaattgggcgtactggtcgttgtgggaatactggcagagcaatttccttttttgatcttgaatcggataaccatttagcacagcctctagtaaaagtattgacagatgtaagttaaacttttatgatggaatggatagttttcttactttgttgttgaaagtagacattttatgcatgtgtatataacaagtaaacttttccaatatttaatactttatgttgcatatgaagtcaattttttttaaaggctcaacaggatgttcctgcatggttggaagaaattgcctttagtacatacattcctggcttcagtggtagtacaagaggaaacgtgtttgcatcagttgataccagaaaggttagtagaaaggaaaacttgagaacttgtcttctagttactctttgtaaatgttgtgcttaatattgtgaagtaactataatatttaataatcaarccattgttttcgtgcctggaaggtagctactttattatttcattaacattttatgtatatacatatttttggttttaaaggtcaggaattaactttgagatttatgcctaaacagtctcctttcccagattttaaattttaatttggaatcttttaaacttctgatggaattatttaatttttgaattctgacaacattaattaatataaaatacaggacctgttggggttacaagtcttttctttttcttttctttttttttttttttgagatagtgtctggctctgttgtccaggctggagtgcagtggcatgatcttggctcactgcaacctccgcctcccaggttcaaacaattctcatgcctcagcctccagtgtatctgggattacaggcatgtgccaccatcttagctggttttttttttttttttttttgwatttttaatagagacagggtttcaccatgttggccaggctggtctcaaactcctggcctcaagtgatccacctgcttcaacctcccaaagtgctgagattacaggcgtgagccactgcgcccagccacgaggctacaagtcttttctggtatgtcaggtttttataggctgaacaccgcctttattcagaaacaatgagcatgttaattaaatatttatgctgattcattgagtgtagtgcattaagttttccccacttgtcaaaactattgacttaaaaaatatttttcttgaaacattttgtgcaatttagatttcctcatttgacaggagccttttttcaggtgaatcagatttagtgagaataaagttctttgattatttggggaagacatggtagatactttgagtccttgctctcagtctgagtgatgtaactttaaagctgtcataaaattaaatgtttgtttgtttctttttttttttttttaaataattaccagggcaagagcactttgaacacagctgggttttcttcttcacaagctcccaatccagtagatgatgagtcatgggattaaagccaaaacatccttcaagtctgtggttttgatgcagagaagaaaatagttttgatttttgagtttttaacagaagtataaaacttaacattctcatagctcctgtccttgtattctcactcctacacttaaaaaaaaaatccttactgactagttatgtgagatgctaaaacttacaacattgcagttactgatacaaatggtgttaactgggaatattaaagcattctaaatgtctttcttatttctggtatattctttagggggcttagacatgtttaatgtttaaatgccaagtcttactatagtgtttattgatcttataaaacaagcaaataggatatgatacacttttggttaaaaattactgggtctcatttttacttgagtctttaaaacagtagtgtgtcactataatgtgataatctttaagagaaagtagaatacttaagcctttcaaagtgattttgatttttagatcatcagatgtatgatgaaaatggttaaatgtttgtgatgggagctctgtactcaatggcataacaatgtttatttttataatatacaatctttccttgaaataaaggatgaaacacttttcccttaagttttccatcagcactttaaatttttctttgttgcatatcctagcccaaactcctatatttttgaaactgtttttttgtgtcttgcgtaaccagtgcagtgaacaaagtcttacataaattaaatattaatgtataaacattactgcacagatgtggcaatgaaaatcaatcttagaactcaaacccgtttatcaacaaaaaacaatgctgcttactctttccataagtttttgattcatattttaagattgatgaaagaaccctgtctttcttcattttccattatatatcttgaacttactatgcctagaataatgaagttctttttttttttgagacggagtcttgctcttgttgctaaggctggagtgtaatggcgtgatcttggctcactgcaacctctgcctcccgggttcaagcagttctcctgcctcagcctctcccgagtagctgggattacagacacgcgccacaatgcccagctaatttttagtagagacgggtttcactatgttggccagcctggtctcgaactcctgacctcgtgatccgcccgcctccacctctcaaagtgctgggattacacgcgtgagccaccgcacccagcccgaagttattaattaattgttaaatgaacgaacccaaatatttaagacccagtgaggtgtaaatactggggagacaaaaatgattggtattaagtgttactgttcacctaaacaatccaaagtgacatgtccctgatgtatatcttgttataggaatttagttaataaatgaggcatcacatatgaaaaaggaaggcatatcaacagatagtgttagaataactgggtagatgcctacctcatgccatatttaaaattaacttcatgtgaattataaaatattaaagctaatagttaaatattaaccctttgaagggttgactttaagctaaggaacagaaatcaaaaaagaaacaacagatttgatcactcaaggaaagattagttgcctacataaaaaatagtgaaaagtagacaaggaaaaatattactgtgaccacagtggttatcagtgttctttatatgtggatatactaatagaagaatacaaagaacatagaaactcaaaaagggcaccagcatggcacatgtatacatatgtaacaaacctgcatgttgtgcacatgtactctagaacttcgagtataataataaaaagaaaaaatgttgacaacaagaaaaactcaaaaagggaagttcaattaataaaaatatgggacatatttcacttttcttctgttatctcacttctgggaaaggctaaatgaatgaaggtgtttggattgttatttgtaatatctgtatgtcttaattttctagtttcgtttaggaagagtataggccagtcttgtctcatttttttcattgctttttttttttttaacagattgctccctctgaactgattccttttaagcttttgcttgatttgtcagattaccatagtagcattactgaatcaaatataaaaaaggaaaggaaatgtatcatacatctaccaccattacagatgaactgtaaatgtccctatgtttaattactctcctcatttctaggtataggtttgaatcatctctttaaaaattatcaaagtaacatgcataaattagaaaagaaaatgccatagaagcatttataatagaaagcaatatttttctgcccctccccttccaaattgccattccacatccaacaatcagctattattaacaatttctgttcactgccatcatatacaggttgagtatcccttatctgaaatgctcgggaccagaaatgtttcagatatcagatttttttttggattttggaatatttgcataatatataatgagagatcttggagatgggacccaagcctaaacatgaaattcatttgtttcattatacctcatatacaacttgaagataagttttgatattttaagtaattttgtgcatgaaacaaagtttgtgtaccttgagctgtctgaaaactaaggtgtcactatcttagtcacatgtggacaatctgaggcatcacattggtgctcaaggtttcaggtttaggagcatttgggattttgaatttttggattagggatgctcaacctgtatttttatgtcaccaaccagaacgtctgttgactttgatatatgaagatttaactcacatctctgactcgccgtagaagtatacctgtgagatgattttaaaggcaccttttcctttcctctatttgtatgtcataacatctgtaaactgcacatttacatttcccaagttaacatttgcattttctataaccataaagtctcccttatatacacagattccagaattgaaaatcaaaagcatgtgtttatataaatattgttcactggatgggccaattcacacagtcttgattgcctcacctttactatcttcctaattttatgacttttgtgtctgcagggagaatgggaagtgtcagggtcaaatgaaaactgcccaaagccattccacataccagcttgctttgaatttggatcacacaatttttgagcaatttgtttaccctgtttgtagtgtttttttgttttgaaggagacagatcatgcatttttcatattaccttcccaggtttgatgttaattttcttaaaagatcccaaaagatattggttgtcttcacttttatgatgaatgcgacttgtgtgtgatactcagggtgctttgaaaattgttttttttttttttcttggtccctaggagtgttttttgtatttgataatttttttcccaagttttctctgttctctatttttggagcttctattagattccagaactgaattctctattgtatctttcctgtttttttcatcttttatattctagtatatattttttactttcaaccgttttattagcaattgtttttaattctccagagctcgcttgctcactctatatatgtttaaatgttgcttaataatagtgaattttctgctttactagtgctttttaaattcctggaatttaacctaagaaatcatgtcttatgttgatcatttgtttttctgctgcttggtgtcagatatcttaacccttgatcattttataagttgtaggtacacatgcttctcaatttacaatggaattacatcccgataaacccactgtaagttgaagatatcagtaagccaaaaatccattaaatacacctaaacctgctgaacatcatagcttagcctaacctgccttaaacgtgctgacaacacttacattagcctaaagttgggcaaattcgtctataaaaagccgatttcataatgtgttgaatatctcatctcatttattgaatactgaaagtgaaaaactggttgtatatgggcactcaccattaacgtacacagctgaaagcacactgggccaaagaatgtttgaaacatctagaattgctggatgacagggatgccacggtgacagggcaatcaatttctcttctggtgaggctcaagaataagcacttgggcatccacacagaatgctttagcgtttgggtggtttacactcgtggtctcatggctggctaaaagctgtgtctggctgctgctgcccatcatcacagtctccatccaccacatactgctagcctgggaaaagagcaaaattcacagtacgatttctgctgaatgcatatcgcttttacaccatcataaagtcaaaaagtcatgtaagtttaaccactgtaagggtccgttaggtatatttaatgcaactcaagatcaactttcatcagattctgcaagctcttccatttttgtacttttcccctcagcccttagaattgagtgtcctttttctaattatttcaaggtctgctctcaaggcagaggttgagatgtgactgataaggcttaacttttcttctttgaattctttgcattttaataggagtgaaagactgtggccttagctaaaaggaagctcaaaatgtggaatcaccattttgagcaacatatgctacgcaaacaccagctacgtatgtgagagttggggaataatggtgatgtagtggggaaggaacatcaggggatacctgatatcacacaggatgggtaacctacctgttccaccagtccctgggatcttgggggtggagtagatatgtcttttctgatttcactgtttgcacttacaacattttcccctatttatttactagagacagggtcctgctgtgttggccaggctgatctcgaactcctggcctcccaaagtgctggattacaggtacatgccacagtgcctggctttgataacatttttattatataggacggcagcagtggtcagttttcccctcgcaccttccccatagcttcacacttgtgctggtttgcgtagatctctctcattagtgccctaacttgggagcagccattttttcattttgttcggtgtggccttcatcgatttttttagcgtattggaaatagggcggtattttgttttctaaagcattttctaaaaacttcgacttgccagtatgtgcttatgctcactgttggatttagattccccggtccacaccgaagcgcgatcctagtacctccagcgtgaaacagtccagaaaggagtcgtcgatgtcccggggccctggccgggagaacgcctcgcggggcgggctggtgggtggctgtgtgcggggagccgcggcgaagctgcttccgcccgcgtgtcccgagctcgcggaggcgggcttccacgggcggccctgacccggtggtcctgacgctctcccagccagcggcgggaggcttcccaggggcggagcgagaggttggcccggtaggatcgggggactgagccgagagtcaccgcggttcctgccccgggagcccgggctggccacacccaggtgagtggcactgtggggcgcggcgcagctaggctggccccgcgggttttcctcgggctctcactttagaatagcagttctgatctctttggatcacataaattatagaaccaagttttacataaaattgcaggggctttaacctttaacctccttgaaatccattaacagacccacccaagggagccaagaactgcacattgacccctgctctagagacagatggtgccatgagggattccatgccaggaggggacaggggaccaggggttggtgtgtggggacactgatgctggacactgagcaaatgagatttgtcccagttctttgatctttacctaagtgattcattgttttgctgtaatttttaggatgtttatcaaatcatcaaagtagctcatctggaagatacttttctgtgggagatttcttgaaagatttttttgtctccatcagagttttctggatttagagtctcatatttctgtgggattctttttcagaatcaaaaatcttttccctctccttctgaacataggaacttactatcccaccatcttggatattttaacttggttttagttttggaatgaggcttaccgtgtgggagattgaagaattctcaacagaaatcaaagcactttaaaatagttttaaaaattatggatagcaggagaagcttcttctatataacaaagtaagcctgatactagttggagtagccttaacattggctatatttgccgacttgtgtagtacctagtgttatcaatgacctgctttaggctttgatttgcttatgtgtaaaaggaagataataactagatttttttccccacatctccatctgatgaagtcacacagtccatacagttacataaagtatttttaagaggcagccctgtgtaagaaggctcagtatcatagctgaatgctggtgcacttggattttagtgctcaggtcttattctggtattgcattaactgctttgtcgattttagagagttgattcttaagaagtcagtgatcactttgccaactctagtggttgaatctctattac

SEQ ID NO: 96033 - DNA, 129338 bp, Homo sapiens
  misc_feature (1)...(129338): n = A,T,C or G
gtggttctctgtcaattactgctatgctatagttatatcggaggtacccaaagctacatggcatatgtaaaaagataataacaagtctggtatagtattgttagtttccttatcgtctagtctcaaactttaccttaattctagtaatctctcctataaattcatgtcaatggtcataaaggagagtatatatttagtagtctttaactatttctggggagtcttatcaattatagtaagcttgtgcacaaatttagcatgcagttttagaggtccccaaacacatcaagaggccccagctataacccttttaaaaagttacagatagatgagcagtacattaccaagactacatggagaaacagttcaaagttcatatgctactgacaagagtaagactgtaaattcctttaaaaatgccagccggggcaacatggtgaaaccccatctctacaaaaaatacaaaatattagctaggtgtggtggcttgtgcctgtaatcccagctacttgggaggctgagatgggaggattgcttgagcctgggaggcagagattgtagtgagccactgggcgacagagtgaccctatcaaaaaaaaaaaaaaaaaaactggttggtttttaatttacccagttgaaaagattaaagtaaaattctcatttgtctcctccaaacatttcacctaagagtttcaactgtatcacttccttgaagttggcttatactgcaaacttccagagggtaaacaaaagagctgagtttctgaaaaatgatcagagaaatcaaggaatcctgctcaacattcactgggccacgttcacttttgccaagtaaagtgcataagatttatgacagcyactttccttattgcctggagacttttacaatttttggttttgtgtttaagatggtggaagttactggaaatctgactggaagtaaggatgttagtatgcaatatctccaaggcaaagtattatgaattccaaatttataaatgaaaggtcatggaacgatgcaacatatatagctggctctcaaaaatatttattacattaaagttgaagcacagacaaactgatttcctcaaaatgactcagctaattaaaaaaaaaaaatcaaccagaatcagtttcttattgcccaataatcttttcttttgctacatattctttttatactgtattttaaaggaaaaagcaatgctaatgacccactatgactaagacattgactttgagttgttagcactctgattcccttctgatcgacagtgtgtacatctgcagaatggttaatcaggcaagggacccaaacagggactctggtggtaaacagacccagtgcctgtcctcatggagcttatattctggaacagtaatataattagtaagcaactaatactcagatgagtaataaaggggaagtgcagagtgccaagaaaatagatgagggtgaattgatgtagtctgagcaattaaggcctgtgaggaagtacacactgccagggccgcctgactaattattttgaaatgtaaaccagctaaagtttctcctctacttaataccaacaccggcccccacttcccattgaacttgctctggctccttcccagacttccagccacattttaactttttctttcttcgctccagccacacagcactatcttcttacaacatgtcaaacttgtttccaccttagggtttttaggcttgtttttccctctgccacaaatactctgcagatcatctcagtttaaatgttttctaagggaagctattcctatttcaaaccaaaatagaccctccattctccatttaatgtttaccaagtcactattttctgttcctcatagcactttttctattttagtgaccctaaaaaaaaatttataatggctttcataaatttatgacatccattcccaattcttattcccctcttaaaattttaagcctcaactaggttcaaggattttcagaaacacaagcctcttggttggaagagaaaacttaaattactgaacctcttattttggtctcagtcataacatgataaagcagcttaattatacttaggctaaggaagtggcacttctaaagcacaggaatggaaagaagaaagaaaagaaaagaaaggcaaagagaaggacagtaaaagaaagatggggaaaggtcttgctatttctagaacactccaggcttgcatctcaaggcctttctgttccctctccccaggagactctttacccagtcatctgtgtaactactttacctgcctcctttgcttgctcaaatgtcacttttttttttttttttttttttgagaccgagtcttgctgtcacccaggctggagtgcagtggcacaatctcagctcactgcaagctccgcctcccgggttcacgccattctcctgcctcagcctctccgagtagctgggactacaggcgctcgccactatgcccagctaattttttatatttttagtagagacggggtttcaccgtggtctcaatctcctgacctcgtgatccgcctgcctcggcctcccaaagtgctgggattacaagcgtgagccactgcgcctagccaccttcttatatgatgccttccttccctgaccatcctatttaatactgaacctctccccaccctcctccctattcggcctcttcagaaattctttcatgagcaaatgaaattaaaaaaaaaacaagactggtattacttgttgtgcaagccatttggtgattctgaacctctacgatagaggacaattttgaccagctgtgccgtcaaattggaaagataaggagggacggaagtagagtagaaccattacatctacattaggaactacacagagttgagcatttttccacttttttctccaaaataggtttattgtacgttatactatatattaaaagcaccctaaaataaacccaaaagttatgtgcaaatttagtagataacctctagtttttttctcttgatttcttggtcttaataattcctttgaactttccttaccagttatccaagtaattttcttcatgacgatatgcacagcactagagtagatactggggaaatgttaacacatatccataaaactgttcctacctcctgtaattttgttggatatataaaacatataattctttacatatcataaggcaagaactaactatcaaaaagaatgatttaaacaactatgatacgtcagttgtgaatagcaggaagaattcaaaaggaagttgttatctgaaatgggtattttaaggttttggtagatgatgttagggacagattgcactccatgaagaaaaacatggcaagaataaatacgaggaaggagaaagctaagagctccatttggagaaatgaaaacacaccagacttgctatagttgaatagaggaattattaaaaggttagaaagagggttttagaagctagctaaatgatttggattttattgcaaagtcagtgaggatgccatggaagaaaataggaagtgttacgaccaaagcagcatttctggaagatcagtctgatgttgatatgcaagaccaactggaggaagcaaaatgagcacagctgtggagccctattaaaagacttcgttgctactccaggaattcacaggtaccaagactaggatgtgaactacacaaatgcaaagtgaaatatggaaaaacagaaacaaggaagtcgaagaaaaagttagtttggggaaagaagagtggtttagtactagccctgttaaatttgagatgcttgcaaaaaatagggtcagagaatccagcaaaatgtataaattgccaacttgagcttggaagagaggccatctacaaaggaaaagatagaagtaatggaaatagatgaacactcctagaagggctttaggagtgaactatactgtcaaggattgacaccttgagaaagggtcacagtttggggctggaggaaagggaattcaaagaatacaacaaatgactatcggttcaaattcagaggaatgtcagtaaaagacaaaggaaaagtaaaaaagaggctgatccacagaataaaactgccatagttgtcagggagaaattctatgtatttgtaattacaagtatgctaactctgtagctaacactacaataaatcgcagggcaaagaactgtttccaccttctaggtaaaggtctggtacctgcctactttttcagtctcatctcatttcatcctttggcgatgctttatgttctgtgaattcctcaagagccccaagctctttcctgactcaaactttttacacatgatgttcattacgcccgcctggaatactaatttctgccatgcttcacagagttaactcctttttcattctcctcatctcagcttaactgttacatttccagacaccatccatgatacctgctcatcccgagaaaaattagattaccctgttaaactgtcttccctggcttttctttgtggcacttatctattataaggctataaatatgtctgtgtgcgttacctattagttaatacctatctctgacattagactggcaagctccatgaggtgatgtctctttttgctcatcacattcctcacatcttatcagacacatactaaatatttgcatatatacacataaatgctcagcaaatatttcttgaatactccaataagtacaagcaaacaacccgagaagaacacaacagaatgtaattgttcatcttttgagctcaaccgtaatatgtggcctgctcatctgcagcaggaatcggccatctataagttgagttgtcaaatcaatttgtacagtaagcaaaactgcatggcggcagaaacgagggcagacaattttacaatagattacacgtaaccagtgtgtaaccagtgtgtaagtcctgtaatttttattaagtattgatttttccagaacgcatggagacactagattgttgctgaaaatgatatgaaaaactgacagaaaatggggctggctggcaccaggaggtcaggaactccactcagtactcgtctttgcgttagcctagctagctgagatggtgctcaggatgaattcctgctgaaacaggagctaatgcaattattttgtttttagaagggggagaagtgtgagttaaaagagaaatgccaggctgcaacagggctactgtcagaattttggaggcccaaagagcttagactttttaaatctaaaacaaggccaccccatggggaggtagcagctcgagtgttgggaaatagaaatgttgggcccgaagctcctcccgggttctaaggccctttcctcaggacaagcagcaaggtctcagggcagacagccaggggctgggggacctctcgtaccttgcttgacacggggctccctggagccggcagcggcagcggcagcggtggccggcctggacactggcttcttgctttgggcctccccggcaattccagcctcggcagatttggctctggaagcagacacggcggcccggaccaccgcggccgctggagccttgtgtttcttgttcttgccgcccatgttgcagctgtggcagaagatccttcgcggcccaggccccgacggtaccactgcacagccgagagctcttcacattccccggctccggggctgccaccctgcgcttcgatccgggcttctcgggccggggcgaccgctgcctcgcaattggtcgaattcagcaggctccgcctccttgagtcgccagctgcctgccacacgccaggcgccacgcgccgccctcgctctttatccactgagcagcttatccactttaggtcggaaaggaaaggaaagaaaagcaggaaaaaaaaaaaaagtcaggggaacatttttgtcggctgcgcgactcgactacttttgtctcctgcgggccactgttgagccttcacgagacgtcactgtcttcggtcgcggggcatcgtgggtaggagggagattygctctcactgctcccaaaaatggcggacgcattyggagatgagctgttcagcgtgttcgagggcgactcgaccackgcggcgggaaccaaaaaagacaaggaaaaggacaaggggaaatggaaggggcctccagggtctgcagacaaggcagggtaaggaagaagttccagttgttgcttttattttttttctcggtggggaggaagaaaacactactctcttaggaagagcacgagaaagtgaagtgtacattgagtggcgttggaagtgaaggggttccagaaaaaagttggagagggtggaagaatgttggttcgtggaaggggggtcttggcgtttcctggtgtctgcaggcagcgtgatcttctgcttcaattcccttacgtcgatgttactgattctgtccccatcttcgcggttgtctcctgcaycagcacaacacctggcacatagtcgttaataaacaaacgaatgattagttgagtaaaaggtgaaaaggtttagaaaaaatgatatgaattgatttggaggggaaagggcagataataacatgagaagggagagacatttaatctccagatgtagtagttttctcttccgtaaaatggagataatagtgcctaccactggtggatatgaggattcaatgagatacacgtgtaaagtgcctaacagtggttagctagctatcactaataaatggtagctatcgtgagtttattgagaaaaaatttaaaaattactggaccctacccatatgtttagactggtgcatacagccaccagaaagtgtacagatctgtttatagtagaacaaggaaaagctattacttgtattaaataaagtaagatgattaattaacaatcaacaaaatatactcttggcattgtggggccagatacccaatagatgcttgaaattaaattagacatgattttgctctcaaggaattttcggtgtagggaaagagaacaggtacccattaaagagttacagtataggtgaggaggtcgttaacttaaaatgaatgatatatacaattaagtgttataaaagttcaagaaagggagatcctatttctgactttcaggaaggcttatttatatacaagagaatattctgagttaaggaaattgtgttgttaatggtgccaagtttgtttgtttttaggagcataaattgagcaagaggaactgtttcatttagggactacaagagataagactgggaatatacattgatttgagaacatgaggggccttgaatatcaagcagaggagttttgatttcatttttaaaaccctgttgaacaaggtgattggataagtagaatgatagtttaggaaaattaatttggcagtggttggcagagtactataatagtatagggaaagaagatagacagtgagaaagtaaattaggaaattatgttagttatctggttgtaaagatgaaaagaacctcaactcaggcagtggcagaggaatggaaaggtacgaacatgttaaggaaaaaatggacaggccttcattaattaaggaaaacagggaaaggaagtcaaagagatgtttaatttgcatgtcagggtgaaaaaaacagggacgttcagaggttttgatatagtgataacattaatttggcttgagacaatgtgaagggatgctagtatgtctgtaggaaaatgtccactgggtagttttaatagggttttggagagagaccaggactggaggtatatatttgaatatcatttgaattggtctccttgagatagagatctctgtggggaagtaagtgacacaacacagaacttctggagagggtacataagcctaaataagagattagagggataagagaaaattctatcaggagtgcgaaatgagtggaacaaagtggaaaaatagtctactcgcattaagttggattgggagagtttggggaagcttttcagagaaaataagaaaggaggaccaattatttttatttctttcaagacaggaagtaatagttgctagagtgtttgaatgggcaactatgatattatgaagacaatacatgtataatttaccatgttagtatatactttacctcaaatttgctaggataaaatgagttttatttgcaggttagttggggtaagctgtttgacagccttccaaagtgaaaagaggaaataaaaatctaatttacatttcattatattaggaaatgaatattagagaaaggaaataagaaaacacaggagaacgttagtagcttaaagggttttgtttactaccaacacttctagcaaggtcttctagatatttttaagaaaaaaatcctggccgggcgtggtggctcacgcctctaatcccactttgggaggcggaggctggcagatcacctgaggtcargagttcgagaccagcttcaccaacatggcgaaaccccatctctactaaaaatacaaaatttagccatgcctggtggcaggcgcctgtaatcccagctagttgggaggctgagacaagagaatggcttgaacctgggaggtggaggttgcagtgagccgagactgtgccactgcactccagcctgggcgacagagcttgactccatctcaaaaaaaaaaagagaaaaaatcctatttgcctgattgcagtggccatactaacattatgcatagtgtgattctcatctgatctgtgtaacataggagggcaaatcatggaacttcagaggaacttgccctttatttagtattctagatcaagtggatgctttttaaaaaaatagtttctttaccttttagagatggggtctcattttctcacccaggctggagtgcactggtgcttagcagcttatggtaacctcgaactcctggcctcaagcattcctcccacctcagcctcctgaatagctagaagtacaggtacacaccaccatatcgggctaattttaaaaatgttttgtagagacgggtgtctcatagtatgttgcccaggctggtttcaaactcctggcctcaagcagtcctcccaccttggcctctgaaagtgttgggattccagatgtgagccactgtgcacagccagtgagtactttttaaaaaaactttatgagaattgtcaaactatgtattttatatataaaacagtatgaagagcttcatgtactcataactcagcttcaccaatatcaagtcatgatcagtctattcctacatcttttttttttaatcaaatgcaagttgttttttctccctaaatatttcagtatttatgtcatccaacaaaactaacaataattccttaatatcgttaaatactgaatctgcagtgagatgtccccagttgtctcggatgttttttgatcattggtagttgaatcaggattcaaacaaaaccctacactgtttttattgttatgtcccttaagtattttatgctacaacagcctccctcttttttctttctgccattgatttctattttggagggatgagtgaagggagaaaccaggtcatctattctgtggagtttcccacatcctggatttgctttcttaaactgccatttaacttgctcctgtatcctcaagtatcttctgtaaactgtcctcatccctagagctgcattttgtgacataatagccactatcctcacgtagctgttgagcacttaaaatatgacttgtcagaattgagatgttcggtgagtgtaaaattcacaccagaattggaaacgttaatatgaaaattgtaaaatatctccttaattttaatttggttataattgaaatgatagtattttgcatatattgggttcaatgaaagatattaaaatttatttcaacagtttctttttacctttttaaatgtggttattagaaaattttaaattacatatgcagcttgtagcttgtatatgtatgtatatatactggactgctctgatctagtggcttgattagattcaggttcagtttacttcctatttcattacatcataatgtctgaatattctactgttctaagattgacaagttggcgaaaatagtatcaccctgattcctcatcaacctttcacatgacggctttagcacctagtgataattgcccaggtccattacttcactagtacttgcacagtggcgattttctgtttttatcatttctctctgcatttattacctggaatccacctattaaaaaaggcattgtctcatcagctgtttgtttaccttgaaatacagttcataaagaaaaggcaggataaatgcttgatcctttaacaatttttaaggaaatgagttgtgccctaaggaagtttcaatggtgaccaacatgggtgtatgattatgtttcgtttctgggtaaatgagtggatttttatatatttactcctttgcacttatttcttcttctttttttttttaatcttattggggtataactgaagtgcagtaaaccaccacaatcaagataaacatttccatcaccctcaggagtttttttgtgcccctttttaatacatccctgtcgccacctatctagaacttatattttctaaaattttatttaaatacattatgtattccttttacatggcttcttttactcaacatagtgcttctgagattcagtcatgtggtgtatatcaatagtttgtttttctggctgaatagtattctgttttatgcatataccatatttgtttatacctccatctgttactggacatttgagttgtttctgttacgttttctgaaacttggatttccaatcttttgaacagtgagtgctcttgaggttggctgttgtgtctttttgacaagacatcataagtctttgatagcttatgtgttttttggattttctggactcactatacactttcagtgctaaacttggaatcagccacatctctaaggagtctctaatttcttatagtgagaaatgttattttgtgcttagggtgcacaatgctactggatttcattgcttttaggtttttacagtacaaagaactagggaatctttgtttttataaaaaatagaattcatactgacatttccagtacaattaacatcacagggtttttatttaactttttggatttttataaatgtatcatttctcggttttgttgaaaatcctcattcctaggccaggcacatggctcatttctgtaatcccagcactttcggaggctgaggcaggtggattgcctgagcccaggagttcgggaccagcttgggcaacgtggtgaaaccctgtctctacaaaaaaaaaaaaaaaaattagctgggtcttgtggcatgcacctgtagtccctcctagtcaggaggctgaggttggaggattgctttagctctgggaggttgaggctgcagggagctgtgatcatgacactgcactctagcctaggtaacagaaagagacatgtctcaaaaaaaagaaaagaaaatcctcattcctgctgacaattacataattaaactttttcttatatatacttacaatagtttaaaaataattttgcaattaataagatattgaatgcaattgtggttctttttgccctcaatatattgtggtaacagtgaaaatactctgtagtagttcttttctctaaatgtttatgccactaatttgatatttattgtgttcatttgtttcagtgtatttacagtttttaagaattgctaaaaatttaatttttaagaaattatgtaaaagattttgtagttccaaaatcaaaagtttaaaacagtacattcttgcttccatccttgccccttcttccatttcctccctcccctttagtttttgctttgtctcttttctttttgaaaatatcaaattgtgcgtacatgtgtctatcagatgtctccatttctcacttcttgtgcaaaaggtagcattaaaaactgttcatctttttttacttgatattttgaccaagagatcatcgtatatcaatatgtagagagctgttttttttttttaacaactgcatagttgcagtccttcaatcaatgttctctgaatgaacatggtactattttcagtcttttgctgttacaaatgatgcaacaatgtctgttttgtagaagtctgtttcttgttgttgttgtttgccattttatctttggaatagattcctagaagcgaattactaggtcaaagagtaactaagtaggcatttttgctagatgtagccaaattcctctccacaggagatgtaccattttgtgttttcaacagtgtggtagcaatgacagtcccccagtgatgttcatgtcccaatccctagaacgtttgaaattgttaggttacttggcaaaggagaaagttgcagatggagttcatgctgctaatcagttgaccttgaggtggagagagaattctggatcatccagttgggaccgaagtaataacaagggtttataaaagtgaaagaaggaagctgaagggagagawccagaaagacagcaacattagaagggctctggctgactttaaaggtggaggaacagggtcataagccggaaaatgtgggtgatctctagaagtggaagtggcaaggaaatggattttcccccagagccttcaggtaggaacacagccctgccaacacagcaccctagttttggtcttgtaagacctatattgcacttctttctttctgaactataaaacagtaaatttgtcctattttaagccaaccatcgccaacctttttagcaccaggggctggtttcatggaagacagtttttccacagaccagcagtagggggatggttttgggatgaaactcttccaccttagatccttaggcattagattctcataaggagtgcacaacctaaattcttcacatgtacaattcacaatagggtttgtgctcccatgagaatctaatgctgctgctgatctgactggaggcagagctcaggtgataatgttcactcactcgctgctcacttcctgctatgcagcctggtttcctaacaggccatgaactgcccaggggttgggggcccattttaagccactgggtttgtggtaatytgttacagcagcaatagaaagttgatacaaacagtaatgtgtgagagtactttatggcctttttcacagtgtattgaacttggatttttgtcagtgagatagatgagaaattgtatttcaattcgtgttaatttatatttcttttcatctttaaaaaaattgatagttggtccttcttaatttttggacctctttatagactagggatattatttctctaacataaattgcaaatattttccccaatgttttgtcattcagaaaaattttaataaagtcacgtttgtcgttcttgttgctcttggattttttgtcatgttttcttcaaatccttgtatggttttatttgttacatgtgcatctgatccgttttaaaccagtgattttcattgtgttaaacagattgcccagatagtctaaaatcattttgacaaatatttgtagttattattattatatatatttttcgagacagacaacaacaacaacaaaaacccatattccattgcggcatagagcaatagttaatccactggagattactatcaggttaacttctttgtagctctcagaatagaactatttctgagtatatgtgtacttcatacaaatctccatcaactaagaaggtggttgttctacactagcattttaaaaatagtctgtatttatacttatgtataattgtacagtgaagtataagactgtggagctgggggcagtggctcatgcctgtagtcccagctagtagggaggctggggccaccctggatgatacagctgggacccaacttgaaaaaaaaaaaaaaaaacctgtggaacgctcacatcattgttttrtaccccggcagaaatcaaataaacacagttagaagttacaacggaaatgttactactgactccacagaaataaaaacaaccatcagaaactattatgaacacctctacacacacaaactagaaaacctacaagaggtggataaattcttggacacatacaccctcccaagactgagccaggaagaaattgattccctaaacagaccagtagcaagctccaaaattaaatcagtaataaatagcctacccaccaaaaaaagcccaggacctgatggattcacagcagaattctaccagatatacaaagaaatgttggtagcattcctacagatattattcataaaaattgaggaggaaagactcctccccaacttattatgtgaggccagcatcatcttgatatcaaaaatgggcagagacacaacgacaaaaaacttcaggccactatccttgatgaacatcaatgcaaaaatcctcagcagaatacttgcaaaccaaatccagcagcacatcaaaaagctaatccaccatgaccaagtaggcttcatccccaggatgcaaggttggttcaacatgcaaatatcaacaaatgtgagtcatcacatgaacagaactaaagacaaaaaaccacatgattatttcaatacatgcagaaaaggccttcgataaaattcaacacccctccatgttaaaaactctcagtaacctaggtattgaaggaacacacctcaatataatagagccatctatgacaaacccacaaccaacattatactgaaaaagtgaaagctggaagcattccccttgaaaactggcacaaggcaaggctgccctctctcaccacttctattcaacatagtattggaagtcctagccagagcagttaggcaaaagaaagaaagaaagggcatccaaataggaagagaggaagtcaaactgtttgcagacaacataattctatatgtaggaaaccccatagtctgggcccaaacactccagctgacaaacaacttcagcaaagctgctggatacaaaaattagtgtacaaaaaaggctagcattcttatacaccaacagtagccagactgagagccagataagagaagcaatctcattcacaattgccacacacctcccccctcccacacacacacaccctagaaatacagctaaccagggaggtgaaagatatatgcaatgagaattacaaaatactgttcaaagaaatcagagaagacacaaacaaatggaaaaacaccccatgctcatgaataggaagaatcagtatcatcaaaatggctatagtgcccaaagcaatgtacagattcaatgctattcctatcaaactaccaatgacattcttcacagaactagaaaaaactactttaaaatttatatggaaccaaaaatagccaaggcagtcctaagcaaaaagaacaaagctggagaggcatcacattaccctacttcaaactatactacaaggctacagtaaccaaacagcatgatactggtacaaaaacaggcacattgaacaatggaacagagtagagagctagaaataaggccgcacatctacaaccatctgatctttgacaaaactaacaaaacgaagcagtggggaaaagactcgctattcaataaatgctgctgggataactggctagccatatgcagaaaattgaaggtggaccccttctttacaccatgtagaaaaatcaactcaaggtggattaaagacaaatgtaaaacccaaaactacaaaatccctgaaagacaactaggcagtatcatcctggacctaggaatgggcaaagatttgatgacaaggacaccgaaagccattgcaacaaaagcaaaaattgacaaatgggatctaattaaacttaagagcttccatacagcaaaagaaactatcaacagagtaaacagacaacccacagaatgggagaaaatttttgcaaactatgcatttgacaaaggtctaatatgcagcatttataaggaacttaaatttacaggagaaaaacaaccttattaaaaggtggacaaaggacatgaacagacatttctcaaaagaagacatacatggggccagaaagcatataaaaaaagctcagtatcactgatcattagagaattgcaaatcaaaaccacaaatgagataccatctaacaccagtcagaatggctattactaaaaactaaaaaaatagcagatgctgtcaaggttgcagagaaaagggatcacttataactgttggtgggagtgtaaatcagttcaaccgttgtggaaggcaatatggcaattcatcaaagagctaaaaacagatataccattagacccagcaatcccattactgggtatatacccacaggaatataaagcattctaccataaagacacatgcatgtggatgttcattgcagcactattcacaatagcaaagacatggaatcaacccaaatgcccatcaatgacagattggataaagaaaatgtggtacgtatacaccatgaaatattatgcagccgtgaaaaagaatgagatcatgtcttttgcaggaacatggatggagctggaggctatcatccttagcaaactaatgcaggaacagaaaaccaaataccgcatgttctcgcttataaatgggagctaaaagataacttatgaacacagagaaggaaacaacagacactggggtctacttggagggagggtggaaggagggagaggagcagaaaagataactgttgggcactggccttaatatctagatgatgaaataatatgtacaacaaacccccatgacgtgtttacctgcgtagcaaaccttcacatgtaccccaaacctaaaataaaagtttaaaaagaccaaatacttctgcttggcacatgttcttctctaggcgagatacaatggttgtacacaacagtcactgcttaacttttattacaagtagtactaaatgtcatttcaggtagtgtgagtacttaaaaaaacttcttatttgacataatttcagacttagagaaaatatataagaatggcaccaaaattcttgtacatcttcactcaaatattctaaattttaacactttaccacgtttactttatcctcccttcctctttcttcccataatgcatatgtatatgtgtatgtttgtggatayataattttttctgaactgtttagagtaagttgcagatatgttgcccatttacctctagatttctaagttgcttagtctgtattttctgaaaatgagagcattcttttatgtaaccacagtttatagttatcaaaattaggaaattatatattgatacagtactgttacctaatcagacttatccagattttgccaattgctttaatgtcctttataagaaaataattctatataggattaagtgatttggttgtcatgtcttttttgtctcatgtaatatgtactagtctttgaatttcatgaccattttagaatgtgttgctaggtgttgccaaattcctctataggttagagattgatttttatcctctgtaattacaggctagttatcccagtttgggtttgttggccaataagttataattagatgttggccaaatttgttgtttgggcttaatggccaatttggtgctctttcttgtgctatgtatagagcatgctacccttatgaactaagaagaataacattctcagatggtttcaataaattaaaaccttatccttaaaaagtaagctggttatctacaacacttcatttccagcctttctggataactcagatgtttgtgtgcaagttccacatgtgacgtacataccaagctatgagagaaataaataattagagtcctaaaagtctgacatgcaatattaaagaataatgtagcacttctgaccagaagtgttctaccatgaatttcagtttctcaaaggtttgggaactttcatgtttctttgttttatagactttaaccagctcctaatagaatgttttaaatatagtggcttagttgttgcttactcagagatagaataatagaatgttacacctagaaaggatctcagttattgtccaaatgtcttgttttactgaggcccaaggatattgatgacctgtccagaagaggttcacataagtagtcagcaacaaaaatgggactagaatgaatagctttttcgcaaaattgggagtgacagaatttacaaattttaggttttgctaggtatcagagaatggacttcattatggaaaggttgttcaagcatatggatcagtattgttttaccctttattaaaaagtcttttttttttttttttgagagggagtcttgctctgtcgcccaggctggagtacagtggcacgatctcagctcactgcaggctccacctcccgggttcacaccattctacctcagcctcccgagtacctgggactacaggtgctcaccaccacacccggctaattttttgtatttttagtagagacgacggggtttcaccgtgttagccaggatggtctcaatctcctgacctcgtgatctgcccgccttggcctcccaaagtactgggattacaggcatgagtcaccctgcccagcctaaaaattgtttaaataaaacataaagaaaagtgtgcagattatgggatggatttttagagtgtgtggaacacatccacgcagccaccattctgtgcaaaaaaatagaatattacaacccctctgtgtcccttagaaaaaataactgtcctgataacaacatgtgttagtttttttgtttgggactgttatgtaagtggaatcatacaaaatatatttttatgtttggctttggctcaacatcgtttgcacaattcatgactaaatggaatagcagttctgagtgtgactgttttgttacgggatcagaggggcaaagtcacaattttccgaaaagtctattaaaataccctgtccttttttagttacatatctgtgtaaggctagatttttcttcataygctttgaccaaaacaacatgtcatagcaagttgaatacagaaacaggtgaatcctgctgtttctgttaagccagacatgagagatttggaaaaatataaaaactatgccattctcgttaaaatttttttagaaaatagttattttttaccaaaaatgttactcatgttaatatgtagtggtttgactgttgccattttaaagtgaattaataagtatttaaaaaaattttaatcttaatatctaatattgcaaatatcaatagatacaaccacataaaattcattagagtttcttataacttttaagactgagaaaggattctgaaaccaaaaagtttgagccactgacctgatatctgatttacaattctgtcataagtaatggtgttgagctccttttcatgtgcttgttgcccatttgaatatcctcttttctaaagtgcccactaagtcctttgctcatttttttaattgggttatcttttaaaaattgatttataatcctcacccctaattttctgtcctggttaagaagtccggaagatcattttctcattttatcttctagattctttgttatttttgccttttcacacatctaaaattcacatggaattgatttttgtgtatgatgaggtaaaggtcagattgaattcccctatggatattcagtgtaccaaacatctattttttttttttttttttttttcctgagacagtcttgctttgtctcctaggctggagtgcagtggcgtgatctcagcttactgcagcatctgcctcctgggttcaagcagttcacctgtcccagcctctcgagtagctgggactacaggcatgcgccatcatacccagctcatttttgtatttttagtagagatgggattttgccatgctgtccaggctggtctctaactcccgacctcaagtgatcatccacctcggcctcccaaagtgcttggattacgggtatgagccaccgtgcccggctccaaacgtcatttattgtcactacttttgaccagcaaatctaatcacaaaaaattttcttccaaatagtagtatcatgcctttagagaaagcattaaatgtttgttaaaggtaactcatgttaatgtctaatgatgttttaatttacagttttaaagaaaatatatttaatagttatgttaatgtgaattttaagataattttaaaccgtcaaagaaaaatgaaatacaaatgcagtaaagtattcagttttactagttataaagttaaggtattccgggcttcagccagttgttgtttgtaacattcatctatttaaaacatgactttctgttaatggtatagagcagtattttatgatgttgcccttaaagtaaaagtggatactgcagaattcattccaaactatttacttttcaggaaacgttttgatggtaaattacaatcagaatcaactaataatggaaaaaataagagagatgtagatttcgaaggtacagatgaacccatttttggaaagaagcccaggatagaagagtcaataactgaagacttaaggtaatatttccaaagtcctaaatgttagtaactcataattcaggtggttacatgaggttttaaaaattgtctccatgttgctacttagatatatgcccgtattagagaaatgaagatattctttctatttttacacaggcatgtaaatgtagaacacttacctaagtttggggagttggaaagcaatatggaaaatactcatcttttaatactttagaatccagttttgagaaaaaagtcttaaaacctgattaaaaaaaatacgttttctttatttgtaatgcctcaggaggaggataactggaagagtggaataaaaggaaaaaataaagctaactcagtggaaggaataagtgggaaggaacattagagcgaattagattttcattgttgcatgtggagtagagtggctgtgcatctcaagactcctgctatgggtatctgtggctggaatcgctggtatttatctgattttggaagctggagctttctaaaagttgatgccagtacccttggttgacctgttttgtattgtggtaatgatctttacaactttgctcctcccttctaatgttccatatttgaacttggcactaccatgaagagtttacaatttctgtgatttttttttaaaaccagttaacttttgttacagttagtaaaattatctcctataaatggtgatagatgtgtcactggaatatttaagatgcaccattttcccaggctactataataagttacaaaataatatttgtagtttaaagtcattgttacttgtttgtaacttttgagtttgtccaaagtaatattattgacttaaatctcagaagtacgataagtaagataataatctagcacagaaatacatctatttttcttcagtttatccagttttgccttttcagagtcttaacagaggacctagatagcataatgtaggattttgatgagaataaggaactttttttttttgagacattgtctcactctgtcacccaggctggagtgcagtggtgtgatcacagctcactgccatctcagcctccccagggtcaggtgattctcctgcctcaatgtcttgagtagctgggactacaggcgcgtgccaccacgtatgctaatttttgagtttttttgtagtgagtttctgccgtattgcccaagctggtcttgaactcctgggctcaagtgatccacccacttcagcctcccaaagtgttgggattacaggtgtgagccactgtgcctggccaggaacacttctataaataatagcaacaaatgaattgggctagtttactttatactttctattgtgtaatggtttataaccagcttatgttttgargtggtgacagtgcttggtagaggcactttttattcaaaatagttattggaactaagctgacataattatttgaataatcactcggcagtctgttctgtatctgtaataaaagatgttaactggtcatttttaattttcagcatatatttgcataatgtgaaaacatttctatgtattcttaatagccaaagtttttcctatttggaatactgatgattggacagtgtcattttccttaacagtgcaatgtgaggcttattatcaaattatagaaaagtaatttgtttttgtgtaactttaaacaattctttttaagtttggcagacctgatgcccagagtcaaggtacaatcagttgaaactgttgaagggtgtacacatgaggtaagcacaaacagcatacagaaggttagtgttacaaatgggatttttctttggactatctagtatgatgatcagcaaacagtttagccatgaggaccttggaaacaataaatagtttccmtggggtacctagtggaagagttggggctttgtaattaaacttgggttcagatcctcccccagcatttttcttaactataatcttgggtaaatttcttattttaacttttttttttttttttttttttttttttttttaaggcagaggttcgctgttgtcgaccaggctggagtgcaatggcgcaatctcggcttactgcaacctccgcctcccgggttcaagcaattctcctgcctcagcctcctgggtagctgggattacaggcgtgcgccaccatgcccggctaatttttgtatttttagtagagatggggtttcactatgttggccaggctggtctcaaactcctgacctcgtgatccacctgcctcagcctaccaaagtgctgggattacaggcatgagccactgcgccgggccaatcttgggtaaatttcttaacctctttgtttatttaaaaacattgtttttttgtagtttttaaatttgcaataaagggatctaccttgtggtgtggttgtgaggattatagaagtaaattaggtaaagtacctagcacagagtaggtgtttagagcattcatactcctaaagttaagtaacagtgctatttttgaaggttacatgctatttcatgtcttgctccaatgactgataaattgcagtttctttgttctgccacaagatggtggtcagagatarcttgtatccatttagaagtgagaatttatacacattagggacatgatggaactataacactatttccttctcaaaattttttattataaacattatagcaagttatttttagaggtaattggagaatctcattaaaagtctgttgaataagcagagtaatccaaattaacaaaaagactttcaatgtaggtttagaaccttatcttttttttttttaacttcagattcaggaggtggtacatatgcaagtttgattttttcaggaggtggtacatatatgcaagtgttgtttttttgggggggtttttttttgttttttttttttttaagagtctcactatgtcatccaggctggagtgcagtgatgtgatctcggctcactgcaacctccacgtcccaggctcaagcaatccttctgtctcagcctcccaagcagctgggattacaggtgcgtgccaccacgcttggctaattttttttttttaatttttttttttatttttagtagagactgggtttcaccatgttggtcaggctggtctcaaactcctgacttcaagtgatccagccatcttggcctcccaaagtgctgggattacaggcatgaggcactgtgcctagccatgtgcaggtttgttacatgggtatatcgtgtaatgctgaggtttgggcttcagttgaacccgtcacccaaatagtgaacatactacccagtaggtattaaatagtttttcaaccctttcccacttcacttcctgctgttggagtcctcagtgtctgttgttcttatctttatgtccatgtgtaccctatgtttagctctcactaaacgtagtgagaatatgcggtatttgattttctgtttctgcgttaaatcaggatgatggcctccagctgcatccatgttactgcaaaggacatgatttctagaaatttatcttttaaaatatttttctactgaaagtctcttatgtttctttagaggtagtacatagtgtctgacaggtgtgatgtccatttgattattcaagatatgttagaccctattcagttatctgggcttataaaagatggaaaaacataaacatggctgggcacagtggctcacgtctataatcccagcactttgggagggcgaggcaggcggattgcctgaggtcaggagtttgagaccagtctggccagcatggtgaaaccccgtctctactaaaaatacaaaaaaaattaaccaggcatggtggcatgtgcctgtaatcccagctactcaggaggctgaggcaggggaattgcttgaaccagggaggtggaggttgcagtgagctgagatcacgccactgtactccagcctgggtgacagagtgagactctgtctcaaaaaaagaaaaaagaaaagaaaaaagaaatacaaactctattctcaggaggtcaaaagccccttctgtgctccatgattatcttcaagcccacctttctgtcacttcttcccactttctcagcagggtgacttttcctcttcacaggcttgaggatatcaagttgaaatgtcctctgattataacctccatcaccaaggctatttgtacgtgtcacattccccttccagactaaggatggttgttctgccagtattcttggttgtgtcttatcctatctccacaaagactttatttatttatttttaattattatactttaagttctggggtacatgtgcagaacatgcagttttgttacatgggtatacacctgccatggtggtttgctgcacccatcatcctgtcagccttcattaggtatttctcctaatgctatccctcccctagccccccacctctctacaggccccggtttgtgatgttccctgccctgtgtccatgtgttctcattgttcaactcccacttacgagtgagaacatggcagtgtttggttttgtgttgttgtgatagtttgctgagaatgagtttccagcttcatccatatccctgcaaaggacatgaactcatcaacttttatggctgcatagtattccatggtgtatatgtgccacattttctttatccagtctatcactgatggacatttgggttggttccaagtctttgctattgtgaatagtgctgcaatgaatatacgtatgcatgtgtctttgtagtagaaagatttataatcctttgggtatatacccagtaatgggatcctgggtcaaatggtatttctagttgtagatccttgaggaatcgccacactgcacaaagactttattaatttccttttcccttaactatttctagagtctctttttttctaattgccattccctgtcagcatatgagcattcaaaagtttctctttctgttctatgttgttttctacccactgtgttgttattcttctgttttgtagtagtttcgactttaaaaagtacacagtttcctcagggagataaacatcagctttcaattattacccttagacaaatgcgagtagatgtaatttctgagtgttgaaactagctttttgccttgttcttaaagacagttatttgatttacagtgtctgagacagctaaagttcatcactctagttcatcagttttattttccaaaccatcattcattatggaatgctaaatacatcagttctcaaatagttggtgaggtttttttttcttttttactttgttgtcaggttgcacttcctgcagaagaggattatttaccacttaaaccacgagttggaaaagctgctaaggtctgtactttgggtaatacagtttatatagtttcgtgagactctctttttcttaaaattcttatttcaaatgagatttttatatttcccacaacatgtrtatgtatgtatcaagaacaagccaactaaagacaaatataatgagaactgaatcagttaacaactatgctggaaaccagccattacatgatgagattttaaaatattaaaattatgattctcaaccttttaaaagaatgtaatgaaagttatcaacctttctccagaaaaaaatacatgtgtactagtttttgcctatagttttagggttttaacaggcttctaatgaaaccggaactctgtgctttttttagacggatttggaaggcctgatagaccttaaaaggccaagaaatttttaaggtttaattttccaagtaattttcttaaataaaaaaggcggtatggtagagtatgcatgaactcttaaagtctaatagatgtaatattctgcctctacggagtgaactttactgagagacttttagagcctcagagttcctacctatgaaaggaaataatatctatgataggggttgttgtgaaaattagtaataatatatggaaaatgtgttacacagtgcctggccacagagcttgtttttggtaaatggtaatgattattttattattaatataatagacaccaacataatgtgatgattgaaagattagagagcagaattagcttctatgttgtttgggcaaaaatgtagtgtactcttccttattttcactaatgtgtagtatattttctaaataaaatcataaaggaatactcccagaatgctttggggggtagcctgcttgtgttttgattttaagtatgctctgatacaactagatgtttttatgcagatattaatgttttgtttttataggaatacccgttcattcttgatgcttttcaaagagaggccattcagtgtgttgacaataatcagtctgttctagtatctgcacatacctcagcgggaaaaacagtatgcgccgagtgagtagcttcctttttaaagtcactttgtttcttatttcactctttaaaagtttcttttttgctgtttgatttctgctagtgaagatggttttacttgtcccttttgaacaatttctttttcatgtcttattgaacctctaatacaatgtttacttgaagtaataaaagaggacattcttttcttgttcctcatattaggagaaaaacactcaggctttcatcgttaagcatgatattacctgttggtttttcacagatgctttttatttatcagtttgaggaacttctgttcttggtttgcagagattttgtttgcatatgtatttatgtctatgggtataaaatatttagatactggattttgtcaagtgctttttttgcatctattgacatgatttttttttttcttctgcgcagtcatggctcactgcagccttgacctctgggctcaggcgatcctcctgcctcagccttcctagtagatgggactaaaagcgtgcaccatcacacctggctaattttttttttcttttttttttagaggcaacacagagtctcaaacttaaataggctggtctcaaactcctgggctcaagcaatcgtcccaccttggactcccaaatttctgggattacaggcatgagctaccatgcctggccatgtttttgatatgtttcttaaataatttgacacgtctgataagttatgtttgatcttgttttctgtacagcatcatttcccttctatctgaagaaatgcctttagcagtttattgtagtgcagttctactgatgagaaaatcttaacttttgtatgtctgaaaatcttttacttttttttgaaaggtattttcctttggtatggaattgtaattttcttttaagactgccttttgacttgcatagtttatgacaagaaatcctagtatacctttgatactctgtacataatgtgtcttttttcctctggctgcttttaagattgatttttatcattgattttaagcagtttgttttttatgtaccttggtgttgtttttgcatttttttcttgtctttgggtttgtttttgcagtcctcagggctcttgttccaggactcttttgggccgcttaaagttgtctcacaactcactgatactatattcattttttttcttttgagtttcatttgtgggtcatttctaatgcaatgtctttaaatttattaatctttgcttctgaattttctaatctgctgttaatctcattgagtgctacttttttattggttggtttgtttttgaggcagggtcttgctctgtcgcccaggttggagtgcagtggcacaaacagagctcatttgcattctcaaacttgtgggctcaagcagtccaactcagcgtccctagtagctgggaccacaggcatgtgccaccatgactggctaagtttttgattatttgtggagatgaaatctcgctatgttgcctacactggtctcaaactcctgggctcaagtgattctcctgccttgctctcccaaagtgctgggcttataggcatgaactgaatgcatttttaatctcagatattatcttttctttgctagatgttcaatttatttttgttttcctccgtgtctcttaactttttttagcttcctttttttcgtaatgtttttttctatttctagtttatagaaatcctaactgcttgaacagatagggtacagttacaaaaacgttaaatgtccttgttactacttcgtttatctgattacttcctggtctctttgatggattgactttcctgcttctttgattttttttttagtcactgacttcttgattataatgtgactgagatagtttttttttttcccatgtttcttatacttgagtttgtagggtttcttagatgtgtggatttattatagttttcattatatttggggaaatttcagacattttttactgcaaatattgcccttcctttatttctttgaggactcaagttatacttacagcaggcccctttaagttgttcacagcccactgaagctgtgtttatttattataattttatttttggtgtttattctgtttcattttggatagtttctgttgctgtgacttcaggtttattcactttttttttattgcagtgtcttaatctgcttttaatactagccagtgtgtttttttaatctcagacactcagtttccatctctaaaattttgatttcgtcagtgttttccgtatttttacttaacgtgctgtttaattttcctcagctttcttgagcatatagagtactgttatagtaacttttaatatccctgtttactaattctgtcatctgtctcatttttggatctgattttattgattaaaaaaaaattttcattacagactgtgttttcctgcaccttgacatacctgatacttttttattgcatgccaaaacattgtgaattttaccttgttcggtgctgaatacttttgcatttttgtacatatttgtgagatttgttctgaggtatagttaagttacttggaaaaaatatccttttgaggcttacttttatgacttttttaggcacgaccagagtagcatttagtctagggctgattttccccactacttagtcagtattccatgcagtatcttgtgaattctgaggttttccactgtagctggtgggaaaccacatttctgccagtcgtgtataagatttggtaatttttatctcttctcctcttggttggtttttccctggcctcataatttcctaagacttattcacggatcattactacctgaagacttgcagatgctcagcagattttcagagccttctctttgcagttgtctcctctggtattctgccctgcaaactccagctgccctggccttcacagactacgatcttggtctgttcaacttagggaaacttccagggtttaccttggttgcccatcttagaactgcagtttggaaaatctaggcagtaattttggattacctactttgttttctctctcttggggcgtactgttcttatatccagtgtatgaaaccactgtttcatatattttgtgctatttatcattgtttcaggtgggtgggtaaagccagtttctgttactccatcttggtgtaagtggatgttttctgtattatttttaatgtacattatgtattactacaatagtgcacgtattttggtaggttcctgttcttctaaaatatatttaataactaagattgtgtagtcttgctactcaaagtatagtccttgatactacctgggaacttgttaggcagaatctctagccccaccctataactgctgattgagaatctacattttaacaagatcaccaggtgatgaatactaatgtttgatggaactgggccattctaaaagtggatggatggtgctcattaatgtggatggcgttttgcaatctgttgtagattgactcttttgatttaacttttacaatttataacatatttctctatgacctttccagttgagtagctgaattaggtactcttaacaggggatacctaaagagtaaagaagactgtagagaaaagaaacagataaaaaaaatggcaccagtcatcctgttcatcagccattttaccttggcatggtggttgtcttagtctgttttctgttgctgtattctgctttaacagaataccacagactgggtaatttataaagaaaggaagtttatttggctcatggttctggaagctgagaaaaccaagaacatggcacaggcctctggcgagagtcatcccatggcaagaaagggagaggaaattgggcctaacttgtccttttaactggggcccacccccttgataattccctcccaagataatgtaattagtatattcatgaagatggagctttcatgacctcatcacctcttaaaggccctacttccaaataccattactttggcaattaaatttctacatacatttcgtaggggtcatctaaatcatagtagtgatcaaaataattcatgaatcctggaatatttttttccttaacaggttatcttatctattattagttccttccagaccttggcttatctggtcattgtgttattaattcctaattccgtcatctgtctcattttcagatttgtttttattgatttttttcccttgtcattataggttatattttcctgcttctttgcataccttttattgatactaaaacattgtgaattttaccttgttgggtgctgaataattttgtattcctggtcagggcttatctggtcactgtattcattccttccagaccttggcttagctgtgtaagtctcagtttttctcttcgttgagttagaggagtgaagtttgtatcttatattgtcatctcagcagtatcagccagttgcagaatagtctttatctctttctcagccttaaacacattatggttctctatcaccctagttatgttcagtggaatttcttaagagtccactcctgttcagaagatgcttaattcacaaaccagtttcctcctaaggcacaggtatagaagaagagatttgactactcttagttcaattatttttttcactatttaattgtggtatgtttggtgctttatgcatttaaagccagcatatgtataataatttgatttttggccattagtgtaaccttgctttcatttttcctacaagaggagagatttttctgtagaggaagttttcatatagatatgctgaaacctgctctaaaacttgggctaggaagtcgtaaagggaatttaagaaattcaccaggattgtagatactasaaaacctgatgaggttggctgtggaaaacagtctggcaattcttcaaaaagttataatgtagaattgtcatatgacccagcaattctactcctagatttgttataatgtagaatttgttataatgtagaatgttataatgtagaatgtaatgtgtttgttataatgttagaattatcatatgacccagcatttctactccyagatttgtacccccaaagaattgataacaggtacctaaacaaatcttcacagcagcgctattcacaatagccaaaaggtagaaacaatccagatgtccatcagtggatgatgaatggataaataagttgtagtatatccagacagtggaatattactctgccataaaaaggaataaagtgctgatacatgcttgaaaacattatgcgtactaaaasaagttggagtcaaaagattgctttatgattccatttatgtgaaatatccagaataggtaaatccatagagaaagacagcatattggtgrgggacagggactagtgagaggaggggagtaaagaataactgcttagtgagtacagagttttttgggaggtgatgaaaatactagaattagatggaggtactggttgcctaacgttatgaatgtactaaatgccactgaaatatacactttaaaatggttaattttatgttatgtgaatttcacttcagtaaaaagtaaacctgrtgaagtacctaattgtatatgcacaccagatgttgcacaccagatctcacatattttccctagtgataaaggactttaggtaaactcctacttcacctgttaactatagcagggtgcaacattttatttataaacctggtactaggactaacgtgttggtatcaggttgtttatatatgtaaaacaaatactttttctgacactgctgattttttaagtctatgtgaatagctttattatataatttacttaccattaaatttatctatcataaatatgtatttgagtgagttttagtaaatcggtacaattgtgcaacccttaccagttttagaagacttccatctatttagttctcttatgtgtgtttacattcaaacccattcctatctctagccacaggcaaacactgatcatcttttggccattataatactgatgtaaacattcatgtgcaagtctttaagtggacctatgttttcgtttctcttagctaaggtagatacctaggaatgtgattgctgtattttatggcaaatatgtatttaactgttgaggagactgctgaactattttttaatgtggctgtaccattttatattcctaccagtaatgtatgagggtgccagtttctctgcatccttccctgctcttggtattgtctttttttattatacccatttcagtgatgtcccaaagtagttttaatatgcatttctgtgatgactaagggtgttaagcatcatttcatgtttatcatttctttatatatctttgaattgtttatttcagtcttgctgatgttttaaattgggttgttggtcttaattgcgttgtaagaagtctttattagcatacaagtttttttaaaaagcagatgtgatttataaatatgtttttcattctgtggcttgtctcaatttccttttgtagagaaagcattttaatttaaatgtttaatttcttaatattttatagattgttcatgcaattggtatacctaagaattacctaattgtgattttgcctatcccaaaatcacaagtattttcttcttcgttttcctcttgcaatttcatagtattagttcttccatttagatctgtgattcttctcaagttagtttttctgtaagatgtgaggaaagggtctaaatttagctttttgtatttggatatccarttgttccaattcaaagtactatcttttcccattgaattgaattcccgtaaattactcgtaaattgtgtaggatcgtttctggactttgttatatctttacactagtacactattttgattactgtggggttataataagtattgatactaggtaatgagaatcttctaacttcattatttttaaaaactgggcacttccaggtcttttgtatttccaatagtattttaagattggcttgtgaatttccaaccagaaagcccattttaattttgatagggattttgttgaacttaaaaattaatttggagaaaattgtcattgtaacaatattgactcaatcgatgaaaatgatgtatttctccattatttaggtcaactttaatttctgttagcaacactttgcaattttcagtgtataggtcttatacgtgttttcttaaacctattcctaagtatttctgtttatgctattgtgaatcacattttttcttaaggtcatatttggattgctaatagcttgtatattgaaatacagttgatttttatatactggtattttatccagcaacctcatcatgtttccttaagttttattaacttttttgtacattccataagactttctatatagatgataacattgcctgtgaaaaaagatggttttacttccttttcaatatgtgtgtcttattgcattgtcaatatctagtacaacgttggatagtactgagagtggacatccttgccttatttctgatatgaggaagaaagcattcagtctttcaacattaagtatgacgttagctgttttttgctggttgctctttatgagaatgaagttgtttctttctgttcttagtagggaataaatgaaaataaacaaaaaaattgagaatttttatcaagatatgttgtattttgtgaaatgatttttccatctattgaggaaatcgtagtattagctttttattctcttagtgtactatattaaattttctgattttaaaccaaccttgtattcctggaataaatctggttgtttatggcagatgatcatttgtgtatgttactgatttcagtttgccagtacagttgtcactcattttccagggaggattgggtcccagaccccctcatatagcagaatccacagatgctcaaatttctgcagtaggccctgtggaaccttcagatgtgaacagttgtctctccgtatccatgggttcctcatcttgcaaatacgatagtgtattttcaatcctcagaacctgcgtgtgtagagagctgactctggtttattctagacttttgtgtcatcatgaggaataatggtatgtgattttcttataaagtctttggcattggtgtcggagtaatactggagacttaaagtaagctggtagtgttgcctcctggtctgttttccataagactttgtgtatttggcatacttcttaaatgtttgatagaatttactagtgaagccatttaagcctaggcatttctttgtgggaagatttttaattcctaatttaatttcctgttttttaaagccaattttggtaaaccgtgtctatctagaaatttctttttttcttttatgagacagggtcttgctgtcaaccgggttggaatgcaatggcataatcatggctcactgcagccttgacttcccaggctcaactgatgctcccacctcagccaccttagtaactgggagtacagacgtgcgctaccacacccagctaatttttatattttatttatttatttatttttaatttattttttgtagcgacagggtctgtgttgcccagactggtcttgaacttctgggctcaagcagtcctcctgcctcagcctcccaaagtgctgggattacaggtgtgagccactgtgcctggcgtagaaatttcctgaggttttagataattctttatgtttaatgtaagtgtttatataaaactataaaatttcactcagtactgcttaaaatgcatcctgtaaactgatattactgtgtttcattttcatttaatccactttttcatttctcttttggttcccttgtatgttgtttacttttcaaacgtgattttccatatacttagccatttgttatttctaacttaatttgtgattagagaagatacttcgtgaaatttcagtagtttaatttaatgattgatatggttggatttatatttgccttttgttgttcgttttgggggtcttttggtatatttctcatgttttttttttgatccttatttttcctccattgccttctattttgtttaacaaatatcttttagtgtaccattttaatttctcttgactttttagctttctttgagttagtttttagtggttattttggggcttacagtatgcatgtttaactaaatcacagtcacaatttatggaaaatattgaaaacttgccctagtattttcttctcatttttgtactatttaatactgtcatatatttcaactacatatgctataaatctaataatacagtatctgtaatacagtataatcattgctttaaattgtgttttctaaaaatattaagtgataaaaattttatatatacctttacatacatagtcttaattgttctgttttatggtattgcttccttttagtttgaaaggtttttaataaatatttcttacagagtagttttattttgctttcatttttgaaggacggtgtcactggatatagagttcctggttgaccgattttttttccccttcaactccagatacatcattctactgatatcatttcattctactccattgtttctgatgagaagtcagccttaattatgttgttctcttatgtattgagtttttctgttgtggtttttcaaagactctctttgcctttgtcatttagcagtttaactatgatgtttctaggtatggttcttttttgctttttcatgctgtgttaattgagcttcttggatctctaatgtcttttaaacaaatgaagttttttattgttttttttttcctacctctttcttattttggaatttcctttgagatacttgaggatgtcttgcagatacctgagtgtctcttatttttctatttatttttctctttagatttgataatttctctcaatttatcttcatgttcattgataacagtcatcacaaatctgcttatgggcccatctagagaattttttcttttgattgttaatctgtagactttctttttctttttttttttttttttttttttgagacacagtctcactctgtcacccaggctggagtacaatgacgtgatgttggctcactgcagcctccacctcctggattcaagcagttctccttcttcagcctgccaagtagctgggattacaaatgtacaccaccatacctgactaatttttgtatttttagtagagacagggtttccccattttggccaaggctggtctcgaactcttggcgtcatgtgatccacccacctcagcctccctaaatgctaggattataggtgtgagccactgcgcccggcctaatctgtagactttccatttgattatgttgttaatagttttggttcctttttgagacagtcagtttcttgtgactgcttcttttttcctacatatggtcatactttcctgtttgtttttatatcttgcaatttttttcttgaaaagtttagataatgtatgtagcatttctgtattttctttttgtgtatgtttcttgtaattcatatttgatgtttggacaacttctgattttttaaaaattgcttatttcactggctgggatgaatgttatttttatttccccaaatacattataataagcctattctgggcaggagctgaatcttaaataaggaggatctactacaatgttaagtttaatgctatctgtctatatttaaagaaaaacaaaactgctctattgtgttctgttaatagctatgaaagaaattttccataatcagaacctaccataattttcagaggactgacttgttaactgttacatgtgggaaaagaatacatatagattaacttatttgtgaaacttgaggaggaaacacttcattttccaggggctataagcacttgatcatctgtatatgtgtgaactcacagacagaggctctgaattttggaagcccgtcttagaaccaaaggtgttttccttgcaagaaataggtaactgttagtaatctattgctattagkgaytaagttgcattaactctgagtgaccggagttaaaatgattttagatcactctatttcatatttattataattattagtataatagatatggtgttactgttcttcagagtccattcaagataaataattagggaaaatttggacacaatttaaatattaacagaayttttaaagtcataatttaaaggaaaagttktatgattatttgttttcacatttgtaggtatgccattgcattggccttaagggaaaagcagcgtgtaatatttaccagcccaattaaggctctgagtaaccaaaaataccgtgaaatgtatgaagaatttcaagatgttggtttgatgactggtgatgttactattaatcctacggcatcttgtcttgttatgaccacagaggtaattcatgtagtgcctcatctgacttttcgtttytaattaaattaatgtgactattcagttagaacctgggaagttttattggttgctctacttaggtaaagtatagtactttattttctgattagacttaggcaaaatggataacatttatcttaaagtgttctgataatattacatttctaaattaccatactttattatttgtctcagatacatttttttcttcaggtatttttaaagtttatttctgtcagtgacatgaaaatattttactggttttatgtacatagttttaagcatttgaatatatagtaatagtgactcttcatttcatgtgactttgccgtcttctatatctgagtgttgatacaagtagatgagtaactgatttttatttatttatttattttttgagatggagtctcgttctgtctcgcaggctggagtgcagtggtgcaacctctgctcactgcaagctccgcctcctgggttcacgccattctcctgcctcagcctcctgaatagctgggactacaggcgcccgccaccatgcccagctaattttttgtatttttagtagagacggggtttcaccgtgttagccagtatggtctctatctcctgacctcatgatctgcctgcctcagcctcccaaagtgctgggattacacatgtgagccaaccgcacccagccaagtaactgattttttagagtgcagtattatgtttaccttcttcccataattgcagttaagttttgcatatacttagaatatcttaagttttggacatgattagttacctttactaagtatttttgtacatactttaattatatctttgcatttaaccccaaggatatggtataatggtgagcataaattagcttctgatttggagaaccagccaaaagcattgctcacttttcattttgtcgcctcatggaagtttattttccattttcaaaactttctttcatctgtggaaggttttcattaactccaaaaattagggtaacagttgccaggaagtatccatgttgcaagaaaacgaggcagaaaaaatgggcaaacagtcagggatgatccagtgttttgaatagaggataatttaagttgtacttatattttagaaagtatgaatcttgggacggtgctgtgtatagaaggaagttgcatcatgttctagacatatggagagtaggggtgataattctctctgtggattgtatctgattagtaactgtttagaagccatttactttgctttttatgagaaaaggaatatmcaatataatatacaacaatgtaatattgaatattacttttgttaatatttgttaaatagtaagttctgtaaccccttaaaattattttaatatttccatttaataaagaatatccaaaattccttgttggaaaraacaacttttctctaactattagctgttatgtcagaatccaactaaatacattttttacttttttctttagattttgagaagtatgctttacagaggttccgaagttatgagagaagttgcttgggttatatttgatgaaattcattatatgagagattcaggtatattcagtgttgaaatgtatatcatgtatttcccttcagaatgacattaggaattttgagcaagttattgttaaactttgcttctagtttttgtgtggctagggttctaataaactgttgtttctttatttttatttacctatttatttttgaaacagagtttcactctgttgcctaggttgaagtgcatgatcctaggtaggatcctaggtaggatcatggttcgctgcagccttgatctccatctcagtcccccaagtagctggaactacagacgtgtaccaccatgtctggctaatttttatttattttattagtagagatggcgtctcacaacgttgagcaggcaggtcttgaactcctggactcaagtgatcctcccaccttggcctcccaaagtgctgggattacaggcgtgaaccgcacccagccttgcttctttaaatagtggacaacatgatattatttttccattaagatttcattcaagtacagctctttaatagtaacttttgctgggtgagaaatgcaaattcaaataaagcaaaagaaattaaaagatggcgtgcttctaatagctcaccagtagaactaatgttacagaatttctaaaacttctagcttgcaaagttaactttcctgatttttatttagttcagtaactatgaaatatgtgtttatggtaaaaacaaaaagtgaggattatgaaataaaaatgaacaaaaagaaaaacttacaaatgccccttacttaggctgttacgctctcgtaatgaaaaagtaagtatgcttggaatttgtagggtgctggcagggctaacgttaacaaacacattgaaaagttaaatgtttaatatgtacacgcttaaaataagatttagtttttatttaaactagctcactaaatcagcctgtatttatggagaaagcaatagaatttaagaaatcatttaccctttgaatatttcaccctttccaaatttataaaattaagctcttaacagagttgttttggttttagaatcagaaatcctttgttgatttgtctattttaggagggaagctgtcaaactttttccgttttaataaaaaatgacttacggttttatctttcatcaagtctttctttcatctccagaggatcacaaggataatttgggtgaacgatgccgtctggaataggaatagtatcttctaaatgtgttgctataactttctacaagttagtaaccattacttttcaatgtgcagtagaaatactgttccgctgccttgtcattgaggctcttgttaggttgtttggaaagattaaccctggaattgctctttgtaggctatttcagagtacattgtatttatagtggtttagtctactaattttctactggatagattaatggtgagaaatagttttcagtaaggttctgtggcttaaaatattcttgagtaaagtctgcatttctaactataaagcttcagagaatataattttagatattatcacagagtgacactgtagtccaactatagtccaaagtatatatttatttttttcagaacgtggtgtagtatgggaagaaactattattttgcttcctgataacgtccactatgtctttctttcggctactattccaaatgcccgacagtttgctgaatggatttgccatttacataaacaggtattttttcctccttttttgatgtcttcaatattcaaaatgttacagattagtcttgctttactctccctttgcttttctcctgatgttgtccagaataataaaaaaaacattttaatggtaaactgcttctcaaatcaagcagcttatcaaaatcaactgactgactttttagaaatgttgatttctgagccccatctcaaacccactatatctaaatctcaggtaatagtgccttgggaactccaattttaaaaattccccaagttgatctgatgatctgccaggtttagaaactactgcatttactcaaatagttatccatgagtacacagaatttcccctaatgccttggtgccaggaaaagctgggcatctctggagcatttgatttgatttttctcatgtaaacacagactttttactgactttctgttattgcctttctagtctgactttagcgtctgtatatgcttgtaataggcatttgtttatgtatactgaatttattcttgcttttatttttctgcccttaattttcctttacactgatgttctcatgaacttatctgtttataagctccctgatcgtgtttttatggcattctcccatattgcttctgtaggatagaaaaatccaatggatcttggggagaagctagatcaagtgctgctttatactaaggttttgaaaagcctgggtggggcagaaaagttccattttacttcatggatcctttgtatcaccgtatacctcctctatagaaaaataagcatctttccgtaattacagcattccagggctaggtaatgggtagttgatgctcaggtcatgtatttagccctggttagggaattggtaagttgggaagatggtagtataatttcatagacctaatttttctacgtttttctcttgcctgggttttagtgaattttttgaagtgttttctttttgaaatgttgaattcattacttgattttcttaagatcttttaggttggactaagatacagttttattttgaggaaataaaattttgtatgtttaattctttctttttacagccttgtcatgttatttacacagattatcggcccactccattgcaacactacatttttccagcagggggagatggcctgcatcttgtggttgatgaaaatgtaagagagtaattgtcctttttaaatctataatgtcatactttattrttaatatcttgttgttgttgtttttaaattttgaattagagaagaatggaaaagatacatttgtttgtcttagttttaatcaatcgatcttgatttttttgtgtgtttttatttcaaacattatgtttgagacttgtgtttttcttatgcatgaatcagatttccctcctttcccagtatttaaaaatacctagagaataggggttctggacatgtttcagatatcttatgttttgcttttcttcattttttattccttctttttcaccttttaatacctcttaccacagatcatgtttggactattttagtggctttcattattatactaaattatttttatttggggaagccttatgtatgaaaaatgtttgaattatgattaagtattagtgaagttacacagaaaaaatttgtgattccagggtgacttcagagaagataattttaatactscaatgcaagtgcttcgagatgcaggtgatttggccaaaggagaccagaaagggcggaaaggaggaacaaaaggtaatttggaactttgctttgagagaattttacatgtaaattgtatattcagattactctgatattttttgtcttagtttttttttctcaagctatgtaaaggtctagacgatatgtgataaaattggataaatatttatcttttttgtatgacattaagtataatttacatactataaaattcactcatctaagtatacaattcagtagtctttagtatatttacagaattgtgcagccatcaccactgtctagttccaaaatattttcatgaacccaaaaagaaaccctgtacacattaacagttattctcccttttcccccaacctttcccttctcatcccgcagacttagttaatcattagcctgttttcgatctctgtggctttcccttgtctgtgcatttcatgtttggagcaactggcttctttcacttaatgtaatgttttcaaggttcgttacttttaattttttttttttttttttttgagacagtgtctcgctctgtcacccaggctggagtacactggtgctgtcttggctcattgcaactttctgcctcctgggttcaagtgattctcctgcctcagcctcccaagtagctgggattataggcacctgccaccatgcctggataatttttgtatttttagtagagacggggtttcactgtgttggctaggcagatctcaaactcctgacctgaagtgatatgcccatcgtggcctcccaagtgatgggattacaggtgtgagccactgtgcccggctattttgttcattttatgctatatgtactcattccttttcatggttaaataacattccattgtatggatataccacattttgtttctccattcatcattggatggacttttgggtttttctggtttttgactgttaggaatgctgttgtaaacattgatgcatgtactatttaatacaagtttttgtgtgaataggtgttttcctctggatatgtacctaggagtggaattgctgcaccatgtggaaagtctatgtttcaccttttgagaaactgccaaagtattttccaaagtggctataccattttacatttccttccaggaatgtgtgagggttccattttctctatatcctttgtatcaccgtactcctcctccatagaaacagaggcatctttctgtaattacagcatccctgggctaggtaatgggtaaatgaaacagattatgtattttgccctgatttcccatttggaaagatggtggtataatttgatggatctaattttttcacatataatttttccacgatacttagtattgtatgtctgattatagtcatcctattgaatgtgaagtggtatcttaatgtggtttcagtttacatttccctggtggctaatgatgttgaacattttttcatgtgcttattggccatttgcatattctttctctattttaaaagtatgtttttttattgttgttgttgaattatgatagttctttacatattctggatactagacccttatcagatagatgatttgcaaatatctccccccattctgtttgaggttgtctttttactttattgatggtatccatgaaatcacaaaagtttttcactttgatgaagtccagttcatgcatttttttccttatgttgtttatgcttttgttgtcatatctaagaatgctttgtctaacccacggtcaggaagatttattcctatattttctcttaaaagttttatagttttagcttttaaatttagatctgtgatctattttgagttaattttggtgtgttgtttactgtttttgcaggaccatcaaatgttttcaaaattgtgaagatgattatggaaagaaatttccaacctgtgattattttcagttttagtaagaaagattgtgaagcctatgcacttcaaatgaccaaattagatttcaacacaggtactacatcatttcagtatcattttaatgttatgtgaaaatgagcgtaaaatatatttctagtaatatttttatctgttacatattactaggatatgccattcaccttacagttacagcagtactcagcacatttgtaaaagctttaaaggcctttgacttatactttcttccctttcttctccttttattgaaagatatgagtacattgttctatttaaaatttggagaaccctatgaaaaatattagaatcatgccttcttatactttgttaccgtaaactcctcagttattgtggctctctatttgaccacttaagggtaggtctcatagcttggttagaccaccttctatatagaaaataccatgcttcattctcactgaagtctaaaccagtaagacctgccctttgcttaactattttgtaattctcaatcaaagtgatataacttctagcaaatcggtaaattattcctatacattaattgcaaaagtaattcacttgaagtcacacagttaagacagtagcacaacctggctgtcttagtccattttgtgttgctgtgacagaatagctgagactagtgcattttcacgctgctgataaagacatacccaagactgggcaatttacaaagaaaataggtttaatggactcacagttccacgtggctggggatgcctcacaatcatggtggaaggcaaggaggagcaagtcacatcttacttgggtggcagcaggcaaagagagggagcttgtgcaggaaaactcccattttcaaaaccatcagatctcatgagacttagtcactgtcacgagagcagcacaggaaagagacacccgcatgattcagtcatctactgggtccctcccacaacacatgggaatcatgggaactacaagatgagttttgggtggggacacagagccaaaccatatcactaggtaatttatgaaaggcagaaatttatttcttatagtttgagaggctggaaatccaatttgagggacccagcacatctagtgagggccttttttgtcgtggaatcccacggctgaagacagtagggcaggagagcatgcaagagagagggtgggagaagggggctgaactcatctttttatcaggaacgcataccagtgataactaacccactcctctgataaaggcattaatccattcatgaggaccctgtctcttaaaggccctacctctcaacactgtttcattgtggattaaggggtcagcacattaactttagggggacacattcaaaccaaaccactggccaagaattgcagtgtgctgaataccaacccgattatctttcaactctgccttttgcacatgtaatccagtacagtgaaaagtaaataatatcttaagccatccaaatttaaatttcagttgtattgttttctttatcaaggcaggttttgtttttttatctgtgcattttaaagctaattcctacttttccatgagtaaaagtaacaaatgacagatagctgacatagccttctaaagccactaatagtttgtgtttttttaaagactgaattgttctgcccataaatgttttctcttacctacaagtgccgaataaacttaaagttgcagggttgcatactgattaacaaatatttattcagtttaacaaatgcttaatacatattatttgatagacactgtacaagaaggcagtgcaatggttaagaaagagcatgggctttggaattgtttttctcacagttaatagtggtgctaattattaaaaactaagyttcactttacttagtagtaaaatgtagataataatagttcctgtgtcctgtaattgttagacttaaatgttgtatgtaaagcaccagatgtggttattgttactatttttgtaagatagtacttttttcatgaattaagtctactagatatgttttgaaaggcagagaattatattgattatgtggtaatttttatctactttctgcttgaccatcttaaatgccacctctttacttttgctctttaaagactctttttttttttttttttctgagatggggtctcactctgttgccaggactggagtgtagtggtgcgatcatggctcactgcagcctcagcctcctgggctcaggtagtcctcctgtctcagcctcccaggtagctgggacyacaggtgcacgccgcaatgcctggctaatttttttgtattttttgtagagacagggcttcgccatgttgcccatgctgttctcaaacttctggcctcaagccagccacctgcctcagcctccctaagtgctaggattacaagcttgggacaccacgcctggcctttagattcttattctttgtaatgtgtgaagtttggtatcactaactcattttgatatttctgtacccttgaattttctcctagatgaagaaaaraagatggttgaagaagtattcagtaatgcaattgattgcttatccgatgaagataaaaaactccctcaggtgagttttcagtatcagtagataaaagtgtagataataatagattgcatatattcactttacattgcttggttttattactctattgcacttttcacacactgtagcatatgggttgtgatatgcccttaatgatactttgacttttactttaaacttcaaaaaggcaataggaagaaagatttgctgcctgaaggaacttttctctgagagctagtatggtgtgaaaattactgctagtgttctcagtattacagaatttttaatgctagttttaagtcattaacttttttaatccagaaggctaccacataaaataaaagagaacacttactgaaaatcatgtgtttagtgaggaatttaacatacctactttgccttaatccagtgtatttttgctttgactgttgaaacagcctgggaattccaaaatatgctgatgcttttgtgccacttccagagattctgatttaattgatctgatgtacattctggacatcagaatcttttaaaggccccccaggtgattctgctgtgcatccagagctgagaaatagtgctttaractggtatgaaagttttgttgagtggaaagaaacattgggagatcatcatactctcctttacagatgaatgccttgatttgtaagggattttccataagactgtgataacatgtttcttgctatttgaaaagggtatttaatgtataaacttttttgtagtttttcttcctggctgaattattagtatctaagggctgagccatgtttttatacatctttgttatagcgcacttctagtagtaagtatttaatggcgtttgatagattgttgaaagaattcttcaataattggtttatttttagattaagtacatattcatgttaaatatgtgttacagtgatttattttttgggggtttgagttgccagtatcttttaagtttattttctacaggcaaaaactctgcccctataatgtgtaattgttttttgaggagatgaagtgatgctggaaaatttaagacagcaaagcatttgtaaagtatacttactatatgcctttcctatgagcttggccagaattatattgaatttaataatccgtgagaatataggtttgagttttgcttttattctggaaagattttattaagtttctttaaagagaaagcattctttactgtttttcttaatttagtttaacattttaaaaatccttttctcacatcattataaaatcagtgttattccaaaatcacaggtagaacatgtacttcctcttttgaagaggggaattggtattcaccatggtggtttacttcctattttgaaagaaactatagaaattctcttttctgaaggattgataaaggtatggttttatttttattttttatgcccccatatcatgttgtatgaagagtttgaaaatgagagaacattgtttataggcaatatgtgtgtttttaacaaggcttaatgaaatgacttaaataatgaacttaatttttatatatgatgttatacttaaataaatcttgaagtgtaggtaaaaaaaaaacatttgtttcctttcttcaagaatgtagtggtggcagggtacagtggctcacacctgtaatcccagcactttggtaggctgaggtaggtggattacctgaggtcgggagttcgagaccagcctgaccaacatggagaaaccccatctctgctaaaaatacaaaattagccagtcgtggtggcaagcacctgcagtcccagctactagggaagctgaggcaggagaatcacttgaacccaggaggtggaggttgcagtgagcggagatcacaccattgtactccagcctggacaacaagagcaaaactctcaaaaacaagaacaaaaccaaagaatgtagtggtaacactattggataccacagaatgttgcagaaggtgtatttaattactaaacccggggttgtaaacttctttctgcatacagaataaaaggattagtttagagaagacaaggaaattgctggttagacttaggaaagagagtttttttaatattctaatttaaaccaaagagcatctgatttactttttttaaatgatattgatatttataccaagaaatgggatattaaaaatgggaaacaacatcaaaatgtaatcataagtctatatatgactcatacttttttttttttttttgaggcagaatcttgctctgtcacccaggttggagtgcagtagcacctctgcctcctgggttcaagcagttctcctgcctcagcctcccaagtagctgggactacaggagcataccaccatccccaactaatttttttttcttgttttttgtttttgtttttgtttttgttttgttttgttttgttttgtttttgtttttgtttttttgtagagatggggtttcaccatgttggccaggctggtcttgaactcctgaccttaagtgatcctcccacctcagcctcccaaagtgctgggattataggttaccatgcccagcctcatacattatgtttaaaaattattagaattttaaaaatcaaatgtgagatttatcatgagaacctcagcactaagtaaaatatttaagataaatttacttatcttgaagaacatatttgaagtcacttagataatgaattttatacttacttagatcctggtatgtcccttctagattgtatattttgctgagccctactttttaaggatcttttaaaaaatacacaagcagtacttgttgggtgtaaaattcaaatagagcagttgtatgtaaagtaaaaaaatgaaagatcatcccatcacttgccagaaatatctactagtatacatacaaataatgcattagtcattttgtaaacaacaaaaaaagtcattatactacccctattatataatttcatcatatgtcagattctttttcattctttttaatgaatgaatagtatgctattgagatgatgaactaaaatatttttacttctttcctagagaatttagtacttcagtgactttacttatacatatatccttttgtacctaaaccactatttttgttggtcttagaagtgaattacagagtcagtgattctagtcttccttgagagatcttctaatactgaagtggtcctcaaaatcactgtgtcatcagttgcaaaggccaggaaatgtgttcgtgtttagaaaaatattctatgacctaaaactttgttcgtaagaccagtgtgtattctctctagttggcactgttagaatttaagaaagtctgttttcccttaattaccaaacttctgggctacgagagacattaaatgttaattaataattttatatataaaatacgaaataggtttgagaacatattgtttgttatttttgtaggatctcattaactaattttaaagattaataaygcatttacttaaaaattataaaaccagattttcagcttaaaatacatgtttaattatagaattacttatttacttaggccttatttgccacggagacctttgctatgggaattaacatgccagctagaactgttttatttacaaatgcccgcaaatttgatgggaaggatttccgatgggtaagtaaagcaattcatatatcaaaataatttttgtctttgttatactatagataactggcttacatagtctttgagattttaastcccacctacttaagaacttgaacctgagctmatacagtttcatcaaggttaaaccttggcttttggccatttgtggtggcttaggcttataatcacagcactttgggaggccaaggtgggaggatgatttaaggccaggagtttgagaccagcctgggcaacatagcgagaccccatctctacaaaaaatgcaaaaatcacctgggagtggtgatgtgcacctgtagtcgcagctacttgagaggctgaggtggaagaatcacttgagcccaggaggtcaaggctccagtgagctgtgattgcaccactgtactcgagccttgaggacagagtgagaccctgtctctgaataaattaattaattgaacaaacctccgttcccttaaatttttatcctaactccttcactcctacctctccttcaaaaaaaaagagattcctttaagtgaaggagtttgatgataggaggttaagtgtgcaagtggtttatgaatgctttaaatcattttaaatatgtctagagttttcatttcttaaagtttaaggtattaaagcaccactacagtggctgtacttgcatctattttgcccttcagatttaaaaaagaagttctaacaggtttgcacacatgtccaaggcagaagcaaagagagaaagttgggagcataggtgaaacaatgaactggggtaaaaakcaaatccttaatcccaaggcaagtactccatttagtaaacaattaccaaacttaaaatatgaatttagaactctgtaggtgactgggatgctgaagtagaaacagagcaaaaagacaatccagactcgtttctcttgacagatatacaataaaatgttatgctgtaaacactcttgagaagtatgttcagggatatagcataagaaaggaagtcatttgggggtcagggaatgcttcattsaaaggcagtccttaaaataagtaacagcagatgagaatttgctaagcagacagtagaatattggcgggggtgaaaggaaagtgatggaacaaagatttctagtttgaattcacatagcctggctttggggaaaatagtcctttatttaaccttttttctttgaaattggtgattctstctgcttggagaagtttctgaaaggaattacaaatcatcaaaatgctgaaaagtaccctcgctgaaactgtaaataaaggcgaaacatttttcatgatgtgttttattttaaaatgttggatgctctacaaaagaggaatacgagtatggtgaggcagtgacatttctgggccagaacttcttgggtcaggagggcctggcccaaggctgcccctgggaaaagctgagtagagctgctgagtgggagccaaaccctctgtgctagcagggactctgcagtctggctaaggctgggccctagccccttcctacccaataaaggcagctgtggagagagggaatttgggttccagcctggtttgtggtggggggaaggtaccatgacagatttgaggatgatttctagtggacagcagtcaaccaaccgcacccacctcccacagggactccctctagcctgagactcatcggggtccagactggaaggctaatgccatgagaggaagcaggcacagggtggattgggcgagggaagctctgagaaggtcagtgcccagccacccagggttcagagacatttcacacaatatgattaagtttcagggagagatgcgtagaagctcaagagaaggagagagttaagcagcctgggaccctccctcacaaagcaaccctttccttcctgcttccttgtggaggacagtgggtgtgcatgatgggtgtgtatgatggatgtgcagtgatcactcccaggctctctatactatgccagatgccagatagcaccttcatgccactgtagaagagggagcactggagcctgatggaaaagggctatgggccatatcaaaggattgaaccagggctgacaatggaatcctaatggtgaaccccctgccctctgctttggccctcaagggtcccattccccaggtagcagcagtgagactccctttaacccctccactgttaagaaggaggcacctgggggatggaatggacatccaagggggaaagggaggtaatagtgggctctgcaaagaaggcattgagggtggtaggctggtgggccagggaccctctcatagtcagagataggctggaccctggggcaaccctgccaccagcatggccacaccatctagaagggttaaggtccatgctgttgccctaccaccagagctcttggcgaatcctggggccaggagatgtctttgtgggggcaccatggagaaagaaatgtcttggctgggaggtaggggactgtttggatctagccaggggctacgagtccagtcaaggcataagctttgtgtttacytgggcctcccactggagcataatcttaaggatcaagatgccttggaatgtagagagtcagggaagaaggctctgtggaggaatggggggtagttctagaattaactgtcccaaagggtcctgaggctatagaacactcttcagccagcactgctgccccgacttgttctggggaagagtcaaagggttagggagacagtgaaggccaggttctgtcctttctccaactcataccagagcagtttcccaccaaaatgagtgtcagtgccagaccagatgcctcattcagggagtcacagacagccccctgtgccacctctactcttgtcacatatggcccaggcccatggcaaggagtggggctgctgaaggcacagagaaggaagtgggaccagacattcttcaccttttgcttgctgtatagacctatttccagagagggtaacagtcctagatggtacagcaatgaatggccaggctgagatcatgctgtgtctgtaccaagccaggtgggtcagccattgtactgttggctggtaatgcaagtttgagtttctgcagctcacgctcttgcatgtgactcagcttggagcctgtcaagyggctttaacacgtggactgggcatatttggtgctctggcagtgtgaggaggcacatttgaggaggttttgggagatgaactggtgcagattcttcgtggatgaagaggctgccgtgtttaccacccacaagtgtctcagggcctgcagtgtagtcatatgagctccagggtccgctgtcagcaggcagtcagtgaaatccttagccaggttggacatactgggtagccagggctcattcgagtaactatacttgtctctgaggcatgattgttgtccccaaagggcatagtgctactcagcaggatgtagacgatgatgcctgggacccacacgtgcactgaatggtgtagtacttgmaggccaaaacctctggggcacggtatgctggtgtgccataggtggtcttcatcaggcctttgtagttgttgctgttcttgcaggcactgaccagattgaagtcagtgatgatgatcttggagtcagtgcctggatggtggtagagcagattgtgaggcttgaggtcttggtttgtgatgcccagtgcatgcagatactggatgccatctagcaccatctgcagcattcacatggcgtcatgctcagtgaaggaacccttggtgatgatgtggttgaacagctctatgctagcagggatcagttgtatcaacatgtatacatgctcctgcatcctaaacacctccaccggctggacaatgttggcatgacgcacctggtgcagcacgcacagctctgactcccacacctcctacccctcctggtacttgatctcaattatcttggtgtatgctgccaagtggctcagtgctccatgcataccacttggcagaatctcctttgccaattggggtcttcatgtcatacttaactgtcatatatgggttgaacttggccctgtatttagccaccctggctgtgtgatcacaagggaggctcttcgtggccggtactggggacactgcatattgactggctgctggaaacctgcctgcctctatgatgaagtgcttatacataccactctgagtgccactgaacagctgcaccttcttgaccagatccagctagacatcgttggatggctagggaaggaccttgcttttccctcagcccatcatggacataaaggcatcttctccagtgaggctggtgggatctgctctgtaggcagtgttccatctatacctcatacaggcagtgggctttcagcatctcagcagctctgctaaccatgtctgagctaggactgccaccaccatcctcaggcatcagcattgtgacctatagtggtttttaactctttttgagttacagtttttttaaaagaatctggaccctttccacagaagagtacacatgcacttacagaaaaaactttgtccagtgttgaagtggttcagtggtgccctgaaagcctgtatacaggtggcttactaaccttcttctatcaggttgttcctggtgacagatggactcaaccaaactccaagcatacataccaagaaaataggagagaattttgttttttccaaaagcatgaattatagtcatctcattttgcagattcagaaagttaattatgatcaagtcagaattgatacttggttgagtttgagtcattgcattcttagattttgctgttttcgctgggcgtggtggctcatgcctgtaatcccagcactttgggaggctgaggcgggcagatcacaaggtcgggagatcaagattttgctgttttccagaatatccagctcaaaggtattttttactgccagtgaattagccaatatttcccagaagctgtcatatatttgtaagcataattaacagtaattggcttatgtggaaagccaaaatttttaaaagcctaaattttaggctttaaatttagattaaaagcataaattttcgatccaaaatgataataagtctaaaatttagttttgttatgtcagtgtgatgtsggtttgaaacattattctcacatgttttgcatttttgtgctttgactttaactcttctcaaacttcatgttgtttttaatcatgtttcctttcttagggtttataacttgttataaattttataaaaagagaaattttaagaatatgttttttaccagtttttttcctaaactctgaattttaactatgttcattcagatttcttctggtgaatacattcagatgtctggtcgtgctggaaggagaggaatggatgatagaggaattgtaattcttatggtagatgaaaagatgagcccaacaattggaaaacaattacttaaggtaactacattaagattgtgtacctttaccargaattccagaaatatacttcaggagccatttcagaattggttgtgtcagtcagacacctaagtgaaatgagttaatatactgaaactatctgggcttgggaagatggaagggtgtgattactcaaaatactaacatcttgtatcctacttcacctaataggtggagagcaactcatgtaatggatagggtgtgaagatctccagagagggcagaaatgtttactttgtcctccaaatttaagaaatctctttatttgacccatccactgcacaagttgttctttacctggtagaacaggaagttctgttctactgataatcaagtgttttgggcaggcaatgagcttcctctacctttgcaagcgcagatagcttaataggttaattcagcaatctgcgtttacactttaccctattgattataaatatcccaatcaaaaaggacacattttaagctttattgcagattagacttttattttgcttgcttagtatttgtgcttcggatggtctaggattttgttttgaagagcttctcaaggaagattggcctggttgccttttttcttcttatccatatagagaaaagtgttaataagataggaaactttaattaaaaacacaaaattaattgccagcttattagctacttaaaagtagctacttcaaaacatgttaagacacacttaggtcagtatctatgaaacagattgtgtgtctaactttttagacttgggaactttgtggagaatttgagatatagtcataatgaagcttggtatgttgaagcaaaattgatgaaggtgtgtatatctttatatgtctttacatgagtgaagacaaagcttgtctgtacatattcataataatcgtattgtgtcttattttcaactttagagattaacacttggaaacctctttagtgcttcatgaaaggaaaattaaacaaggctgaaaatttgtatttttattcttttctctaattgtgccagatatagcacatgctatttttctttccttgtactgtgtgtgtggaaagaacagaatcggattgccagattataggaggtaatattttaatgacagcatctggttcctttagtgcagagttttcattccatttacttgacgtttctggatttgttactttgtaagtgtaaagttctatcacctttcattgcatttttaaaattaacttttctaatagacttattgagctataattcacataccatacaagtcactcatttccatggtttttaatatattcatagagttttgtcaccatcaccacaatcaattttagaatattttcatcaatccaaaaagaaacccctgtacctattaacagtcactcttctttcttcacaagaccacccctacctcaagccctagacaacaactaatttgctttctgtctctatggatttgtctgttgtggacatttcatataaacagactcgtataatgtgtacccttttgtatctggctttttttcacttagcctaatgttttcaagttttatgcatgttgtaacatctatgagtacttcattccttttcattgctgaataatatttcattgtatgggtatgccaaacttgatctgttcatcagtggatggacatttggattgtttccatgttttggctgttgtgagtaatgctgctatgaacttttttttttttttacaagtctttacttgaatatgtgttttcttttctcctgactgtgtacctaggaatggaattgcagggtcatagagtaaatctatgtgtaaccttttgaggaactgccagactgttttctttagtagttgcaccgttttacattcccacaagcattatatgaggcttctaatttctttacattctagccagcacttgttagctgcccttttggttaatagccatccttggggtatgaaggagaacatttcactttgaatattatacagtttgactgattgaaaggagtacctgtttttgtgtctgcatttctaggcatatttcttttatcaagactggcatacaacctttttcctctaggtttttttccaggtggttttactatcattaaggaatttataagtaacttattcagtatttgtaacaactaatacttattgaatattcaatatgttccaaatgttaattacaataattatgttattatctccattttataaatggcatgcagaggttaaaaaatttgtccagagctatgttgttgttaaatggcaaatcctgcttttgaactcaggcagtctgatttcagagtttatgcttctaactactatatggtactgcttctcagtacctcttgcaaatagatttttcaactattagtttaaacactatttgacatgagacaacagtttgttctttgatgtacttaaagtagataggctaaaaaatagtcatgtcaggtatattttcttataggcaaaaataattgatcattcttaagtaatttcagaactttaatagaaatactgagtacttaaagtcattttctcaaaaattaaaatacgtagcttcttcatagtcaccttatatgtagaaatagtaggtttactttatacattagtataattcaagtctatttgtcatatttaattatttttcctattggtgttagaaacatggcaaaatacatgtgtttgttgctggttggagctttcaaaatctcagtacattcatacacacacacatatttatatatttgagcatgtaaataatttaatgattgtgaatttgaaatattttaataatttttttccttcatttttatggcttgagtaattttttaacttggtcactgcaagtgattctcctgcctcagcctcccaagtagctgggattataggcacctgccgccacacccagctaatttttgtattttttttagtagaaacggggtttcaccatgttggccagcctggtctcgaactcctgacctcaggtgatctgcctgcctcggccccccagagtgctgggattacaggcgtgagccactgcatccagcccttttttttttttttaatagagacagggtctccctttgttgcccaggctgatctcgatcttctgggctcaagggatcctcctgtcgcagcctcccaaggtgctaggattacgggcgtgagccaccatacccagccttgttgttgttgtttgtttgtttgtttttgtttttgtttttggagacaaggtcttgctctgttgcccaggccggagtgcagtggtgcagtctcggctcactgcaaccttgacctccagggctcaagcgaccctcccaccttagcctcccaagtagctgggactacaggcatgcaccaccacgtctggctaattttttttttttttttttttttgtattttttgtagagacaaggttttgccatgttgctaaggcttgttttgaactccaggctcaagtgatctgcccaccttggcctcccagagtgctgggattacaggcatgaaccatcgcgctggctggcttggcgaatttttaaaggagcaatagagaaaccttttcaacttttccagtcctgctattgttgaagtatctgctattagcttaaacagaatttgacataaggcagcagtttttttgttttttttgtttgtttgttttttgttttgagacagtttctcgctctgtcacccaggctggagtgcagtggtgtgatcttggctcactgcgacctccgcctcctgggttcaagtgattctcctacctcagcctcccaagtagctgagattacaggcatgtgccgccatgcccagctaatttttgtatttttagtagagatgggatttcgccatgttagccaggctggtcttgaactcctgacctcaggtgatccacccaccttsgcctcccaaagtgctagtatttcaggcatgagccaccacgcccagccaagacagcagttcttttgatacatttttgattacttgatatgagctataaaaaaaaatcagttttcataatgtgtgttcaaatgaaaagttgagtaaatgagaaagtgtgtattattaaacagcctttcagaaagactggtgaatgcatcttttatttgttagcggttaggtattatatttttccagtataactagaagaaatacatgctccaatatagtgcccatattttccaaagaatgtaaaaatatcacagtactttgagtaaatgttattattggttttatcaaaataaaaccatttctataatttctgaaattactaaataaacatactagttacttagagtacataaagtgctcatttcartagtgtgatacttctagtcagtggtgtgttcttttcaacaatgaatcaaattttcctgaattgaaggaaaaataattttgaccttactggttatttaaattatttgtaaatttaagaagcacatacctattctattaaagttagttctgtaactgtacataagataacaatgtacaggccttttttgaagaagtgggaagactcacatttatttatttcctcatcttccacgtttatggttcataatgcaaaaatatttagcctgttaatttttagaactacttgcctaaatgaaccatatattctaaaatgtaagagatcattatattagtatttataaaatattacaaaagcttttctagaaaattggtatgtttggctctctcaatcttagtatcttttcagtaagcaaattggcaaaaaggaattcttcgaagttttcctggaatccttcaaagtttacataatgtctttatcattggttacctgtcttgtttcagttaaattttaggtgatcctcttattaggctgtctcttgatacattgttttagttaactgatgaaattaaatatgtaaaaagagtacttgatcaacacttaaagagttcttatatttttagtaatatgagggatgtattggattgataggtatataaaataagttccaatatgacttgccctccatgaagactttaagcctagatactcctagattttagctcctatttgtttagtcttggcagttccctgcacctctctaagcctctgtttcttgtttaaaatggagacagaaaactgttatgaatgttgtgaattgaagatttagtatttatttagtacagtgagtggcatatgctaagccctcagtaaatggtgatcatttctaaacttaaggaatatatctacattcatgcatagaaagcgaacaggaagcaatatatggcccagtgctagaatataagttctgataattctagttcagggaaatttgagatgattctggactagatggttgtggtctaaggctttatggaggaatgtaggtggggcaagctccaaaggaatggaatcagagtgggggttacgttttaattttcatggctaaaaagaaagaatgatactttaggaaacaggagaggctttagcatcgagaattaacatgtatttggatttcttagttttgctaagacagaggatttgtgtggatacttatagatgagagacataagcttattaacttgattgctaaattgggtgttcagttctgagcctcagtatttcccatttttacccttttctttagaaaacaatagagtttacaacatgtccagtacacttctgtgtggtgtgtgtttgagaaataaaagtttcttaacacacttctgctatgatgtattatggtattttccattctatttcgttgggggaaaataaaatgaaatttggtataaactatgaaactgagttcagtacctacagggactttaagtaatcatatattattgctgagtagggtagtatgtcacagcgaaagcatgtttaggaagattcatctggcagcggcaagtcaaactggaaaggacattgaaacaagaacagttacgatggtagttatagtaatctaggtgttaggatggtagttgtcataatctaggtatgatttgatgaacctttggactagagtggtggcagtggtaaagaaacaaaaggactaatctaagacaaattgagtaaatagtctgcaataattgattaaaaagggagagagaacgcagaataaacaaactcctaagctggaatttaaatgagtaactcattaaccatcaatatatgtgaaagagaaagttggtcagaaatgaggaagagcaagagagagaaatttcattttagatagtatagtgatgttatttatcatccaaattgggatactgtcagagtgaaagaggggactattagtcattacactggtacagcaggtgtaagttggaactatgctgggcttacttgggtagaatgtcaaaaagccatgttgagtttcaggtgactgagaatttacatgggtgtttgtacagcagttgggaatatagaagcggagcatggggttagaaataaacatttcttatattgaaacccgagatttcttggtggacataatcatagaagaaaaaataacaggaaagtctgcaaacaatgtgtttgcaaaattataaagtagatgaagttctttaatctctcttttctccaagaatctagttttcctactaacttcaccactccttttggccctatttttaaggaaagtgggtaaagatcaaggttttagggacttactaactatcctcctaaagtacgtggctcttgagttttcaggaactaagaaatatccttacttgagacacagatgagaagtctcccctttttctgcataaaatcctgactgcatacatttaaaattctggatttcataaggttgtcctgtggacttcaatttaagaacccaggagtactctaagagtatttgtgtattttgctatgccatttagaaatatgtggcctacatagtgatactgcacttctaaatgtttctacatgtatcgtccgagaatttggtcattctcttatttaaataactacacaaccattttcatacttctgaagcatttttattaaaatatacttckgaaggcccgggcgcggtggctcatgcctgtaatcccagcattttgggagactgaggtgggcggagaggtcaagagatcgagactatcctggctaacacagtgaaatcccgtctctactaaaaatacaaaaaattagctgggcctggtggcacrctcctgtagtcccagctacttgggaggctgaggcaggagaattgcttgaacccgggaggcagaggttgcagtgagctgagatcacgccattgcactccagcctgggctacacagcgagaccccatctaaaaaaaaaaaaaaaaacttctgaagagacactgctgaaagagaagtttatgtgtgaaggaactattttgggtataaaccttgtgagtttaggttgcattattctacaataaaattctacagtataacttattttacaataaaatattttatactgtctagtcattagtctagctcttgagtaacagccacagttaggaagacaaaaaggaattaaagtgtagataaagaatagtctgcctataatcccatcattttgggaggctgaagttggaggattgagccaacccaggagttcaagaccagtctgggtaatacaatgagacctctatctctacaaaataataaaaaattagccggggatggtggcacatgcttgtaatcacggctgctcrggaggctaagactggagggttgctcgagcccaagatttcaaggctgcagtgagcagccttgcagtgggggaccacaaagagcaatcctgtcatatgcttagagggcagagagctacacattyggcaaacagtattttaaatactttcatactgatttttttttcccttcactttcccaaagacctgtggttttattttatattggttaactaaagggtagaactaatacatttctgtagtatttcttaatgtagactgttattgagcattatagtaggttaaaggtacttgtgtaaatttatttggaaaactacaaaattgacattttttttctctcttagggctccgctgatcctctaaatagtgctttccatttgacctacaacatggttttgaacttactacgtgtagaagaaattaatcctgagtacatgttggaaaaatccttctaccagtttcagcattatagagcaattccaggagtagtagagagtaagtataaaataccataacagagcttagtgtagctaggagactgactagcaaaatgtctgcattattggctgctttggcttttgtttttgtaaggtaaattttggttcatacgtaatggactgcacaactgtagtctggtcattgtaactgaatagaacatttcaaaatgaaggaaagaaaaccctggcaggaaacttttctatagttggctcaaatttagtataattcttgtcttgtgcatatatgtcatataactcatggtcctgaataatgaaataacacacaaagcctagtatattaaaacttgacctgtaaaaagcacatgcggctgggcgcagtggctcatgcctgtaatcctagcactttgggaggccgagacgggtggatcacgaggtcaagagatcgagaccatcctggcaaacatggtgaaaccccatctctactaaaaatacaaaaaatgagctgggcatggtggtgggcttctgtagtcccagctacttgggaggctgaggcaggagaatcacttgaacacgggaggtggaggttgcagtgagccaagattgcaccactgcactccagcgtggtgacaaagggagactccgactcaaaaaaaaaaaaaaagcagcacatgcctattagccttgtcctttcaccatttctcattataaaagagtgccctggcataagcctgtgaatgtttagggaaatataatgctttaacttggattagagtttagctttttggaattttcagttcttaatattaaggtaatgcttactaaagcacaaaaagtaaatgtcctgtggtaattatgttcaagtggaattgtacattgattcttaccttagagggtagtgtgactgatggtcataagagctgattaaaagctaaaatggaggcaacgatttaaagtactggttttcatttgaatgtgaaaaagaataaaccactggtttggataaatcttataaaaatattgtgcgtagtcatcgtaaaaaggagaaagaaaatgtgacaaaagatagaggaaagttaaaatcatttgtaatctcacacagaaatagctacccaaccactgttaacactttggagtttttctattttgtttcacgaataagtttgctttttaaaggcaaaatttagatgtggagtttttgtaataatgatactggtaatgataatgcttataattaatatcatttgttaaatatttaccttacgcctagccttttattaaatgctttgtatttagtagctcattgattctgacttttgaagttttaatttcagccaggtgtggtggctcacacctgtaatcctagcactttgcgaggcccaggggggcagatacttgaggtcaggagttcgaggccagcctggccagcatgatgaaaccccatctctactaaaaatacaaaaaaattagccgggcatggtggtgggcacctgtaatcccagctacttgggaggctgaggcaggagagttgctggaacccgggagcagaggttgcagtgagccgagattgtaccactgcacttcagcctgggtgacagagcgagactccatctcaaaaaaagaacaaaaagttttaatttcaagaaagcatgatttttaatgactgaataatgtttcaattttataactatcatgatttatttaacaggacaaattggagattcctttctatcatgagtatataggacaattccactcttattttactttattttagatggggtcttgctctgtcgcctaggctggagtgcagtggtacgatcacaactcagtgcaggctcagttgatcctcccagctcagctggactataggcatgtgccgccatgcctggctaatttttgtattttctgtagatacagggtttcaccattaataaagtgatgagaataaatgtaacctctctaattgaaaaaaaaaatcgaagatgactgacagtttcttaaaatgtgagctggatgatctcaacactcacctttagtaaatttccataagcagatttttgaattttttttaaaaaccttataacatgaccaatgtataatttcaaatcatattacattttattaatttcttgtaaaagttattaataatgcccctcgtttggctgataaactggtcttagcaaagagatagaaaagtatgattctagtctcagagaagtgtatttttaaaagagctataaatccctttctcccaccaaaaattgtattaataataaattttattttattttattaaaaataaaaataataaagatgaacaaggtttaaatacactttggatttgagtgtgaattaaggaggtgttaaaatcagattagtacttaatattaattttaccttatggaaatttcagatgctgtcattgaaacaggtgtaagattacaagctagtttaatacttaaaaaaggaaattaaagtattcctcctaagcagttagcacagtcatgcatgagtaggataattatacatacacacacagctagcagttagactgttttggagactgaataaccaagtgaaacagaagtgtgtattggtgcacctacctttgttttgtttctttttctttttacattctgrtaagcagtaaattactttttaaaagcatccctggtacagtggaggatagagggaaaactcccaaatattatcccatttttttaaagcctgttttctgacttctggctggacccagagattgttcagtatgacttagagcaggattctactgctcactcaatgaacttaaacattccaccatttctctgataaattaaaaagaaaaccttttacctgaggaatgggagcccctttcaattttcaggccgagaaagtcatttaaaatataaccgaagtcaagtctcaagtctcctacccttggaactaaataattaccttttgaagccactgtatagccagtcactaacccgtgttatttctttttaccaatgagaattcctgacagcttttgtaatctagccgctcttctaattcatccctttttcttttcttttttctttttttttttttctttttttgagacggagtttcatcattcctattgcccaggcaatggcaacaatggcacgatctcggctcaccccaacctccacctcccaggttcaagtgattctcctgcctcagcctctcaagtagctgggattacaggcatgcaccaccacgcccagctaattttgtatttttagtagagacggggtttctccatgttggtcaagctggtctcaaactcccaacctcaggtgatccacccrccttgacctcccaaagtgctgggattataggcatgagccactgtgcctggccctgattatccctttttctttagaaattggagcccctcttttgtctctagagcacttcctgaacttagaagtatatctctggctgcagtcctcagccttggcccacataaactgttaatcttgcctcggtttcttccatttaggtagacatttccatctcatgtcctctgtcttcacagtccccagcttttgtgttttgttttttcaatgtggttctgacttaccttttaaaaggattgtgagtaacatgatctttgctcactggcattgcctctgaatacttgtatctacttggaatttaattatccctgcatttctctacctctggttttaaaggggcaggctctgtttttctaacttcctgaaaccagtaagtaaaaatactgtcaaaagtataacatactttttaatggaagaggtaggaatttgagtgatgaaagagaaataagggaattgaaacacctctagtacagtttgcagagctgagtgttaatgatcaaacagaccatgtagtgtgagagaatacatcctgaatggagttcattcctattttcagtcattacttgcaggagtatacttcttttgttgcagatactactagagccttttcaaggcactggtattatttttaccaccttaaatataacaaaattaaaatgtgggctattgtctttggaagtgtagaattggtagaatgttttattcattgtaacaaatagatggctcacatacatgagatgtttttcattttgatttatctaatcaacagtacatttttcagtgagccataagagtagaggtccttggattttactctacccttactgaaatgaaaaatgcatacttaatcttagtctttttatttagtttcattaataatgccagtggtaataggaagagctgtgcagttaaatgagggtttgaatcaaggctacctgagcctcagtttgtttatgaagttgggataatatccagtacattcaagttctaagaattaaatgagataatctatgttaaatgctcagtaagtgcttgttgcaaaaatgatagtattgccatagagcagtaaagcaatctgtgcttttacttgtaaaatttgcttagttctgagcatggcagttcatttcctagtcactcccaggcttatctattgtatacactgttatacactatattatatactataaatatgtttttgcaaccaccatctctcatcttcctcgagaggaagaaattggttgcaagctgtcttaagagtttgtgggcatattttacatgctatcttctgaaattctgaggctttcctatggcaatgacccatgaggccttctcatttgcactgcagttaaactagcttcttatactaaagttcctcaactgtctgattggggtggaagaggtactatccttaaattaagttaatttgcttcatagtggcagtctcacaaacaagttgcctcattaatttatgtatttgttttctaatttgttacatgtatattatcaattttgaaagacataaaaccagtttttttttaacatgagaaaagattagagaaactgatttttgtttgtttaatatggagaaaaaagactgtacctaaagttaataattttctggagtggtatgtagctgtagttagagtcctggactctaactacaaaataaatgtgacttcttaaaatgtctttcagacttttgactcactagttaaatagtctgagcactgaagtgatttggagtgatataaaaaagaaaatcttcctggatgcttccctgttatcccccatagatatttccttatatcattttcttaaattcctctggtctgtgctgcctttagtgctcccctgattcctacaaatagaatgttatatgtaattctgggcggggcagcaggatcatcatttcagtgtgcagtctccattttcgtgtaactcttaatgactttagtctgtcaaatattcttttatagggtttaattttttttcctgataatgtttactgccataatgcgtgttgttacggatggtattctagtctttaatgactgaaatacagctcctgtaagcagtgatgcagttcatttaaaaataaccaggatgatgcagtatgcccaaggtagtacaaaagactagaacttagagctctaggaacagtctgtgaaaaggttgatgatgataataaacataataacaatacagtagcaatatcctttctgtttaccatgagctatactgttagctaagtatattctgtgtctttcatcagtccctaggaaagctttgtggggatacgtgcactattgttatcctcattttgcagattaagaaactgaagcacactggttacatagagcagtttgataaagatcagtggagtagaattgtgagtccagaagtaaacctgtacatctgttgtcaattgatttttcaacaagtagtgctgaaacaaaaggattgcaacatgcrtaataaagttgcacccttacctcacgccatatacaaaaagtaactcagataaagagctaaaaatttaaaactcaggaaaaaacataggtgtgaatttacgtaattttggatttggcagtgatttcttagctgtgacaccaaaagcatgaacaacagaagaaaaaaagaaattggattttaccaaaatttaaaactgtaatgtgtgtgtgtgtgtgtgtgtgtgtgtgtgtgtgtgtgtgtgtgtgtgtgtttgtctatggtttttggcttataatttttataccctttgttatatatagtcttgttaaaacgttggggcactttaggccttagaaataggccttagaaattagattttttttaacctagttttgtttatttatttatttaaggcagggttgtttatttttatttttatttttatttctttttttttttggtctttttgtcttagatctgttcataataaattttttttgacttactttgtcttattataggtcataagaccaccattttaaaggggattctgtattatgtcttggaggaagaaatgttatatagagagacccaaaaattttaaataaatgggctttcttgggtttttttactccattagtattagattatgtatttttttgtttaattatatatagttgtgaattatgtccatctaattaaaagtcactataaaatgtccagggaggacaggatttggggaacttttggatagctaaatatgaagagacttataggaaggaaacaaaaatttatttgttgaggaagatggtgcactccatctctgtgtggacaaaagctcttgtgtttaggacctttttagactttgtcttatattttttttatctatttttaaaaatatttttgtaataaactgataaatgtgtttttttgagttttgtgagctactcacacacacacaaataatcagacataaagaggaagttgtaaaaatttcaatttgttaaattttttggaggccctaactggtgactagtgtctaaacttaggacttgtgactagtgtctaaaattttggagaccttaacctgtgactagtgggggtaggggtgggggcagtcttggggactgaactctcaacctgtgagacctgatgctgtctccaggtggataatgtcaaaattaaattagaggacacccagctggcatccactgcttggtgtgtggggaagaaaaaccctcacatattgagtcacagaaggcttcttctgtgttagttactgttatgtaacataaaaaatacaaaaaatgccaggcatggtggctcatgcctgccagaactttgggagactgaggtgagtggatcacttgaggccaggagttcaagaccagcctggccaacatggcgaaaccctgtctctactaaaaatacaaaatttagccacatgtggtggcgcacacctgtaattccagttactcagaaggctgaggcagggaattggatgaacccaggaggcagaggttgcagtgagccaagattgtgccactgaactctaacctgggcaacggagcaagactgtctcaaaaaacatttatatatatatatatatatataaacaatttttttttttttggaggcagggtctcactctgttgcccagactggagtgcactggcaaaatcatagctcactgtagcctcaacctcctgggctcaaggaatcctccaacctcagcctcccaagtagctaggaccacaggtgtgtaccatcacaccaacctaattttttatttttgtagagatggaatctcactgtctctcccaggctggtcttgaactcctgagctgaaggtatcctgctcctgcctcagcctcccaagagtgttgggattatgggtgtgagccactgtgcctagccaaaaaaacacttgtgtttcttaaaacacagtacctcaaaagaacaactttgtttccttctttacctgatagaatggtcctaagaccagggctacaactacaaatgctaaaaagagataattcctaaacagaaaactgcaactatatatttaacccttttatcaaaattcctaagagccatataggatgaattgtaccttcatcccatctgacaaaatagaccgaaaaccaatacaactatttgcctaattatcagggaacctgccccaatatttacataggttcttttctattttccttaagcgttggccagcttgagaaataaagggacagagtacaaaagagagaaattttaaagccgggcgtccaggggagacatcacatgtcggtaggttccgtgatgccccacaagccacaaaaaccagcaagtttttattagggagtttcaaaaagggagggagtgtgtgaataggtgtgggtcacagacatcaagtactttacaaggtaatagaatatcacaaggcaagtggaggcagggcgagatcacaggaccgcaggaccagggcgaaattaaaattgctaatgaagtttcgggcaccactgtcattgataacatcttatcaggagacagggttttgagatcaaccggtctgaccaaaatttattaggcaggaatttcctctacctaataagcatgggagcgctatgggagactggggtctatttcaccccggcagtctcgaacataagagacaggtacgccccaggggggacagttcagagacctactcctaggtgtgcattctctttctcagggatgttccatgctgagaaaaggaattcatcgatatttctcccatttgcttttgaaagaagagaaatatggctctgttctgcccggctcactggcggtcagagtttaaggttatctctcttattccctgaacaattgctcttatcctgttcttttttcaaggtgcccacatttcatgttgctcaaacacacatgttgtacaatttgtgcagttaatgcaactattacagggtcctgaggcgatatacatcctcctcagctgacaggattaagagattaaagtaaagacaggcataggaaatcacaagggtattgattggggaagtgataagtgtccatgaaatctttacaatttatgtttagagattgcagtaaagacaggcataagaaattacaaaagtattaatttggggaactaataaatgtccatgaaatcttcacaatctacgttcttctgccacagcttcagctggtccctccgtttggggtccctgtcttcccgcaacatctctccctttcttgttatataaatgtgccatggcgatgaagccttgttcgttctctcgattttgacacaggattmcttgactggtctggcacactaaaaacaagccgattaaacagagaaacatagttccaaaatttactatagtggagcccccagtagacttaatccaagtcgtggagtttaatccataaagattttctgccacctgatctaacgcctcagctctaggcacaatggataagtgagcttgaggggcttcaaaaatttgttgctttaatttagttatgtccaatgataaattatcttccctacctagaagatgtcctttgaccatttcccatgaatgatcagtcatataggaatatggggtgatgcagaaatccaaagtattccaatcgcactgcatttgcatgcgacgttcaagactcattacccgatctccaagccaaataacagactgtcttaaatcattgatttgccaatttttgatcgatgccttgttgagaattccacatttgggtggaattggcttaccaatcattaacaaaatgagccgtttgaatggattggtgtaatgccattccagcagtggtggccattgcagtgactgtaatgaggcccatgataacagcgattaaagtgaaaacaaatctcttagatctttttagaatttgctgtagcacttcattaatgaaatggcactagttctatacctgtataaccttatcacatctaaatagaatacaatgtggaggacatagtgctaggctactcttgctgcctaaaatctagaccaacattgtggccaattctgatgtcccttccatagattttttttaaaaagaagggagggtatttaaaaactatagattttataggtcgggtgtggtggctcrcgcctgtaattctagcactttgggaggccaaggcaggtggatcacttgaggtcaggagttcaaaaccagcctggccaacatggtgaaacccccgtctctactaaaaatacaagaattagctgggcatggtgtggcacgcctataatctcagctactcaggaggctgaggcaggagaatcacttaaacctgtgaggctgaggttgcagtgagccaagactgtctcaaaaaaaacaagctaaaggccgggcttggtggctcatgtctgtaatcccagcactttgggaggccgaggcgggtggatcatgaggtcaggagatcgagaccatcctggctaacatggtgaaacccgtccctactaaaaatacaaaaattagctgggcatggtagcgggcgcctgtagtcccagctactcgggaggctgaagcaggagagtggtgtgaacccgggaggcagatcttgcagtgagccgagatcacgccactgcactctagcctgggcgacagagcgagactccgtctctaaaaaaaaagaagaaaaaaggctatggattttaaaaacggaattacacattttaaaaatccaatattagttaatacctctaaagaagctcaaaacagttatatcctagttcaattataccaaatgcctaaaaatatgaaactatatatttgccaagatgactcctacttttaaaaccaggcaagatcaaataaaagcctgcaaacctgcatggcctcaccctaagagatatattcatatcatttaatggtagactgatctaattaatgactaaatacaagtctaataatatgccaatatctttgaaattatatatcctgttaatatgagttccatattaacaaaaaaccagggtgtggcctgtgatttattggttggtttttgtccatggttcctggtttataactcccatagcctttgttagtcttttgttataatgttgggtcagaagcaggtcccagaagatagattctctctctgaccttctgctgccttcctttcacctgctgctttttctccccaaggcaggaatcatctccagcttttctgttttagagactgacctaaaaaaattctctgacctaccttgtctgattttaggtcacaaggcactcatttgaaaagagatcctgagtcataccttggaggaagaaatgctatacggaaaggtgcaaaaaaaaaaaaaatcataatgggcagatcttgctgggttttcccactcagtctattagtaatagattgtaaccaaccacatttctttgcagttgtcagtcatgtctatccaataaagcctccataaaaggcacaagaggacagggtttggggagcttttggatagatgaacacatagagacttacaggaaggtggaaggtaaacaaaaaccgcaactacacttgcaccaacctaatagaaaaaatcctatgtcttgggtataatttaaataagatgtataaccttttaattttrtacatgtgttctatttacagaggtaaagaattcagaagaacagtataataaaatagtaattcccaatgaagaaagtgtggttatctattataagattagacagcagcttgccaaattgggtaaagaaattgaagaatatattcacaaaccaaaatactgcttaccttttctacarccaggtcgtttggtaaaggtatgtcattgtttcttcataaaatacttgaataattcaatatttaaacatatttttgttaaagattctaatttattttttattctgataaaatgcttcctgctacaatagttgatctatattaatcatattattttacctgtttcacatggcactaacttaggggcttatgcaaaggccttttaatcaccactggtttttgttttggggactataaattgaagtagatagttttggaattaacatataaaatatttctagttatgaaatgctaactataactgttcatataactattcatataactatatgaaaaataaggcaattttaagttctggatgaattcattagatataaatgatttatatccttggaacattctgtcattttcagcattcatttgccaactgagagattcctgttattgctgtcctaggggcaatttctaaaatgaaatttggcattgatttttttcctgcagggttgatatcttgtttcttaaatttagcagtgctctttcaaagatattttatcagaaaattcagaaagctttattagtctagaatgtaggtgtgaaaggctgaaattgccttgtagatatacatttgattcttgcttacttgcttttctttctttttaggtaaagaatgaaggagatgactttggctggggagtagtggtgaatttctcaaaaaagtcaaatgttaaggtaaactattatctttaaattagaattgtatatcaatttttagtgaaatgttttttaaggcttatgaaatcggtctaagaagaaataatattacctgaagagaagcagtaataaattctgccatgaggaattaatttttggaatacacccggctaatttttgtatttttagtagagatggggttttgccatrttggccaagctggtcttgaactcctaacctcaggtgatccacctgcctcggcctcccaragtgctgggattacaggtgtgagccaccgcaccaagccagtcctttatattttctgtgtatcacctcaaccatgagaaaactattaaatggtggtggtgctttccttccactccccaaatctccctgmcacacacacacacacacacacacacacacacacacactcagagagacacatgcattgttttcatgtagctgtgatcttccttgcaggagatgaggttaactggacagagtagtctttatttaagcctctctgacagctattaaattctctttttatgtggagttggaagtgtgacattgagtgctaaatacagtggtttcatggacatttacgtaacccaagatggaaaagctagcatgcctttgccagtttactcattccataacttgtttgtaagagaattttgctaaggcagaatatttttacctatactgaagtgctgtagattcctttcaccttaggttttacattttttgtttattttttttctttttcttttgagacggagtctcgctctgtcgcccaggctggagtacagtggcacgatctcggctcactgcaatctccgcctcccggtttcatgccattctcctgcctcagcctcctgagcagctgggactgtaggtgcctgccaccaagcccagctaattttttttttttgtatttttagtagagacgggtttcaccgtgttaggcaggatggtctcgaactcctgaccttgtgatctgcccgcctcggcctcccaaagtgctgggattacagacatgagccaccacgcccggcctgtttctttttttaaacagttctatggagatgatacacactctacaattttcccggttagggtgtatgactcagtgacatttagtatatttgcagatatgtgcaaccatcaccacagtcaattgtagaacattttcatcatctcaaaaagaaacmtatgtcattcacctgtccttccatatcccccagaaatagagaaaatttctttctgttcctggtgtgttgagtgtttttctcatgaaagataaatattatgtcaaatatttcttatgtgcctattgaggtgatcatgtgatttttgctttttattctattttgtattctgatatgatatattacattaactggttttcagatgttaacatgactggatttctgagataaatcccagtttgtcatgatatattattttctttatgtatcgggattcagttggtagtatgtttttgaggattttttatgccgtattcataggaaatactgaggatttttcatgccagtattcataggagatgttggtttgttgttttcttggtgacatctttgtttgggtttggtattagggtaatgcaggcctcatagaatgagttaggaagtgttccccttttcttccattttttggaagaggttttgaagaactggtattaaatattttttcccaatatcttcatcacattcaaaacttcttaaatatttggtagaacttggcaatgaggccacttcggcctgtgctcttctttatgggtactttactaagagattactaagtcaatttctacttggtatggcatgttcttcagattgtctgtaatttattgatatacagttattcgtagtattattttataatcctttttatttttgtatggtcattagtagtgtctctttcatatctgacctagtagtttaaatctttcttctgggtaaagtttgtcaattttgttaatcttctcaatgagcttttggttttactgattttttttccctctatttttctgtctctatttcattaggttatgccccatctttttaattttctttcttctggctacaggttcagtttactgttcttttttcaacgtgttaaggtagaagattaggttattaacttgagatacctcttctttttaaatagagcttttacaattatagaggttttacaattataaatttccctctacagacgctttagctgtattccataaattttagtatattttatcattttcattaatctcaaagtattttctaatttcccttttgatttcttctttaacccattggttatttaggagagtgttaatgttcacatacttgttaatttcccaaatttttgtctttattatttctaattttgtttttgtcgagaatgtacttggaattctttcagtagttttgaattgttctaagtttgcttaatggcctgacatggtctgtcctgcagaatgttctatgtgcagttgagaaaaatgtgtattctgctgctttaaggtgggatgttttatagatgtcctttaggtctagttggtttagaacttcaggtcttagacttctttctttgcagaccattctgtctggttggtctatctattattgaaagtggagtattgaagtctcgtaactattgttgttgtattatctatttttcccttcatttctatcagtttttgcttcatgtgttttcaagctctgttaaaatgtattttgttttgtatcagcatagctatttgagctttcttttgattattctttgcataatattttttcccatttttaaattttcagtcttgtttatatcagtaaatttaaagtgtgtctcctgtacacagcatacacagcagttggattttgttttttttaatccaatctgaaaatctattccttttttggattgcttaatctgttcacattgagttttattactgatatagttggatttgcagctgccattttaatttttgttttctgtgtcttgtgtctttgttttctcttcttttactgcttccttttgtatcatgtgaattttttctaatgtggcattttaattttttaaagatttcatatatatacacatgtatgtatgtatgtgtacatgtatatatatgtatatttatatagcgagagagagagattttcttagtgtttgctggggctttccatatacgtattattagaataagctttaggtttacactgactgaattccagtgtgatatagaggtgttatttctgtatagctctattctattttctctctttttatggttatacatattacatctataartgttacaaatccagcaatacattattatgattaatactttatgtactttttattgctttttgaaaattttttattactttttgaaaatcatttatggtttttttttgtttttttgttttttgagatgaagtctcactctgtcgcccaggcagcctggagtgcagtgacacaatctcagctcagggcaacctccgcctcccaggttcaagtgattctcctgcctcagcctcccaagtagctgggattacaggctcacgccaccacacccagctaattttttgtatttttagtagagacagtgtttcaccatgttggccagactgatgtcaaactcctaacctcaggtaatccagctgcctcagcctcccaaagtgctgggattataggcgtgagccaccatgcctggccactttttattacttttaaagcttatagaagaaaggaaagccagtgtgtatatatagcttttgttatattaaccttcttatttatcatttttggttctatttgttcctgtggattcatgttactacctggagttactgccttaaccttaaacagttttgctcccacctacttccattatgttgttactgccaagatactatattttggtatgttacaggctcaataatataatgtatacatattgttttatacaactgctttttaaatcattgaagagaaaaagacatttatttctatcttttataattatataattacctttaccagtgttctttattttattatgtagtttaaaataaatgtctagtattacttgattttagcctgcagaacttctttttgtgtttcttgtaaggtggatctgccagaaacagattttctcagtttttagtctatctgaaaatgtctttattttgccttcatttttgaaaggtaactttgctggatataggattcttggttaacagttgtttgtttttttctttgaatatgtcaactcattgctttctggcctccattgtttctgctgagaagtttttgctgttagtcttgttgaagttcccttgtaagagattaatctttttttctcttgctgctttaagattttctctttttgatttggctttccacatttttattatgataaatgtatctgcatagaaagtgaccaaacttctttgcctttatcctacttgtactttattgaattttatggctatgtagatgaatttttttttccagtaaattttgagaagttttcagccactatttctgtttttgttttgtcatttttagagacagggtctcactctgttacctaggttagagtgcagtggtgcaatcatggcttactgcagcctcaaactcctgagctcaagcaatccttccacctcagcctcctgagtagctgggactacaggtgtgcaccaccatgcctggctaactttaaacaatttttgtagagaccaggtctcattacattgcccaggctggtttcaaacttctaggctcaagcartcctcccgccttggtctctcaaagtcctgggattacatttgtgaaccactgtgcccaggccattatttctttgaatatttttctacttctttttctaaacctctcccctggaacttccattatgggtatgttgcacttaatggtgtcctatatttctctgaggcttggttcatttttatttgtttgttcttgctctgttcttgggattgcataatctccatcaatagtctatcttcagattcactgttgatattatctgctagttcagatctactgttgggctcctctagtaattttcctcacttcrgtaaatagactttgaaactctaaaatttgcttttggtttctttttgtactttctgtttcttcatcgatatgttctrtttgatacaacattgttattgtaccttttacttcattaattgtgatttcccttgattctttgaatatatttatagtggcaacttttaagtctctttagcctaacatctggtcactattacaggcaaattctgttgcctacatttttccctgttctatgggtcataactttcctgtttctttgcatgtctcttttttgataatatattgtagtaactctaggtattcccctccctgcctccacctcttgcaggccactgttgttatttccttgtttatttgtttagtgtcgggctggattatttgattgtaagtctctgtcctgtctacctcttaccccctatagtatgtagccttttagtttgtttctggggtagagttgggggtcacagccttggttatgcccacagtcaccctgagatgacaatggtttggacaggggtctctgtgactttacctttctctgggcatacccaggagctctgttagcaggagggctcctcccactatcatttttaaaaccaggttctcttctgcaaactatctgctgtacaatttagcctatatctccaatgaatacagatctaccagttgcatttcaccacaacctctgctgtttctgaaagttatcttagtcttgaatttcctcaggctctgttacaaataaaatctggtcctttgggaagatattaagagttgtctgttttaaggcatatttcttcacccaggcaaagtctctgagtcaaaattctaaagctgggggtggggagaatgcacacttttctctgagtaacatcactgctttagaagcaggggcataggtggagggttggggtgtagcctcaggtattttcatcttgcctctcccaacatggacccattgccttataaaccaggggaagggctgttggggccctttttctcaggagcaccacaccaagatagagcctctggccaaccagtagaggctaggtgaacgaaggggagcctctacctttcagccttacttgcagaggacttagcagcagcaacaggtaggtgggaggagaatgagaaatgttgacatcctgcccctcctaaaagccctttccaagcaagagctgcagggatactgagcccttctgtatttttggcttcaccagtctggagtttctgtttcagtgaagtgggaagagtgaggaagggagtgatcttttttcagatatcaaagactttactgaattttagatttttttttggactagatctttctttatttgatatattctcttaggactgtttccagaaaatttaaatgattggtttttcataattttcttcagttgctggggagcaggcttgtggatcacatggtagtcagtcaaaggttcaggagagaaaaattatagctaacatagttacaagtacgcatacacacacaaaagacatatttttaaaaaattacttgcctcttttgatcctaaattcatttctgtgactgcctaactataaaggtagaatcagttgatgagagttcttttaggcaaagatagaatgaggactagagaggaacacattcatttttttctgtttctattgatggtgaaactaatttttccattgcactacctgaatttgttcactaaaaatgtgaagtacatttttattaattttgggatctaggtcagaatacaaatccaaagatttttgtggccaatagagcttgccagaggcagagggagtatccaaaccgacgaagaaaactgttagaagcattttaaataaataaaaatgtaattgtaattgtcaatgttattttaaattgcttgtttctttgcattctacaagctcgggattaccaaattatgttttaattaggtaatttcagtttatagcaagaaattagccacactttaaaaggaataaagagaagctaggaaaaagaagttcagttatactgttaggaagtaaaaattaggacttaaaaacaaaaatctaaattaagataatagaacacttaactagtttttttatctgaaagtggacattgatccatctttacagagtgcaaaactagagtaagttagctgagaaaaaatttataatcttaggaaatacttttaacagcaaaattttcatttaatgttacaatttagaaggcttcctattgtgtttccatagtaacacttgagaatatttccataatgctataagttggttttagtagctctgcaaaaatagatgattatgtatgatatacttgagttataatagtcacttctgtgattgttatatcttacagagaatattaaatttattaatctacaaaattggaaccaaatccaacaacagagttatctagaaacattaaagattgctcatacgcctgtggggtttttttgtccagatactcacatcttcctaacaccttggagctaattcatctatcacattgtgttatgcatcttattcagagggtttttttcctcctctgtaaagctaatgtgataatccttgagtcttcttataatcattgactccttaggaagacttgatagttgatcatagctatttgtttagctcattgtttgtaaaactcatttcataatgactgaacataatctttgcagataaaaataatctaatcaaactatcttcatttttgctttgtgtttaaactaaggaatgttttgcagcttcctttaaaataaccacattttgaactaatgtatgatgagaaaaagtttttctttcgtattggaaaaatagagtgtatgctttctttgaggaaatttgaactcaatgatttaaaayaattgtgatttcttttttcttcagcatttggaaatatgttttattcttgttaaacagttggtagtttattgcagaaatagattgtagaaatggattcgttgtcatttattgacagattttcacttttttaataggaactgtcctgggtggagtccacatagtcaagtctttgctgtataactttccttttgtatattttatgcaaaacagattatttaaatattttatttaaaaatgcggcattctgtactgaaaaaatatcttctgttattgcttcaaagatgctactcaaacatacattatcatagtgcagaagttgtgagatcttagtagttgttagatcttcagaattatagttttattacagaatattaaagactaaaagacaataaaaattggaaccacattatagaaatgctagcataataagcaataaaataatctattctcaatctattatgttagagtgatttgaagatgcaaattaattttctgacactgaaaattttagtttcttaacattattagaaacattctgtgacacacttgacagtgcttgtactattaaattagaatttataaatataaagttatttctgtgttttctcatccaatggaacatgttgaatccagagagacagttttcatttcataaaataagtatgtattacacagtttgtgtcagtcataatgctaaatgctgagaaaatagttcctatacagatggaacttaaaatttatgggccagtttcttaagaatgaatgaacatcttctgttttgttttttagcctaactctggtgaactggatcctttgtatgtagtagaagtacttctgcgctgtagcaaagagagcttgaaaaattcagctacagaagctgcaaaaccagctaaacctgatgagaaaggagagatgcaggtttgtacataactttctgtcttctgatttcagatattctgtaactyatttgtcatcaccaaagttctccaatgtgatggtaatgaacatactatcatgatttctaaattagaagttttcaaggtattttaaggtatattagtaaagctatctaacgtatcagtaggataattaatgagatttgtttttatttttcttttatcaaattacaacaagataaatcgtgacaaagtgaaagaaaaagtattcagtcattgaaattttacatgaagctggattttgccagggccataaagatttttcattatccttgcttgtgactgagtgattttacagtttgaatccattcatgctgtttatttcccattcccatggaaatagaggcagtcctgatttaggatttttagactttacagtagwgcaaaagtaatacattaatgagatatttaacatttattacaaaatagggtttgtgttagatgattttgcccaaatgtaagccagtgtaagtgttyttagcacatttaaggtaaactacaccaagttatgtttggtacattaggtgttcatgtattaaatacatttttgacctaacgatattttctacttacaactagtttatcagaacataacccarttttaaggaggaggctctgtaatgactgaagcattattttaacaatgaaaaatttctacccaagtttccttagttaaaatcatttaatttacatgtgcttctaattgaatgtaaaatatggcgtattggataggtcttttacaaaatgtcattgtaatgatatttgttattataagcatggtttgtagaaagtaaaatctgccactgtagtatcatagactgcttctttggatcaataaattattatgggttttggagttggcagtatttttaaaaagacaattcactgtaacatttttaaatgacgatttaaatgtttatttataattctgaatattacctaaactttggtctccttttcttagtattctaatttgttcacctctagaattccaccaccaagtgaaacttgtgtgatttttatttttttctaacatttattttactgattgactgcctaactataaataaggctaaaactcccacagttaggcatatactctttgtccccaaagggcctttaggagttgttgcaagttggaatagcaaatatgtgccacacatctcaacattctccctttctcatggcagacattgatagtaagtcatagcactcttacactgaaagctcagattcttccaagaaaattatataggcagtcatgaaaccaaggcaaactgagggcctttcctctgctcctgtagcattttttgttatgtttatttcagtctacgctgctaaggaaattggcaaggggtggggggttgttaacatgaattttacagatactctgtgactttaaggggatgcagcttaataaggaagcattttgtgcttcaaaactgctcagggtgggtaattagtaaagctttataaaggaagtagtgagattttaacaaacttgtaggaacatgagtacctttacagmcaagaattatattcctagcaagggaagccatatgtacagagcatgaaaccccctctttagaaagaacttcacatttttctgttccttgtggttaatgacaaaaggcatgaaacaatgtacagagagagggactataggttaagaaaccatattatatatatttacatataattatatatgttttataaatatattgtttgccttgtagattatcttgaatagaaatcctagacagagaaatagttatgtgggcagtttataaggaaatattagctctcaacttcattgattgtgtagcattattcagggtaggttaaaagcaggcttccattgcataaggtaagtaggatttccataatcatccttgccctgtctgactttgagtggatatgatgccaaatttagctttttatcagcgtttatagaagactactttcttttttctttttttttgagatggagtctcgctctgtcaccaggctggagtacagtggcacaatcttggctcactaccacctctgcctcctgggtccaagtgattctcctgcctcaacctcccgagtagctgggactacaggtgttcgccgccgtgcccggctaatttttgtatttttactagagactgggtttcaccatgttggccaggatggtcttgatctcctgacctcatgatatgcctgtctcagcctcccaaagtgctgggattacgtgcatgagccaccgcacctggccttgaagactactttctgaagtgacttttccttgtatctataatattcttgaacttacttttctaaaaaaggcttagagtgtgtgtgtgtctgtgtgtagagggcaagagcactccagctctgaattacattgattaacagaggtgaacagtttagtgtgttctaaagatcacttgcagttttgacactgttgctttgccagctcccatgtgtctgaccatttccccttatcatggccacgtcatgatagttaaatgagactcagcgtcagggagtgaagataagggagttctgttttgtttttctagaccaggaactaggtggaatcattcctcattagataaaaacatctataaaaggacatggaatagaagattacagattagaactgtacacttataaaaatttgaggattaagataccagtacttgtcatggaataatatttgctgttttggcaggtttcaagtttaccttgaagatgttctatggaaatcagattttttgagggggtcaactttgaacgtattttaaattgctgatttaaaccctttgtctattaagtcaaatttcttggcttcctcaggatattttctattaattactatttttctctgtgtataggtcatactttattaatttctttacatgtctcataatttttcattgaaaattggacattttaaataatgtagtgagatggattagggatccttcctttagagtgcacctagcttagacctaaaaaataaataaacaaggctgggtatagtggctcatgcttataatcccagcactttgggagactgaggtgggaggattgcttgagcccaggagttcaagaccagcctggggcaacatagtgaaaccctgtctgtacaaaaataaataaataacaattagccaggcatggtggcatgtgcgtgtagtccctgctgttttggaggctgaagtgggaggatcgtttgagcccaggaggttagggctgcagtgagccgtgaccatgccactgcactccagcctgagcaacagagcaagaccctctctcaaaaaaatcaatctctttgtctaaaaaaacatagtagagttgagcttgttttattccctataaaaactaaaaataacatcttcacatatgtccctaaattatttttcaaaaactcagacatacaccaaacagatatactggcacataagcctcaaataaggaggaacagaggactaaaactctgactgctgttctttgttctaaatttcttcctgaggggcctaaaagagccagaatgaacatttttttctactgatcccaaatttttagacaaaacttctccttaaccaattacaaatcaaaaatctttaaatccacctataacctgtgggcccctgatttgagatgtcctgcctttttaaatcaaaccagtatataacctccatatattgatttataactgctgtaacttctgccttcctgcccttagaaacccttaacctgtaagccatctggaaggtcaggacttaaatattaactacctaatcctccttgcttggcaccctacaaataaacaccttcctttctcccactacaaacctcartgtagatatctggtcttactgcagcaggcaagcgggccccagtttggttctctaacagtagcaactctgtaaatcggaattttcctgcacccccagagtttattcttgttatttgttgtcactggtttgtgttgtcatttctgaattattttaagtctatattttttaattgtgtgtggccaccaaggtctctgcttggttagtttaatggtcagctcataattgtgcagagacttccttaaatgcctgcaatcattaagttctcctgtctggccaggcatggtggctcatgccataatcccagcactttgaggggctgacgtgggtagatgacttgaggtcaggagttcgagaccagcctggccaacgtggccaaaacccatctgtactaaaaatacaaaaattagctggcatgatggtgtgcgctggtagcttcagctattcgagaggctgaggcaggagacttacttgaacccaggaggtagaggttgcagtgagccaagattgtgtcacttcacttcagcctgggtgacagagaagggctctgtctaaaaaaaaaaaaaaaaaaaaaattccccagtctttacttagaggctttgtatgcatattgcagcaagccatcaaccctcagctaggcagttaacaacattaccttagccgcttcctggatgtacagtttcatggtcagacagaagtgagagcttagagtcttttcaggtctttcttgactatgcacacagccctgtacatggccttctagatttccagaaatgtgtgggagcttttctaattccccatgaatgtcttactccccagcctttccttttaagctttctggttaacctgttgtttctcccagctgtcattcacaacctcaggcagccatggtgttaagcagttgcttcttactatttttgacaaacacagccaggaaaaaggtttgcactggtaagctctcagtcaggtcaaataaaaaacagccttgtgaatggagtcttccggggaaccaccagactgcaataatgacaattctatggaaataggccttcaaagaggttccagccctattctctcccctccagtggctgccatactggttttcagtgggatttgctctttgattttcaggctattaggaagctaaggagtgggagatggagtaggataagttaaatttgccacaaagcttgttattcttaccaaaagtcagcatttttcttgaatatatgctccctggattcctgcaagcctttggttaatttccagaattttgaagaagttgattttgacaagttttctcagtgttggcattgcttttatggagaaaaggatttttggaggtccttactccaccattttcactgacacaaatccagttttttaattgcaaattaatcaatagcacattggttaaaataactgtgtgtgccatgacttgattaaaattcagttggttcaaaaaacaacttgcttgttgaatgaaaaattcaaaaaccatattttgtttcaggtgatagtcttgatttgaagaaattatatagcttgaaatgtatttagaatgtattgacttaaaacttgcttcttatattgtctaccacatttgcttatttaggggaaaattaaaaagatttaaaaggtctaaggataaaaatacttcctgttattggtattctagcaagtttccactgattgctcacatggttatttggacttacaaagaccagtgctgcatcatgttgaacctgaattctgagttatatcatgaaggtaattaggtttagaaaattgaataaactgccatatgcaaatattatgatgtttttaaatatctgaaatttgatatttataatttcatgacaactattcattcaatttttaaacatttaacttcttgtttataaaatgtcatgtttctagttagggaactcttaggatttcccttttctgtgctttaggaggcatttatagaatggcctttgtaatctgtttcctgtcattaaagtgttagttgaccatttcttggatggagtttattatggaaagcagcctttgaaataggacagtttttgtcttctttctgaatctcgtcttcacaaaatagtgttactctgttttgaaggaaattcacagatacctgtgcataytgaattcractacaggtatataaaaatactctttctaaagccaagtgaattatttttaatttttctacctttttagatgtagttaagtgcatacaaattgtgcatctttcactctggatgtcggctatgtggtattgataatttttcatgtcctgagtcttctctgtccaaacagtgcatcaactgctggttcacaaattggtggcccaagacccaatgcagcttacagaatgttgtttctaaaatgaattagaccagcagtccccagtctttttggcacaagaaactggttttgtggaagatagtttttccatggacsagtgtggagcaggggtggtttggggatgaaactgtcccacctcaggtcatcagaccttagattctcataacgaccaggcgacctagatcccttgcatgygccatgtttgcactggtatgagaatctaatgctgctgctgatctgacaagagggggagttcaggcagtaatgctctctcccccaccactcttgctgcatggcctggttcttaacaggccacagactggtaccatcccggggcttggggacccctgaattagmcagtttggaagtaaaaataaaaatgatagtaaagggcygggcgtggtggctcacacctgtaatcccagcattttgggaggcaaaggcgggcagatcacctgaggtcaggagtttaagaccagcctgtctaacatggtgtaaccccatctctactaaaaatacagaaattagccaggcatggtggcaggtgcctgtagtcccagctactcgggaggctgaggcagttgaatcacttgaacccaggaggcggagattgcagtgaaccgagatcgcaccgctgcactccagcctgggtggcagagcaagaatccatctcaaaaaaaaaaaagatagtaaaggatttataaccatatgaaaataaaataatccatgcatccagagagagatatataaaatataaaggaaatggctggccgtggtggctcacgcctttaatcccagcactgtgggaggctgagatgggtggatcacttgaggtcaggagttcgagaccagcctgatcaacatggcgaaaccccgtctctactaaaaatataaaaattagttgggcatggtggcacacgcctataatcccagctactcaggaggctgaggcagaaaaattgcttgaacccgggaggtagagatttcagtgagccgagatcatgccattgcactccagcctgggcgacagagcaagactctgtctcaaaaaataaaataaataaaataaaataaaagttagaaaagtcaccattaggcaactaccacaaatagtaatttactatggcaagaatcatccgtggatgctgaaactggcaaactgaaagtttaatgaagaaaggatatttacaaagtctctaaaggctctccctacaaatttcttaattgtagagagtaaaatagtaaataatactataataaagaatcctgcagatagcaccttaattgaatgatcaaagtgatcaacattatctctaataatgttgactagtggactgagtagaacagaacatgacttccaccaaaaatggataatctgaatcttatgattcctcataactagagaaacccaaactgagactcattttataaaataacctatattctttttaaaaaatcaaggtcttgagagacacagaaaactggggaactgttccagattaaagaagaaagaaatgtgacatcaatgcatgatcctagtttggttccatggagtagtggtggggaaggtacagtggtataaaagacattattgtgaaagaggacgaaatcttaatatggactacagattagatgatatcattgtctcgacattagattttcctcttttaatacttgtactttatgtgtgtagaaagagaacgatgaagcaaataggcaaaatataactaattagtgaattgaaataagggtatgtgggatttatttcattcttacaagttttctgtaaacttggaattctgtgaaaatgtcagtaccatgaaagagcaagaaaggtggggtatatttttagattaaagaagactaaggagacatgaccactaaatccagtttatgatccttggctggaccctgaatccaaaagtatgatggtaatagtaatgtataaaggtcattagtgggtcagtggggaaatctgaatagggattgtatatgatatttccttagatcttacaacattrtagctttgcaggagaatgtgcttgttcttaacatrtacatgtatttgctggtcaagtgaagtgatgtctgcaagttaatttcaaatgattaaaaaaggaagaggaggaagaggcaggcaggaagaaagaaaaaacaccccaccccaaaaactttaactagaaagaaaaaaactgctgttaatggtttgacaaactaaaccttttttggcaagtttggcaaattatcgaacctttctacctgtactagaaaatctagaaaggttagataatttgtgcaaggtcacacaactagctgaagactgagttcaatcactgtaccgtttttgttcagtaaagcactgtgaatgtatttgctatcagcaagccagtgaaaattgtgttttcatcagtgatcagtgtaaaagtagccatggaagacagatttggacctgtggaaacattaactttgcctcagtttatagagsctctctggattcaagagcagttgaaaggaagcaaaatttgatgtcgataatgtgccattttgacaagagaaaacatggaagaaagtttgcagataggtgttcttcaagattatgtctaatggaatatgctgctttctgtctttgaaatacttcttcatttctgcccatccagaacttacatgaatctttcttgacttcctaaacctgttaacaagagtctttcattcttagtactatagtacctttatgtattaatatttttgaactgccaaatatctgagaccataaaaatgagtaaagtgtgsattctgtattgaggggagctcttatttttatgtaccatttatttacctgttatttagaagtttgaactggtttttattttttaaatacagtctctaataagaaaagcttcagtgtgggagaatgcttcacggtgattattatgtacttcttatacctgttacataccataaatgcaacttcctctttagggatccaagtttaggaaatagtagaatatgaacatgtgcaaatttaactgtaatactgtataactttttggtcataggttgtcccagttttggtgcatctcctgtctgctatcagcagtgttaggctttacattcctaaagaccttcggccggtggacaatagacagagtgttttaaaatcaatacaggtatgtgttaatttcataanttaagtataaattttatgtaaatacagntagtgtttataaagaggcaactgaaatgcttttaaatatattgctttctttcagaatacctataaatactaccaatagtgrcaattatttttcataaaaataaaggcagcagaycttcatgtggatttrtactctctttgaatctaccaacaaagtgagttagtaaaggaggactcacaaggaaaaccattctgctttattcattatgagtgaaagctatagactktattacaagttttatgtataaaatcatgtactgacaggacatttaaccattttttaatatagttaataaatacatgaaattgttttattttcaatagggaaaattgagattttgtagtaaatttaatttcctagtagaaaaaaggtgcagtggttcatgcctgtaatcccagctctctgggatgccacagcacaaaggatcaccagaggccaggaatttgaaaccagcctgggcaacatagtgagacccccatctctacaaaaaatgtaaaactaatttaaaaagaaattagtaggactcagtggtatgcatctataatcccagttactcaggaggccaaggcaggaggttcacttgatcccaggagttccaggctctacagtaagctgtgatcacatcactgcactctagcatgtgcaacagagtgagamcttgtctcttttaagaaaaaaaaaaaaamacaaggaagtgattttaacgaagttatttagttaatagtttgaagagcatttactgtgcagtgaaggctctgtactaaaatctgagaaagcaaagataagtaggatgctttcagagtagagtaggaatttttaagctgtgttccaatggtgggcttcctgaaatgagtgattctctgacagttttacaaaatttttatgtagatgtggatatcttttccaaaacaatcactcctagaaggtttttatcactattggtctggtagtaaataaatatcttataagttcattgaaattgttttttctgatattttcagaatagcacagttttgagcagaaatacacattaatcattattaacttagcattaagtaatgccattattttgaaaaaactaattgttttgtacttctgggttaggtcagttgtcattttgctaaagtgaaaattgaaattaatttttctttgtctattggcaaatgtcaggcttgtctgtatttgtcttaaacatccctgtgctgtatctggtgttgatatatttcagctttcacattaatttcatgataatctgagtctcagttttgcaacatgttttaaacaaagttagactatttttttcttggttcttcatagtcgtttacatcattcaccacatagtgagaagccacaggaggaagaattggggaaattagcctgccaacaggacccttcacataataaataaagatttccctttagctacattaattatactttttaaacttcagaaccgcaattttagtgttttctctgttctggaacctcacaccagtgactcagtttctttatatataaaacttggccaggctcgtgtaggatttttgtgctgacactagcctgctttgattagggcagacatrtatcctgaaactgtaccatatgcacttaccagagatatcagtcttttgaaagagcttgccttatttgctcatttaggacataatgtgcaaatgtctttgaaccctttacatttgtttgtcactcttaatgtgtttctcctccccaattcccagttcctaactagccaaatcctaccttatctttaaggcttatccaagaccctgaaagtttctcagtaggataccagcctacagtgagctgtttcttctctgtatgaatatgtctattgcatttaaccattaatcatgtttttctttaagctaaaggtctcaggaccttttattttttatttttttatttttttgagacggagtcttgctctgtcgctcaagccagagtgcagtggcgcaatctcggctcaccgcaagctccacctcccgggttcacgccattctcttgcctcagcctccctagtagctgggactacaggcgcccaccaccacgcctggctaattttttgtatttttagtagagacggggtttcaccgtgttagccaggatggtctcgatctcctgaccttgtgatccgcccacctcggcctcccaaagtgctgggattacaggcgtgagccaccgcgcctggccctcaggactttttaaaaagtctatactttacaagtcagtagtgccctccctaggcatcaacaccaaggaaataatctgaaaacagtttaaacatagatgctcaatacaagattacttttgatggcaagaagttacaacaatgtaaatatacaataatgaatttagcaataagttgtgccacgttcaggactatgatcaaattgtgacttgtagatttattaacaaatcataatacatctgtaaatcatagtatagcgttgaaaargagttttcaaaaataaatgcaatggaaaaatgccctataatttaaattggcaaaagacaaaattatatatgtagtatactttttatgtccatgtgcatagaaaaaaagggaaacactgatttggtttggtcttactaattttgactataagatgaaaatgaattttacatatttttttcaggaagttcagaaacgttttcctgacggcatccccttattagaccctattgatgatatgggcattcaagatcaagggctgaaaaaagtcattcagaaagtagaagcttttgagcatcgaatgtattctcatccacttcacaatgatccaaatttggaaactgtgtatacgctttgtgaaaaaaaagcacaggtatggcagaaatttggtttttatagtagaattctatatgtttcactgaataaatatgtgtttgtcattttcttatcctgttggtttaattggctaaaacaggaaaatgtgagctatcttttaaataaactgtcagctctgaacctgtcagctctcatcagcaagacaagataaagttcattttgctatagtttgatatttcacataggatgttctgttttttcttcttttttaaatttgagatataatttacacagcatagcattcacccttttaaaatgtccaactcactggtttttagtgtattcacaratacttgcaaccatcaccactatgtaacttcagaacattcttctcaccctctgaaggaactttatacccattagcagccactctctgtttctcccatcctccagcccttggcaatcacaaatctttctatctgtatggttttgcctattctggatatttcttataaatagaatcatgtaatatatgatgtttgtgtctgctgtctttcagttagcatgtcttcagggtttatgcctgtcatagcataaatcagtacttcattccttttaaggccaaatcttgtgtgtgtgcgtgcgtscgtgcatgcgtgtgtgtgtgtgagacagagtcctgctccgtcacccaggcttcagtccagtggcatgattatggctcactgcaacctctgcctcccgggttcaagtgattcttctgcctcagcctccctagtagctgggattacaggcacgcaccaccatgcccagctaatttttgtatttttattagagacggggtttcgccatgttggccaggctggtcttgaactcctgacctcakattatccrcttgcctcagcctcccaaagtgccgggattacaggcatgagccaccgcacctggcctggctaaattatattttgttatgtggatatgccatattttgtttacccattcatcagttgatggacaggacatttgtttttttctaactttttggctctgatgaataatgctgctgtgaacatttgtatacaagtttttgtatggatgttttgagttctcttgagtggaattaggtaggattgatggatcatatggtaactctatatttacctttattctcagaaactaccagactgtttccaaaatggctacaccactttatgttctcactagyaatttgcaagataactgctttctctacatcttcgccagcatgtgttattgyctgtggtttttgctgtagccatcttaatagcgtcaaatgttagtagttcagctttttagcataattagctgtaatatctaaccagtaaaaccattattataagcattctgtatagcaaatttagaaaaagctttttgacgtgaacacaatcctttccactacctactttttttcaactggaatgtattatactatacaaatctcctttcctccatgaaacttacaactccttgctgttgtactttttcaacttttatcacataccacttttatcaatacatttgtctttgtgtctcacaaactagattttaagctccttagagtcagatgtttcattttaactttacattttctcataatggtctgtctttataaagtaaatgcccagtgtttrttggataaatacatgagtagaaactcctttaatagagtaatgtgttcagttcatagttttaaagcactctcccttctagctttttgtgaacttacatcatatggtgctgtagcatatacacaatactggctgcatgctcagtgaacacatctatgctctgacccaccttcaagtgctgctaggcaggaagcttgccaggtacttctcaagatgaggaaactgggacacaacaaactttcattacttacacagatatccagttgtgattctcacctgttcatctcttaaccaggaccattgcagcagctctctccctgctgtcagtccctccatggccaccagggtcggccttatgttttcacaacacaagaacaggtagacttgagcrtgattgaatgattggaaagcatccttggaggtggtttgaaggcattatctgagctgctcaaatatactgaaaaagaccttgtctggctgaagggactggctaaataaagttgttatggagactctgcaataacatgtaagaaagctcatgcataagcataacatgaaaaaaggatctgaaattgaagtggactatgattactatttagcaaaaatataaaatacaccagaaaagactgaaaggaaaactwtaagtggttgtgttacagcaataagattatagtggtcttttttttttcttttcctgccccctccccatcattgtctataatgtgcttrtatgtatataagcacatgatatataaatataagcacattatatgtgtgtgtgtgtgtgtgtgtgtatgtgtatgtatgtgtgtgtgtgtgtgtgtgtgtgtgtgtgtgtatatatatataatttcttttttttttaatggaagaaaaatacagcctgggcacagtggcttactcctgtaatcccaacactttgggaggccaaggcgggaagatcacttgaagcccagaagtttgagaccaccctggacaagatgatgagacccccatcactgcaaaaaaattttaaaaattagccaggcatggtagcatgcacctgtcatcccaggtactcaggaggctgaggtaggaaggtcacttaagccaaggaggttgaggctacagtgagccatggttgcacgactgtactccagcctgggtgacagagtgagaccctatctctttaaaaaaaaacaaaaacaaaaaaaaagtgtacatgtgcagtccagacattttttttcccaatatttttgatccacagttggttcaatccatggatgtggaacccacggatatgtagggccaactgtatatctgtgttcttttataaatatgttgggaaagatcttgtacagcattgtctggtgtcagccacatttaaattttttagtagccacattttaaaaaagaaagaaaaaaccagtggcattaacttcagtaatatttttatttaacccattatatctaaaatatttcacgtatttttatattcaaaatacaaacattactcaagaaaaaatgtcttaaatattggactctcttctaccttctaagctttataagcctcacagttattagcacgatgctttgctctgctcacataggcatcctcagtcacttcagtcaaagaaaccctaaaaaacaatggtttgttccttttactctggtaggcctgataagtcatgctaggtagcatagcattcattgtctagcttggaaagcattgcttcctatgacatggcattgtgactacacatctgttcatagaaatataaataatcactaagagcttgcatctagggtctgataccctgggtttgaaccccatctttatcactcagtagccctgttcacagcaatataaataattgaaaagagcttggattctagggtctgctagcctggctttgaactccatctttatcactcagtagctctgtattcttgaccaatttacttagtaatctctccgtgcctcagttttctcatctgtaaaatgcagatttaatattagttccctaccttttaggattgctrtaagaatgaaataatgtaaagcactagaaatagaggacattggtagtctctgaataaatatcagttgctgatcaccttcataatttttcctccttagtagaagtttaataaacagtctaaaaaattccattatcttcggatttcaacttatcaaaacttttctgtcggtgtttttctgaaccaccacttcaggataccattgttttttgttcttgtactactgtatgcttgtcatagtcagaaaatatgtaatatttactgattaactaaattttaaaacttatctactctaaaggatgacatcaaggtgatacattttcattttaaggtttcatttatgttttgaataaaggcctattctctttgctaaaaccatttccagcctaggcaaattcgtgatttaacttaagggcaaagagaaggaatagttttcaggacatcatgggggaaatatagatagtcaagagaaaagatttctgtaccctcatttttctttccctgttctctaagctaccccctgatgccctaaggatgaaaagctagagctgctgggattggtacttttggaccgtgattaattgtctagtgaatcctgtcttgggagagcctatcctaaattcaccactgactttttctactcttacagcctaccttgtctagctcacaatatccagctcactctcctccttctagccttcctccttacctctctccatttaagcaagagctgtgctctgttctctttttttttttcttttttttttttaagacggaatctcgctttcttgccaggctggagtgcagtggcatcatcacggctcagtgcaacctctacctcccgggttaaagcaattctcctgcctcagcctcctgagtagctgggactacaggcatgcgcccgccaccatgcccagctgattttttgtatgtgtgtttttagtacagacggagtttcaccatgttggccaggaacctcgtgatccacccacctcagcctcccaaagtgctgggattacaggtgtgagccattgcgcccggcctctgttctctgtctcaagctttttacactttctaacatctgcttgctctgcctcaaatttttcaaatggacattttgtattttccatgtacttaatattttaggtagtatttaataactttacagatacatcattactcttgtrtaatgttccgggaatgtatctaagaagctccagtttccccagtctccccagcactgaagctttaacccagaagtatactgtaagatgttctttaaaaatattttttgtttgatttcatgaataaatctccttgtacattgttcactttattattgaactttctttatactttcatgtgctttagattgcaatagatattaaatctgcaaagcgagaactgaagaaagcaagaacagtcctacaaatggatgaactcaaatgtcgcaaacgtgttttaagaaggttgggatttgctacttcttctgatgtaatagagatgaaaggacgagtggcttgtgagataagcaggtaaaatctggttattgttctagaaagttcattttttttttcatttttaattttaatttttgtttattttttttgagatggagtctcactgttgcccaggctggagtgcactggcgcaatctcagctcactgcaactccgcctcgcagttttaagtnattttaaaaataaccattatctttaggaaaaaagagctttcttaaaaatataaagtttgtacartatcttccmcactaaatacagttttgaaccatgaaattgagaaattagaaaaatcttagatctcagtaattaacacaagcgctcctagcatttgtatgtatttcctttgactttttttaatgccttgtgggatttttacataatcttagcttatatataattttgtatactttttaaaaattattaacattttcccaccttgaaacttagcctagtaaccattatcttgttacgtgcatagcaaattgtaatgagattttgggctaataataggattttacaacagaacttattataagccacagattaaaactggttatattattttctgtttcagtaatcttttgtcacaaatgacctcaaaactaaattatttacaacatcaacagtgactttatcctcttattgtttttatgggtcagaaattcaggaagagctcatttggatggttctggctctgtcccccaggattgccgtcagacaggtggttaagctgaaacagtaggagtccggagcggctggggaatgttaggacctctctctctctgttagagcttctccatgtggtctctccatgtgggctggtttgggcttcttcacagtatggcagcagcctcaggatgcttacatggtagctgaaggctccagtgtgagtcttctagctggctaaggttgccttttctgacctagctttaccttttgtaacctagctttgttatcatacaccatcatttccaccacattctcttgattacaggtgagtcataaaccctcctggattcaagtgggggataattagattccaactcttgatggggaagtggctattgttcagtatggctttctgtgataattggattgttctgtgtctacactgttcagtatagtagccactatttagcatttgatgtgtgcttagacraaggaactgaattttataatttatatcattttaattgaaattgaaatttccacgtatgcacatggcagtctttatagatcagtgcaattctagaagaaygtggtataggagatgctgttgtggccatctttagaaaatacaatttatgatactgttctaaaaaatgtgttcgttatttcccaccacgaggaatgtctcctgccttaggagccagcttgcctctgtcctccttaactggaaagtcataaactggtagctcaagcaatatccagtctgaagatatatcttgttttgtccatatagtgatgatcatmattctcagtgaatatataaaagacacttttgaaacagttttttatgtactcagcatggccaggatggacaggactagagaattacaggccttgtaaatgatttcagactttcttggtaaaaatgtaattatatcgttcatctgtccagatgttacagactcagatgtcttcatagaaccaggagactgtggtgaacaggacaactcttagccaccaaaagggggcagtgactacccagccctagttagttgttatcacaggataatgtgctattggattttaattaataacatatccaggattaaatctaaactgcagtactggtctactgatttatatgctaatgttattgggattatttccttctaataattacctgttttacaattaatatagaaattaatttcctttagatatctacaactagattttgtgttgaaagaatggaaattgattttattccaagatacatttttcatttatagtaataacaatattatatcaaagtttgttaactttcccccaaatttgcaaaaactggggcatcatcctagactccttctctcacccattttgcctttttaaacattgccactggctaatgtgtatccctcattatttttggcctcaattactgcagttgccctcctgattattcgttgcctcccttcttgagttttcaaaacccaaagcacaaatctggtatgtcgttcctctttccttcttgagatgggattttgctctgttgcccaggctggggtgcagtggtgcaatctcggctcaccgcagcctcaacttgccaggctcaagtgatcttcctgcctcagtctcccaagaacctgggactgtaagtgtgtgccatcaagcctggctaatttcttttttaagtttctgtagagatagggtcttgctatgttgcccaggctggtcttgaactcctgtaattaagcagtccgcccaccttaccacccaaattgctgggattacaggtgtgagccacttcacccagcacccagcccctttgtgccattctatttggtaaaagtccctcagtgattccttattgcttttagaatagattccataatttagtatattgttactctccctctccagcagtctgttgccacaccccacacatgcttttccttttgcttcatatgacctttcacccccaccccatatcctgcgattcttgcatatttttgcaaagaacttcgaaacttgctctgaacttcttcaatctggttttaggctcctcacctttttttcctcataacacttgtataaatcaattattagagcactctgttaaaccactgttctgtgattatcaccttacttgtctgcccccaatgttagactgtagcttcttgaaatagtctttcctcgtttgtattgttgcactctttgcttgacttaactcttaagcttaacactagagacccaaatttagtttttgacttttatttataaatattttaactgtyagtaaagattataatagttcatggctttattcttttttaaagactttgcaaaaaataaaggcaaagtttacttttttaataatacagtacagttattgtatgggtcaattgaaccctgattatagaagtctagaaacatcatctttgtagtgtttcttttttagcttgaattgaacacagttgcaaattcagaatttttcattttccacccaagaagaaaaataagtgaagatattttgcagttattactcaaatcagaagataaacacaaagggacaaaaagcactgtagtcaaagtgataatggtgagattgattatataagcaaagtctcagaccctaggtaaattctcagacataataactagtgcatgaacaatattttwttatttatttatttatttatttatttatttattttgagacaaggtctagctctgtcacccaggctggaatgcagtggcaagatcatggctcagtgcagtcttgacctcctgggcttaagtgatcctcccacctcagcctcctgagtagctgggactacaggcgtgtgccaccacgctcarcttatttttgtattgctttgtagagacagggttttkccatgttgctaggctagtcttgaactcctgggctcaagagatctacctgtttcagcttcccaaatgagccaggagccactgtgctctgctgaacaatatatttctagggatatatatatatatgagattattattcatgtaatcattcaacagaaagggcctagttatgtaacgtctatgataagaacctggaccatctcattttgctaaaaggacttgtaataatagtctttcatcttttattatttgtgcaccaaagtttccttatatggtccacaagtggtcaaatacacagttgtgtatataaggaaattggaaagagatgatgaagaaattttttaaaacctgttgaattgatcattctaatctttgtaataataaatatattgtccttataagtctgtatatgaaaatgtttcacaattatggagcaaagaagatgaccttcctctcaacaaaatcaagttgtcagtttaaaaaactgtattttgatgatgcaaaagaggaatcaaaagtaataagctagaacttaaaagagatgtaaatctggacttgtacattttgacagtgcaagtgcaagaagaaacagacgtagtgatgagctagtacctacctgttagagatgtacttgaaatctagaattgtatttcctagatggatatttttcagatttgtggatgacaattggtgagcagcagtttgttgcatttaaaggctcttgcccatcttggttatatacactttcagcctttggaaaatatgaattaaaatgtgagtcttctggccaggtgtagtgtctcacacctgtaatcccagcatttggggagaccgaggtgggaggactacttgagctcaggagttctagaccagcctggacaacatagcaagaccccatctctactataatataaaaactttaaaaaattaaaacataaaaataaaaaaatgtggttcttcttatgagtacattctaattaagatttctartaaaattgtttttcattatctttattctacagattatttgtaaaataactgaaaaataattaaaagagtcctttggccctagaaaataaatgacagtgatgatttttcctagcatactaaaggttaagaaattgttcttatttcacgaatgtgtgcattttgatatttggaatctttatgtgaaatccccattttacattgattatataatatattggtaattattaaagatctactatgtccttaaataaatcattgtcattcctcattgattactccttaaggtcaaataatatattttattaaaaactacacgttaagggcatatgtgtgtgcatgtgtgtctttatattctgacattttaaatttattcttttgttttgccattgtagtgctgatgagctccttctaactgagatgatgtttaatggccttttcaatgacctttctgcagaacaggcaacagcattattaagctgctttgtgtttcaagagaatgtaagttaattgattcagcacatcttatttattaattcacacatcatgtagttaatagtgttatggctatattatcaaatattactaatatttacatattataaggtaatgttaattggaaatcacagcarctttaacacaaatgtactaagaaaattaaatgattaaatacgtattattagaaaggagaataaaataagatttgtnaacaatcaccattaattagattttaagttttaaatttgttctgtaacccaattcattgaacatttggccaagtcctagacagtcctagaaataaaaagatgagtgagaagaaaactaggaaagtctgataaaaataaaagggggaagtgaggttgaattaactctcctccccggtgttgaagaataatgacgaagcagtccatcctgctaggaactgaaacattagttttcatgggcacggtttgaggtagtgaatataagatccttgttggtttggcagcagtttttttcatatgagtaattagttcactttcaacagttcttaagaaatcaaaaaatgaagtgctggrtggaacacataagaacactaattatccttgtactgcattccaaaaaccagtttgattcatttttaaaagtaagatatattgttttgcatttcaaatttaagactttatttattgtagatgaagtggatagaatgagaataagacaaggacatctgccttctaaaaataatttaatattctaaatttttggaggaccttttactatacatacttagtttaacttttaagtaaattgtgtagaacaaattgtttagtttttttttaagttccacagctcttaaatcttggggcaagatgtccgtatatgcagttaagatgtattcagtgaaaccacacttaattggtctgtttacctgttaactgtttccmtatttattaatcagatcaaatatattacttcttgaagtagatgggtacttttctcaggtccctgattactgattagaatcacagctgttagtggcaatgataacaaataggacaataatccaaaaacagtttatgctttcctgggattgcctaccatgcatctatgaaatatgcatacaaaaggaatgcattactttacaaaatattgtgtttgtttttccttaggctcaaaattttattatatcaatttccaagataaagataattaagaacatttgtcaaacttacttggaataggaaggttcagagatgtaggtttgtaaatagtttggggataagtggtcttccacccatgtcaaattttgtcttacttttcattatttgcatgttcttgttgttttatattttggcactattacaatagttcctttttctgagaagccaattatattccctcttcaaaggagttggttaagctaaaccacagctcttaaatcttggggcaagatgtcaatatatacagttaagatttattcagtgaaaccacacttttttatatacagtgtcatcaattcttgtggtggcgccttttaacattgagatggaagattgtactgattgtcatgtggatttttcttgatgcttttaacagaatgttttctgccaaaaagaacattgtcttctagtaaatatagtaaaatacttgttataagtaagatgaaatttgcttgatataataacttctattttaaaatgtatttataaaactgtctctacattttaaaaataatatttaaaaggttatgtaaatctttataatataaagatcaagtgcatacaaaaatttattaagcacccaatgtgggcagtgtacagrtctaagcaccagagatgcagcagaaatgtttgctttcctgatacttacatgttagtggatgaagataaagaaatacagtacacatacattctgtcaaataggggtgaaggtttttggagaaaagtgagaagaatcaaagatcactggggagatggtgttactattttaaataagatgattagaaaaggcctcactaatgamgtgaaacttatattgaggcctataggagwgatgagggaacaaactgtacatacctggtgggagaacattgttaaaatcacaattaacctcctcayatcaggactggtgccttccacctatagtgaatagcagagaggaatgtgatgagtagctgttgaccatgaatagacataatatcaaagacatttcgcagtcttgggttctttattaaactgagatgttaaggtcattctggctattttgcttttttgccattcatcaataatttttggttttagcagcaataatatggaatctggttcttgatttattatacatatatacatgttgcaaatcaaaatcaagtcctttataagtactggtgcttaaaataaaggcagatatgtcgcaactagcctacaattgctttaaaaaaaaaaaattagcgatcgggcacagtggctcatgcctgtaatcccagcactttaggaggctgaggcgggcagatcatgaggtcaggagtcgacaccagtctgaccaacatggtgaaaccccgtctctactaaaaatacaaaaattagctgggcgtggtggcactcctgtaatcccagctactcaggaggctgaggcaggggaatcgcttgaacccgggaggtggaggttgcagtgagccgagattgcaccattgcactccagctgggcaacagagcgagactctgtctcaaaaaaaaaaaaaaaaatagccataattactttaattaaaccctgtctcatacatacatacatatcattcttatagtaattttatttttgtacagtaactacctttgtcaaaaatttcttcacaaataatgtctgttattctcatcataagcctactcattttgaggatctggttttatttttctttgacagggcagaaaaccagtacacagaatttaagcagcttgtccaacttaatttggctacttagtgtacacctgaaactccattatctaattcagaaattgacagaattttcagctgtgggaaagcaatactaagaatactgaaactcagattaaacttttagctgtcttatactttgttagaacatctgggtaaaataaaaattagggacactatttttaacgtactttatcctgagttttcagtttcaaacttttcagtttctacagattgaaagttgcctagaaactaaaactgtttcaaagttaaactatgataaaaccctttaatgttgatgtaactaaactactrtgtatgtttacaatatttaccctccctcagttccatatgtaatcacaaaaaggagctagttagcacactttgcaaatttagcggtgtattttcctctgaaatgtaataacagaatattataatttgggatgagaggaatagtgattttgcctgtgtaaactgaattgattagaaactctaaatgctgatgactaaggtcttataatttgatatgtgactatcttacaagctttaatttgttaaaacrggtagtgtgaaaaaccagtaactttaaacgtgggtttttatatcttgttttccttttcttttatagtctagtgagatgcccaaattaacagaacaattagcaggaccacttcgtcaaatgcaggtaaggttttttttttttttttttgaactacatattttatgaatagtagattgtaaaataaacatttttgataatctaatcatagtagtttatcatttcacagagataacctataaggattaaatgttacttgatgtcagtcatgtaatttaatgttactctgataacatctcttgtgatttttactttaataattaaacagtatttcttcccattattgtaatgaactgtatagcattgttgtgaacagagattaaaagcttcataatgtaaataggctgtattgacagctcagtgcatgtgtcattttcttcctcagtactgataatggtatcttgaaggactaggatttagtttatttttaattttttgcacattttttcattctggtttataacaaagtttggttgttttattgttttgtttttgagacagagtctcgctctcttaccaaggcctggagtgcagtggcgtgatctgggctcactgcaacctccaccttccacgttcaaatgattctcctgcctcagcctcctgagtagctgggattacaggcrcccgccaccacactcagctaatttttgtatttttagtagagacgaggtttcaccatgttggccaggctggtctcgaactcctgagctcatgtgatcctcccacctcggcctcccaaagtgctgggattacagatgtgagccactgtgcccagcctataacaaagttttaaaatctgttttatcataagaaattgtctctggatcctcaaagccacagtagtttatagtaataaatttctctcttactattttcataggataagccgattttttctgtctgttcaacattagacaaagacaaggaaagatgagctaaggaattacaagagaggaacaaaaaaatgtgtcataaaagggccccttcagaacaacagacactggtgcctacttgagggaggagagtgggaggaaggagaggttgaggaagaaaaaagaaaaaaaaaacctgtggcatattatacttagtactcagctgactaaataatctatataccaaacccctgagtcacaagtttacctagataagaaacctgtacatgaacccctgagcctaaaataaaagttaaaatatttttaaaataataattcaaaaaattctgattaaaattaaaaggccagttcagtggaacatgtaacatgccttaaaatcactaagaaatttaaatttctagaaccagcaaagtcttcataggcctaggagtttttggccttttagattgccaagtaaagaagaatgaagyttctcaacttagaggaaaacaatatgaagatatgtacatttttaagcattgttgtggaaaaatgtattttgctctaggatttgtatttctctaaatctgttttgtaatgaaataattagagattagttaaatgctgctcttgaataattttaatgaagagttctgtttctttgttgaaaaggtatcactggctgaaaagcatgctcttgatacatttttcttagttaactacctcaacataatgggaaagattggccgtttaatcacttagcaatggaacaggcactgtgcctacttaggagcagaatgtccacattgcagacataatacctaggaagaaaaagggacctcctggaatactggcttggaaacctaaagaataaagtgatatgggagatcataagtaaggaattttaactcttttatctttaaaggaatgtgctaaaagaattgcaaaagtttcagcagaagccaaattggaaattgatgaggaaacttatctaagctcatttaaacctcacttaatggatgtagtatatacctgggcaactggagctacatttgcccatatctgcaaaatgacagatgtctttgaaggtatggttaaattttacacatatatatttacagtataagaaatmcagttaggatggtattgttttaattaaacaagtataatatgtatttttaatatttggtaactaaatgaaatcttctccctattatatagattaaaaaatattctccacaaattctttgtattatttaataagcatagtctgttcattagaaagtcctttagaaactattttaaactgtataattctgtgcagttgtaattctatgagtttctacagtcacaagcagatgaccctaagaagtcatatttatgtgggtatttttccttttcacttttgttctcctggtgagctatataattccactaaaaatagcagagctgaaaatgatcagtcattgcatatgtaattgacttggctttagtcagactgttattgcagcatgaatcagattaaatttaatgagcaggattttaagagactgaagaataattgttactcaactgaagagaaattttaaatgaaaaaattaaggcaaaagaaatataaggamtaagtgaataataagaagcaaaaaaataagtagactgtttaaacgaaaccatattttaaaatgctgcattcagtaggaaaagattggyttgtgtgtttataaatggccagttgtatttactgaatgagataatttacattgaactttcctaaaaatgaaaataaatgagtttgttctgtatagagattataataagaactgctactattgcttataggtttagtttgagaaaaattacatgtttaacatgccaaatattataggcctttcaactgatattattaaagaagtaatagattactgattttatgaatcagttatttttatgatgcataggttaaacttctctgcaacagaatattaaaaacttaaactgagggcctttactacattgaactttatgggttttaaggtttttaatgttaaagtttatagcacatttttaaattatggtgttgtatcttacatattttttctaaggtttataaacttctcagcctcctctaaatgatcatttagtcaaacagtcccaaagcatcctttgaattctgtattctgttactgggaaagtcattgcccagtaagtactatatgccraacactgtgctaagagctctgtataatttacatgtaatcaccaaatagcaattcagggtagatattatctccactttgcacaaggagactatggtaaacagtttggccaaggtgatgtgagggcacgatgatttaaactctggtctctgtaactacatgtaagttcagttaagcaccataccaccttatccttaaattttggatcacctgaaaatttcttaaaccctacactagactataccatctccatccacagaaaagtcatgcttggagtaatactaaacaggtcttaatcctagatgatgtttagcaacatctctaattagttaatggtgtttagccgagtcagtgagaagagggatgttgcgtactcactgatgaaaattgcttaaaacaggagcacaggttggtgtatgacaatkgtgtttcagcagcactagggcgatcacatagagcaccaccagtcttcagtctgacatctttttggaacataaggatgaaactagtaactgttcaatgcctaataataagacttgataatacaatactcatatttgtataatatctgcttctctgaaaagtcagaacacaatgacataaaacaatagtggtacatggcagagagtagcttttttttatttttttatttttatttttattttttattttttttagaaaagtaaaaagcaggccaggcacggtggcttacgccggtaatcccaacactttgggaggccgaggcgggcggatcaggaggtcaggaaatcgagaccatcctggctaacacggtgaaaccccgtctctacaaaaaatacaaaaaattagctgggtgtggtggcaggagcctgtagtcccagctactcrggaggctgaggcaggagaatggcgtgaacctgggaggcagagcttgcagtgagcygagattgtgccactgcactccagcctgggtgacagagcgagacaccatctcaaaaaaaaaaaaaagaaaaaaagaaaagtaaaaagcaagggcagtagacctggcctgtcagatgagtatatttttttttaaatctaggaattcatataaaattgtctttatggattattttttctgttctttctacctaagtagaagttatcacagtatggaagataaatcctaaactgccaaattgaagatggtttgtagctcatactagatgccacctatgagttgactttttccacagcataccagcattcctgaagtctgttctgtcctctttcagttactcaggggctatttctacatcacagtttgcttgaaatttcagtttgaaaatttgagaaatycagttttttagctctaacttgaaattagatctaacatctgcataatttttatgtttttctkgtgtgtgagccagtagatgagcttaaacctttctaaaaattgggatatactatgtattcgcccttaaaactattttttgatttaagtagcaaaaaatgagaaccttcattttcttaggatagtatttctctcttttgtttttacagtgttacatagtgcttccatttcaagaatagccattccttcctcatctcgttattgtatrtggttgttttttattttttgcaacagggtctggctctgtcacccaggctggagtgcagtggcgtgatcttggctcactgcaccctccatctcccgggcttaagtgatccttccacctcagcctccagagtagctgggaccacaagcatgtaccaccatgcccagctaatttttgttaatttttgtagagatatgattttaccatgaagcctaggctggtctcaaactcctgggctcaagtgatccacctgcttcagcctcccaaggtgttgagattacaggcatgagccactgcagctggcctacacatgttttatgattggaaaaatactgtaatcaaagctgtagcacacagtacagtgtgtctgtttttacaggcagacaataattgcattggaactttctaatgtgctgtgtgcaaaccatatttgttcctaataagattcttaattttcttttcatatgaaaataaaagtgtctggtcatttcatatcctgagcctcagaagtagttttaagtattcttcaaacattaactgaggctagttaacactgtaatgattaaaaccatgtgtttgggggatgtgtaatgcaaaagaaaagttcatattgtgattcagttgagaaattttgaagactaagtatttattctgttatcaccctggaaaaaaaatgacagaatttagctgttttttatttccattaaactaaatttgaatgacagtttaaacaaactatttgtatgggctgatgcctagggttttagtcaagtaatccagaggctgttactatttatttctgactctacataaacaatattgtactcttaactatgaaggatgacaaaggatttgctttccactgagcaagtgtcattaggaaagcttctatgatgaattatctcttgaaactatttactgtayctctgcctgccatatgctttttattttttttcagtcctgctccctctgtatgccacatgttttgaaagcaaatactgtgaattgcattcctcaactctgtccccaccacacacattctctcacatgcctttcaagtagcagtttaaccctttcttagcatcatcagtgtcatgagtggttttccagtggatttgtcttttaaaagtattctygctgataataatagagtaacaatttattagtaattgtttctgtctttacattttggcacagttttagtacctgatacttactcgtttaatgaataattctgagaccctagtgggaatcaggcaccatgctagttacagtgtgagcaatagtctctgctctcaagaaagggttcagcctaagctggggtttagcggcaagtagttgcaagatacatgtgtgattctaacctgaggccaggctggataggagtattaaattcgggtcagagcatgaactgtaggaaactgctttagggtatgccagaaagctgaaggcagaagttctgttcgggaaaatctgctgctttctctccttaatgagaatgatgctgttttgttcatcaaccgggtaaggctgatgtttattaaaatgctcttaaataaaagcatatagtcccaagtgtccatcgatagatgaataaattgtggtatatattaggttggtgccaaagtaattgtggtttttgccatttttaatggcaaggtgttccattgtaataaagattaaatggaacagctttcagttagaaaagacatactgactcatgctacaatatggacaaaccttaaacacattaagttgaaagaaggcagacacaaaggccacatagtgtataatttcacttatatgaaatgtccagagtaagcagattcatagagacaaagcatagacgtggttgccatgggctggagggacaggaagacatgtaactgcttaatgggaacaaggttttttgggggtggtaaaaatgctctaaaattagataatgatgatggttacacaagtctgaatatactaaaaaccactcagttgtacacttatttaaaataattttatggtgtgtgaattctgtctccatgtgagttcttccagaatgtagtaaacctgaatataaaaaagggcagtaactgacttgtatactttaacatggttaaaaaggtggattttatgttttatattttaccactatttgaaaaattttttaaagacaataactagaaagaattggatttctctttctactctggcaggaccaaaaaaaaaattttgtaacaaaccagtaggttaatgtggttttgttttgyttcggttttggtcagcttcatttagcctatgatgggtcatggctttgaaacttttgtctagcacttagtcaggctgatgaggcaggatgacttataaaggtgggtgtaagaagagcccttggattacagagaactgtagtaggtaggagagatgctagacaattcactacttaatcgtcagtcttcattaatccctggggggagtagcctctatgtttcaggcagctctggacagttagtgtttgtgcacatacccagtgatttgttgatgagactctgtgggcaacaaccacagtcattgtatatgcaaccttgtgcctactggcctaatttgcttgttacctgaaactgtgtcgaaactaaagtttccagaaattgagtcgaaatgtttacaaaatgtgacatgacagtgctctctggcctgaatgtgcatttacttgccttagtttattctttatcttagtaatttacttcgtatggtttggtctctgataactttcacagattctggttaacacgagttactaaaatttgtgaaataatartatcacattgtgtttcttggtacacatttgaagtcagtcaaaacaatgtttgagaatgtgtctggctctttaatgccctrtgcagcagaggactttgtaaaggatttcatttcaatcctaaatgacctgtgagaatctggtctcaggtaaaaatctagttacattttgagccactrcctaatttaattatctttggatatacttgtttgcataaacatttaatatctgattgcataggtaatatgacattaccctctctatcccaattcctaccctctctcttgacacccagaagtttctgcagttggatttcctgtttcattgcaaggcagtattggagcctgcattcctagcagctgagaatagaaataacaaataattattattaatttaataattgttaatagtgtaaatagttcattgttcctacagactgcattttgagaactggtattcctaatgtatttcatatattaaaaatgaagtcaagcgttttagatttaggcaggtagcacttagagaaaggatctcacaatctctgctcctctttgsacaagtctagcaaaagtgaaactatgtttatagcttcagctttgatacaaacacttttctcaaacagattctagacccatgggaaaaggcttctttccttgtgctccttgagaacactgtgtaaagaacgtactaatgaaagaatctaaggtcaagaagaatgaatgcacctttaaaatgacaagttttatcttgttactctcctgctaaaaacagtctgttgcattctatgagatggtatggatggtgtccagatgcctcactaggccacactcagggtccttgaatagctgcagtttgccaggcttttctgcattgtcgtggtggtccttcccttgttgctgctgcctgagagatactgcctggttcttacagacacagattatgtcatcnttgcagccttcacccaaagttgctccctccttctagggcattttgttttcctacttaataccaagtgtcagcatgttagtaataaacaggtgtctctaccattagtcaaaggtgggagttaagcctttcatctttgtagctttctccagtacctaaccatgatttacttcatgggaagtccctcaaagtactattaattatcstgtgttctcctgccttgcctcttaacaaaaattctgctgttcctgattatttccattttaccagtgttttgttccttttctatccaggcagcataattcgttgtatgaggcgcctggaagaattgcttcgacaaatgtgtcaagcagcaaaagccattggaaacactgagctggaaaataaatttgcagaaggtcagtatcaaatggataagctgtttctaatttagacaaatttggtgaagcaaatcttgagccctggaccacaacctaggaggacgttttgagatgttcttcactgcattgtcatggagagctatctactagtgtttctataaaatttagtgtgttgggggaaaagttgagattttatatatacatgcatttacgtatattaattgtacgctaactacatgccaggcattgttttaagcactaggggatatagtgaacaaaaagacacccctgccttcatggagtttacattctagtgtggggagatagacaataagtcaacaattaaatttatcagatggtgataagtctgtaagataaaaacaaagcagaaaagacaatagaattggcagatggatatgatggtctagggcctccacagggaaggtggcagttaaggcctttggtgtatgcttgatgtacgtgaacaccagcaagaggccagtgtggctggagcagaatgggcagtgagtagaggagtaggggttgaagtgagaaaggaaatgattccatagttcccagccccaggcttctcaactctgcagtgactggaggtgtggagtttgggagtgacctgccccaacttggactttacaaggtaattgttgctcttacattcagggcaagtctgtagagtagcacagtagaagtggggagaacagatcaagaaaggatggctaaaccaaggtggtagtaatggagtggtggtgggggggcaaggggcataagcttcagtcctgtctactgactcttgaccaagaaaaaggactaagttaatcaaagaatataaccacattgttgctgagtcagtcaatgctagtgatttctgcaaacaacttagtgtcctaagaagaggtttgcaaaaactggctgatatttccacagttgataaatgtaggcctgtttaatgactcagaatttaagtgtaggtgtcaaagttttaaaaataatttgtaatcaaaatttgtatttgtccttccttggcctagaaagaatttcacatgggaactgaaaaaaaagtgtcttctgatataggttgaaaatccaagtctttggattttacatttctttagacagtttagtccttccctataattttttttatttttatttttatttatttatttagkgtgtggagacagagtttcgctcttgttgccccaggctggagtgcaatggcgcaatctcggctcactgcaacctccacatccacctcccaggttcaagcgattctcctgcctcagcctcctgagtagctgaactacaggcatgcgccaccacgcccggctgattttgtatttctagtagagacggggtttctccatgttggtcgggctgctcttgaactcctgacctcaggtgatccgctcgcctyggcctcccagagtgctgggattacaggcatgagctactgcgcccgacctagcatttatctttttaaacagttctagacacctctttcctggccagcccccatggagtatttcagagtcaaaagaacaggggtctggcttgtatgttttccmcctcacagaggtggctgcaaattcctctaggtgttcagcaaggtgtttgactttctaggctgctcgcttaccagttgaatcagggttggtatactggctttaaaatttcggtagaggcaagttaggtgttttgtggtcttgaaagtttaaaccttactttcttttctcttaggaatcaccaaaatcaagagagatattgtgtttgctgccagcctctacttgtagagtcagctaaaggaatgtgagattttaaattattgaccacctgtttgattacagttgactacaaatgcctgcaagtgtggatttggttctcccatacattttaatatgtattatatttaaatcaaacatcattcatagaaagcatattacatacatgtttatacataagcattacatttttttaataaaaatgtatacaggtggggcactgttttggtrgaaggcttggagtttttttaatgagtttagagctattarataaccactgagttaaaggtaactatgtacacacaaagtgtgcatccaagaggcatagcagcagyagaagtctttaaaggcttgtacaccaggaagaaagatgcatcctcttgccttgtggcaatcattttcctttagaaaacaggccagcttcacctgggcaccctgctgcctttcaaggctggtgattgctcggatagtgattcccagttgttggtgtttcatgcagagttgtatgagagtcctcctcttttctttctttaaaagaagttctttctttgaagaaatccgatacatatacagcctacagtgcaaaatatttaatggtataatttagatcaagttaaaaactacatacaaagttgtgatcaacagcatcctaagataaatataaacaaaaggatatactttgaggtgtacagattaagcatataaaaaattagagactaactgggattttttaaagattattccaaattaagagttgctttgttatgccttcagcaaatagcttcattttgccaatactgaataaaagagttatttctacatgtgaattagttttttcaagtcataatcccctaaaaaaactatttctagccagagcctttcacaataaaaatactaagattttacaaaaatactaagttttagaaagagcaacctagtttttaacctggtgtgtatcctgaagtgacttttaataacattgagattcttgcccactgcatagtcttctcctcagctggggattttttggatttttttttttctatttacttatctaaatgtttagcaatatcaagatgtaggctgttgacctgtatacttacaactaatattgcaaccagagctccctgaatgagtccagtcaacacatcgctccagtggtgtttataatcagaaactcgagaaaggcccacataaatggatacggcaacaagaccaaattgcagtgtggggcgtaagagtcttgcccagtctcccttcatcctggcttgaagataaagctaaaagaaaagaataaagaaaaaaatagtttatttaacataacgcaaaacttttatattaaggaagggttggcatttgaaatgattatcmaagtattattatatagggaacaggacttctaggcaaacattcacgtacgcattattacctaaatgttaatcctttaaagaaacaaaactattgccctactaacttgttcacaagaatctattgccagtctagctataccacccttcaaactgtatacaaacaggtgtttccttgtttatggctttctaaacaggatttcagggacagttcctccccttgcaatttgggttataattctcatagtcaagaccagtgctgccattggtttttttattgttttccttaaagaaatggggtgttgctctgttgcccagactggagtgcagtggtggtgtagtcatactcactgcagcctcaaactcctgggctcaagcaatctttccatgtcagtttcccaagtagctgggactataggtacatgtcactgagcccagctaattggttttttttttttatagagatgggggtctcactatgttgcccaggctggtctcaaactcctcgtctcaagtaacccgcctgcattggcctcccaaagtgctgggattacagacatgcgccaccatgcctgacccagtatcgtggttagttctgagtcttgggataaagtgctagcattctgggcacaggttgccattgctctgggcctatctagggactatttcattaattaaccaaagagagctcttctaccctcaaattgtttaacaaggcaactgagactaaataatctgtatttgcaagtaatataggttgtagtttagttatgatccagccaagaagtgtattctttcaacagtacttgtatcccctttaagttaagttctatgagttttctgtacactaatcggacctaagaaattcccctttctcatgtcagtctgcctttgactttgggtgcatctctgaaggttttatgtagaaatgattctttttagggagtctgctctcattaaaaaaaagaaaaagaaaactacctaatttctatccaataacaatataatttataacattccctttaaaattctgttcaataatatatgactcgtagacttaattaaatgcagtccttagaaaacaatatacatagctctccccatggacactgcctatttaaaatagatgacacaaatccattcccagctctctgggcactgccatgggtgttcagtcaccaaaagctggcaaagacccagggcttatctaattttatcaagtacttagtataaaccatctagttctaaaagagcacaccagctgtttaactgagtctgactcatcagcaagtttaagaaccactggctttctgcagaatccttatttttgtttgttgttcaagctgtgaaaaaagtaagtagtcaaatcaaaaatagcaactctagaatggacttaagctagtcccatgctacttccaacctgaaggaaactcagagctaggacttcaaggtctttcctcttttaagattctaaaatccctgtagcaatatttccattctaaagaaccctgactttcactgtagatagcctgcaaactcatattgaatattattttctccagatttcttccccaacatgccagtgaaaagaattaacatttacttaacattatcaataatcaactaagctccaacacttttttggggggggggatgtgggagggggaagcagggaacagttttcctcttgttgcccaggctggagtgcagtggtgcgatctcggctcactgcaacctccgcctcccgggttcaagcaatcctcctgcctcagcctcccgagtagctgggattacaggcactcaccaccactcccaggtaattgtctgtatttttagtagggacgatgtttcactgtgttggccaggctggtctcaaactcctgacmtcaggtgatccacccacctcagcctcccaaagtgctgggattacaggcatgagccaccacacccagctcgctccaacacttctaagtgaagtctttccccctataaatagctgtttttctccttacacatctacccaagaatagaggtttcccccatcagtgaaactctgaccatggacccagaaattatttcaccgtgagaattctgggatgccccagttgtggttctgtacctaaccttgtgctctaggctttggcttctctagtgacaaacaggcatggcctgagtgtgcttcctatgtgcccatactgcgtttccctgggtcagggtactcggtgtagctctgtgaagacttccatttctgtagagctcaagaaagtggacaccctgaatttctcagaccttgggtaaacttgaattccacagctgacatgcccagaaatccggactggcttttcccctcccaccttgccagcaaaagtttcctatatgcgtaagttcaacaaagctaaaaagtagtgtctttctggtggctctactttgattctgggcaaagcaaacacttgacatgacttcctttaaaagaaagtctattactttagctttccctaaatgccactgaaaagttgaatgtctgaagcttctcaatactgttctattagaactagatacaggggacatagctcatgcttcagcgccaaggctaatagtaaaaaggctgtataggttccttcctttgcagattccactcttctctcctccccatacatgccatttgccaaccttatctattaaacccattctaggtaaggcattcagttagttacttctctcttaagagtaggaacttaacagagctgtatgtccaatacagtgtgtggtaccagacaggctcggcagcaacattattacttttaattccccttctaggtggaattgcccattcacagtcagtcctatttggaccacatagccctgccttctccttgcatacccacatctccctgcactgactagatgacttacaccaggcatcacccagagatctgctgggctgtattttgtctctggaatttataccagaagtatgaaggcgttctctaatttcaaaagtagtaggaaggatgcctaatgggtacataataggttatttgcaaactaaagttaggaggaagcaaaagctatggtcgaggacagcaagccatttagtagaaaacaatggagtggtttcaagatggctgactaaagtgcccctgggtacttgctttctgcttgaagaaccaccaaaacagtagtagataaatcacactttgaatagatcacctaagagagaatgctggaatttaccaccaaaatgacaggaaacacctgaggcaagtaaggagagggaagcaaggcagggtacctggcagggattggttggggaggctcccccatgctggagaagggtaagtgacccccaacagtcagcatccgcattcccattgtgaagtcctgcaatcccagccatggaagaaaccctcaacccacacaaacagggaacttggggactgcatgatggcactgctccagagagggagctcatccccctgagtcctaagcagctacagcagggcaccattttgagagccccacccccagcagactgcatcattccctgaggcccaacagcccctgcatatccacatctctgaagccccattaaagtcccccacccacagctgggtgctgccgcagggccaaagtatacaagctactggcagtgagccagcagagccactgtgcattgtcaagcctgattacaggctaccctgtcctgcagataccatctggggccaaagtgcatgctcccaacccacctgtttatgactgctgccacacaaaaacacccctacctaccacagccaagccctatacacaccactgagggacctatccagcccggctccacctacccctatgcccaagcacaccatcgggcgttggagggtgcacctatcattaacacctgagcactcctcccaggggcctcaggaagggaccatccaacctgctgctatcaccacccacatgcaccacctatgggcctggggactagccacccagcccatcacggtcaccaccaccaccagcgcaaaccacttgggaatcagagggttgtcctgccactgcccgcaccacacctgctgtctatgggcagcaagcccgaggaccttcccaccgtgctactgctggcatccaagcaagcttcctggagacccaagaatcagcccacctggaccctctaacatcagtgccagcatacactgccccagggcccaaggacaggcatgctcagcctgctgctgccactcctggggctcgaggatgggcccacctaatgttcccatctccagcaaatgcttcattgcagcaattaaaaactgcaacttaagccactgaggaaatcacacacaactgataactttacagccaaagaaatcatactgagactacactattgcatgcatctggaatcaaagccaaagtgatctacccgaccaacaccacagatatatcttaaggaaaatatcctcccctatgaaggcaaattcaaaaaattggaagaagtgactgttaaaccagatgtacagataccgaaatacggattcaagaaacatgaagaaggaaatatgacacttccaaaggaacacagtaattttgtagcaacagattccaatgaagaaatgtgtgaaatctcagaaaaagaattcaaaataatgattcaaaaaaaattgaaaaagctcagtgagatacaagaaaacagcaatcagaaaaataatacaaagaaatcagagaaaccatttaggatatgaatgagaaaattcccaaagacatagatataaaaaaaaattctgaaattgatgaattcattgaatgaaatataaaatagatccaacagtttcaacaatagactgcatcaagcagaacttcagaacttcaaaaattaggtcttttgaacccagacaaaaataagaaagaatgagcaacagctctgtgacatatgtgacaccataaagtcatcaaatattcaaatttttggtgtctcagaaaacaaaaataaaagggatagaaaacctatttgattaagtaatacccgaaaacttcccaagtctagcaagagatttagacacccaggcacaggaagcttagaaaaccccaaatagatgcaattcaaaaatccatggcatattacagtcaaactgtcaaaagtcagagaataaaacagcaagagaaaagtatcaagtcacttagaaggggaacacctatcagactaacagtgaa

SEQ ID NO: 96034 - DNA, 41563 bp, Homo sapiens
ttgttcatcctctgcctccccaactccaccgcccactccacgtggcaaggattcactgggctttgttcactgctgattccctgggcctcaatgtatatctggtgagtgaatgaatggataaatgaagcaatcaacctcaagtaggtctcataactttctggtcacttttgattattgaatctgcatccgccaggtgcggtggtgtgcacctgtagtcccagaacttgggaggctgaggcaagaggatcacttgaggccaggattttgaggctgcagtgagctctcatgacactagtgtactgcagcccaggcagaaaaccaacactttgtctctaaaaacaaaaataaagaaataaactcaatccaatgtccttcaaaacaccaactcacatctagtttaaatctcatcttctcctgaagccccacacctgcttccccactcagaacagccttgactcactgcttgccagcaaggtttgaggtttgaggaaagcacatctcacataggagcatgaacacccagtcatcctgctgaagaactacaaaaggacccctgcccactctttacctcctcccagtgcagcctctggaggggattgtgatctgtctcagtcacttgctccctcttccmccaacagccacctcctccaggatcagacgacagggggtggcttcaaggaggcagagatctttttaaaagactggacatcttctggtgtgaggaggggaagcaccaaggcctcactttctgaaggcctttgctgaagggccagtcactcctagcaggtggtgatgtctggcatggcccaggtggcccagtctgtcttggctctgcctgtcttcttaacctgggcagccctctggctcaagccttctcctccacccatctcttggcaacttctcaaaaccacagcagttgctggactattaaatcttccaaaagctggaaggaaccagcaaggtcttcctgaccttttcttattgggccctcccctccacggttctcaccctccctgccggtacacctgccccagctccaggcgaggagcagggttggcctctatgttcccagggaaacaagtctgggtgctcccatggtggcctccatgacatgggcctgtagatgctgtggcctgatgagtttctggagtggggcatgaatgccagtctctccttctagtgcctacaagtgattcttttgggccctcccccaacttgcatctgcagggcagcacacccttcctcccatgaggttttgtggcccccaggggactgagcctcagcttcctgcccagttccctttcctcatgtagagtaggaaggggtttggagcactgggtgttgggtagtagaggcagggccagttctgcctcctctcagaggccctgaaaaagacctcttccatgattctggtgactttcttcagactgtggcacctctttgtcctcagctttgaatgtgtggccaacagaagtccccctcaacaacctgccacatccagtcacacttggtgtcacattgagaaacttggcctttataggtgatggggtaggagggtgctgctaaaaacttcaaaccgggcaatggccagattgggttagaaagagctccctccaaaggcagcgtggcggccagcatggatgcagagacctcaccatccccagacaggcatctggcccctcctctggtcatgcccctccctacggaatgaggactctgcaaagccaaggggtctcgcctgccagaagcctgtgcccacctttgagaccacccatccctgccaacaaagtgtccagtttcagaattcccygccaaatggccctgagccacatccggcacctgcctgggcctctccagggtcagtcttcccaagggcagaccacagacattattcagcactccaggcccaagaagcggccaatggggggctatttgcagactgtgaacaggctggggcagccacacacgtgtgggtcagagccagggtgggccatgagccagaggcttccattttttctcttgccccagccctctagatgttacagtttagacctggggcagagacacctttaaaacactggcttcttcaccttggaatcacctggtgagctttaaaaactactaaagtctgggtcccaggttcccccgttctgagtttattggtccaaggtgagaagtgagttaggggcttaaagctccccaggttctcatgggcagccagggtcgagaggtgctgctgtagagacaatgccacggtccaggtcagagagaacaaagggagagaggagggtctgttctaggcagctgggagacaggctcctgcatgagtgagtggaggcagccatgatggaagagggagcgtgggaagcctctgtttggaggacagagctgcacatgtggggtttggggtgttttttgagatatccatggggagatgtctagcaggcaggtggatacatggcctggatctcagttcagatctctgggcctgaggtagagttggaattaccagcacataaatggtggctgaggctgtgaacttgactttgagccaagggcatgtgggccaagaggagaacatcagttgtactcccaaactccattctctgtctgtcgatccattcctccatcctaggccagagtcagtttagtagtagaggggcctccataatttgggggaccagagtccctaatcagttcgcctacagcaggatggttgtggggagaccttaacaacaatctgctcttctttccctcttgctccaccctcacaccccacccccacccccatccaccacctgccccaaccccatgcccttcctctcctttcctcctcccacctgcccccactttgctttgcctgtcccatctccctccttgacaccccctcccccaccccaaggtgaaggtctggttccagaaccgccgcaccaagcagaagaaagaccagagcagagacctggagaagcgggcgtcctcctcagcctccgaggcctttgccacctccaacattctgcggctgctggagcagggccggctgctctctgtgcccagggcccctagcctcctggcgctgacccctagcctgccaggccyacctgccagccacaggggcacctccttaggtgaccccaggaactcctccccacrcctcaacccgctgtcctcggcctcagcgtcccccccactgccgccccctctgccagctgtctgcttttcctcggcccsgctcctggatctgcctgccggctacgaactgggttcctcggccttcgagccatacagctggctrgaacggaaagtgggcagcgccagcagctgcaagaaagctaacacttaagactcccaccctgtgacactgagtcccgagcacagcaccttcccagtctcctgtgccccagcggacagcactgagcaggccccggasaggaggggctgcagccacacactcttccccacctgccccccagctcagagactcgtgaccaaatggccttggtcccgcagcttgtgtgcgtgagtgcagtgtgagtgtgtgtgtctctcactgaaataaaaggaaaacaatgacaagaagggaaatggtgcccacagcacaactacttacccctcaatcccttctatccctcttgtcactggaagggaaaatgggcttagagtcagagggacctcagatgggagagggcagaaactgggattctgggggtcaggggactcacatgtgtcggtcagcaggcacctgattcccactcaatagaagcccatggcaccaacacgaattctttggttaaatgttgccctttacaagctctctttcaaacataaaaatacttgagagagggaaacattgtcaccttgaagagggtgaatggtgaaaggggagaccaggttgagagagagggagagagagcatcaaagctaaacacaagcaagagtccagatgtttagagacggcctacccatcacaaactgcaacatgaaaccctttaaaatatctatacacagcctggccaacatggggaaactccatctctactcaaaatacaaaaattagctgggcatggtggcgggcgcctgtaatctcagccactcaggaggctgaagcaggagaatcgcttgaacccaggaggtggaggctgcagtgagccaagatcatgcctctgcatttcagcctgacaacagagggagactctgactcaaaaaaaaaaaaaaatatatatatatatatacacacacacacacacacacacacacatacatattatatatatttcatattgctcaaacaatataaatttttttaaagttaaataagagtcttgctcaagactcttttatttaactttttattttgcagtaattatagatttacaggaagctgcagagataggacagagaagttccttccattggcaggaactcaatagtatgagacagataggcttcatcttccctaactatagtacaatatcaaaactaggaaattggcattggtaccgtgtgtgtgcatagtgccatgtcattttatagattcatggactcactgctgcaatccagatgcagacctgttccatcaccacagagatcttcctcatgctgctccttgatggtcacacccacccccgccctccacaggagagttctttgaaaggatgggcattaggaaccagagacctgaaatgggtcctcaggagggaggatgcggggtaagattttgactctgtgaagagaaataacaagcacagtctcctccagtctgctctgagaaacatagtagctgctgctttggtttcaaattggctgtcctgagtcacctggagtgggtgcttggggacagtgatccctaggcaaatgtacttctgccgttccctctgctcagtggtatggtttggggaggagcttagaaatgcagaaatcctgagcctagaatgaggcatgggggtgactagaagaccttgggttgggcaggtccagctaccacccagggtccaccctgccttgcccagaggaactgtaccacactccactcaccaggagaaaccacaactcttagtttcatgacatgaagagagagttcttgggaagcagtggtgaggtcttgggtggaacccaggccaggctgtgcacatagtttgatttataactccaggtatttagttatacaatacagggacctccattttactttctgacctgggctggaaaggtcagggcaggcctgctgtatagaaatctggaggtgaatgtgagaagatgagacacggttctatgatcagatggagagagaccagccctcattctcaagaactctcaatagtatgagacagacaggcttcaggagacccaggtctgtgggttgagacacaggctcagcttttgggggctcacagcccagtggcagggacaagagaggcctctcctaaagggcatgacttaggaaagaggctagatgtgtagtaaatcttggctgctagagaatccagagaaggcttcatgtaggagatggcactgaggctgaccaggaaataattctctacagatgttcaaaaagatgacgatggaattgtcagggggcagaagtatccaggtatagtcagggcaaggagtgcagggtaaggtcaggttgcgagaacagtgaagaaagggcagcctgccagaagttgggtgtggagagaccagaaagagctgtggtgagggacgagtgtgggaatgttgacagcacctgatggtccaggggaggaattgaattcatacagtttggggttggcggggaggaaccgcctagcacagaagaaggaaaaagccagccctcccctcttcccttctccctccacatcctccagctctcaggtgacgggggcccctcccagacctgcacagcttggtgtggggaaagcttgggagccagagccccaggcttccttgtttactgtcaacctagaggaggaggagagggaggggagggggagaggggaggggtggctgcaggggaaggctgagcrgctctctccagctccagctggacctgaagtctcagagctgccaccagcagcaggctcagacactgggctcccagctggggactgctccayggccatggagatagacagcaggcctggggggctccccggcagtagctgcaacctaggtgcagcccgagaacacatgcaggcggtcacccgaaactacatcacccacccccgtgtcagtgagtagcccctccacygtgaygggtgaggtcagggtggggagctggggtgggctgccaggttcccgggccccrcttcttgcctcagaaaaggaggaggacccaagacctggggagacctggagggctctctgtccagcagagtgacgcastggggccacctggaccagaggccacctctgcaggtgaagggttgcaggtccccagcccagcccaccccagaagagagggctggggagtagctgtcatcagcccaatcctgctgtaacacccgaagtccagagatagcttccagttgcccctgagagtggggtgtgctgtgcacctgctcttgtgtaaacgtgcctgtgtgaggagtgtgcacccaagcactcagagtcaggcggggtgtgattaagtgtacttggagtggtgtgtgtggcagtgcagagtgtcagcgctctcagcctgaggaaataggtgccccgtgtgcgtcacatcaatgggtgcatgtcgtatgtgtgttctgaggagggtgcctgtgtgcataagcaggtaggagcatgtgyctagggggtgctcccaccttcacttggggtaaggaaatgtgtgactgcatgcttatgcactcagggcaaaggtgtgtgtgtgtgcacttaggtgtgatgtacgtgtgtgcatgtgcactcatggagagaacacttgtgtatgtgttctggcagtgtcacatatctgagtatggtgagtgtgtgtacagctgggataagaatgcgtatccaggtgtggggcatggaagtgtctacaggtgctgggatgtacccttgtcaatttcagaggggaggccctacttgtggctcctgtgcctgtcctgcaagggtggcccagatgtctggggcaaggtccagaggaccaaagggaacccctgcatctccttgtccaaggtcactctccctggcctggtgaattctcaggccgccctgctcactggagtaaaccagcatggcccgccacagctatgcaaagccagaggctcactggagtaaaccagcatggcccgccacagctatgcagagccagaggctcactggagtaaaccagcatggcccgccacagctatgcagagccagaggctcctaacagggagtgtggtgtgaggggaagtgagcctgatgcagccaccccacctccctctgttcctctgttgctatccaggccaggagaggaggtggagtgaactcagagggtagctgaggggtgaaatcagagtaaaggggcccgggggcgcatgggaggagagccctggggtgtggggcacctcctgaggcctgaggcaggtgctgagggtggagcacattccagctaagaagaaatggtgagaatggggtgggtcagatttctcaagcaaggcctgtargccctgccccatggagctsgggggaggataggaggtccrgatactccctaggccaaagctagggtcaccaaggcccagaaatatgcagtgactgggcccccttgggtccagagcccaggcctggagccctgagctggcatgtgtgactcttgccagtctgttgtgatgagccccactccctgcaggccgtccctcctccctgcaggcacccgggagttgctgggtgctgagtgtggtgtgtgatctgcaccttcatgctctgctttccttcttcctggaaagtgcccccacctcctgatacccagggaccctataggtaccatctaaccccacactcctctgggcaggttggcccaagcctggagccacctccagccagctctttcccacccagccccttatgtatagtcaacatgccctggaggttctgacccaggctggaacccagggatggctgtgcccgccccccatgtttgcatgcttccctcgatgctggctctatatggcctccacccaggagaatgtgttcacaccaaacaacccaacagtggacccagagcaaaggtcagtgcaggggagcccctctaggctctgctccctgccagcgcctttacttttgctgcctatcaagtatcctcacaggatgcaccgggccagcctcagcccagcccagatgccctcccacccccaggggaaggctgggattccttggtgtgtcccttcatccacagtgtctcccaatcccctccccgcctcactcacttcctyctcaggctctgggagtgggagggatgaggggggtggttctccctggggcctgtggacaggcgcagggctggcaagggtttggaaatttagggctgcaccctcagtacgccagaggcagggccactctgtccctctccacctgtctcctccccagcctggcctcctaccctgggtctgtaagcactcccagacaggagaactctgggagaaaagctgggggtgcctaagggcagggaggccccagtgctcgctgggccacggtggaggtgagtccaggtgacttaggcattcccctcccccgggggaggtgggctaaagaggcctgagactttaaggctgatttcactgcagtggctgagagaggattggctagaaaggaggagacactagaaagagtggaggcagcctggggagctgaccctgccaacatctaccttgggaaagaagggtcccctgtgcctcccgtggagctagaatggttccccaagggccttggctcccggctggggaggaggtatcctggagcttcatctgtttgggcagaagatgttgggcttggagggtggaggtgcccagcaggagcaaaggtcaggaaggacaagctggcagcctggttggagggatgaagccaggtcagatccctgaagatcccccaggagcttgagtgccaaaccactgtctttgcctccccacctcggtttcctcaactggaaggggaaggagttacacggagagagtcccaacaagcagggtcttgggctgaagagccctcagcttccagcccctgccctccctcctctaatccctccagcgggatcagggaggaggtgcgggacctgctgccccgggcttgcccccatcccggcctcacgcatgggcgcctgtctcakccctctcccaggacgctgcaggtgtggctgggccagcgctaattagtgggccgcgcgggggccccgctgagcctttgacagaaaaggcggtagggaggtgggggcagggaggcgctccaccagccagaagtccggagcgcaacccaaagtgtcagctaagacaatggagagggggtgggccgggcagctggagggagtgtctgcaaagtctctggaaggcccatggaaggagcgccctttgggtcttctgatccagccctctgcctgtggcaatgcacccgcttccctctccagggtcaaggcgaacatcccagggttgcagagtgggccataatcgctgagcgctgcaggataccgtcttgaactgtggtgcgtcctgccagaaactagcccactttctgggcctcgttttgccactccatgcaagggacacacggaggtaggggcggcagtgtayaaacaaaaggaccggcttgcrgtcaaggacacctctgttgctcagcccccattttggctgtgtccaaaccaaacagcctagaagaaaagatcaggctggcttaacaggggagaggcagagctctaagacgtctgacgggagagacatccctctagggtcccagtctgtagtaccgtgggacagcagtggggagaggacccagtgggctgcagtagtcagtcaagggcaaggccttgaaggatgggcatagtccaatgctgaacagaaacagccgcctaagtggattatctgcaatgawgggtccaggccatgaarcgatgtgttcacccagagccaggcctggaggctgcgagaagcccaggaaggcaactcacagctgaggctgatgtgctaagatgttgagcttcgatatctcaccccrgtcacccgakcggcctggccrgggaaggcatctgactcccagaggacctgcagcaagcactttgcagctgcctctaggccccttccagcccagcccttcctcctgagggaagggctgtgtggatcccctaatcctctgtcccccactctgctgctgcccccactcccaggtggagttgctggatgtcagggctaatggggattctacatgacaggggctgtgaagtgggggagcagctgtgaaggaagggaggaagttgaaagacttgtctcctgaggcagtggaattagaaatgattccctggacttttctggtccttgggccccatcccctcccacacccccacctccctatccagcccacccaccctgcatctttacatcactgctttcttcccccagcgcagccctttggcaggtgtggcatgcaagatgccagctctcccgggggcttataaaaatgagggtctctcctgcctgccctgcatccctttgcttgcacaatccactagcaatccagacaatctgatccaaacaccatgtgggtgtgggagtgctgtggctgtttggagttttttttaattgatgggaagggtaatgcccaagcctctgtctcctaccctttctcgttgaggagtcttcctatgcccaacagccccttagcccagtacatcctctttctcttctactctctgccttctcaggaagtatggctggtgctaggggtgcaaccctttaggctggtcaatgggactctcatttggtttggaggcttgggaaggtcgggagggggcacacaatggttctgatgtgggaagtatgagaaggagcagatggggtcagttaacacctttcataatccatccacaaagatttctttttcttctttttttcttttttctttttctttttcttttttttttttttttgagacaggatcttactctgtcacccaggctggagtgcaataatagcatgatcagagctcaccgcagcctcaacctccctgggctcaggtgatcctcccacctcagcctcctgagagctgggaccacaggcacgttccaccatgcccagctaatttttaaatttttctgtagagacgaggcttcaccatattgcccaggctggtctcgaactcctgggctcaagtgatccacccacctcagcctcccagagtgctgggattacaggtgtgagccactgtagctgtccaaatatttcttgagtgtgtaccatattcccagcactattccatgaagtgggacacaacgatgagcaccacagatgatgtcttgccctcctggaggtgacaggtcttactgcacctgaagcgagcctgtgcatgccagcccactgcccctctttctgttccacgaaggccctggatgagtcctttctctcctctgccagaagtgccctttccccagctccctgggggctggcaccccttgaccctgaaggctcagctcaaacggcccttcccataagatgcttcctccaagcgcacccagtctggtcttccctcccactctcgttcacccatcctgatctttcccttaggagcacccactgcagtttgtaattatgttatttgctctgtatccttcttttagcctgtaggcacttcacattttcatttgtcactttcatttgcctagcttagtacatagaaggcatccatgcagtagatatgcttgaagaaaggaagcagggagggaaggaagaaggmagatctcagaggaaagragaggaagaagtggagagccaggccaaacctcgaagtcctccagcacccaaaggtctgagagcgaggagtgtgagtcttcagaggaggctgacaggcggccccagagggaagcttccaaaggacagtgcacccaggctctgagtgtagccatcggaggccactgaagccagagtggagaaggccaaggagagggtggaaggtggggaaggaaagccagcagtggggggccatgcttgtgaggggaggaactggagaaggactgggactgagcgaggtttattttgtactggaaacatcagagcttcatgggaagacaagagagggagagagagacagagagagaggcaaggaggctctggtccttcaccccatggagtcatctctagggcctgtttccyggtgcaggggaaggacccactatgaaggaagcagggacacctccttagtgggaataggaaggaagaagagggtggctcaggtgcaggccaggcaggtctgtaaggtaggtttgaaggcagggagctgagggagatcccctgctctggcaaagtgcaagttgaacttatcttctctggctgtcctcaaggcccggagttttccaaatggttgttacacttggaggatccttataaaaatctgtgcaagaatcaccgtgcccagttgatcttcctagtccaagtcctggtgaaaagagcttagatcaaacaaaaagaagaagcttgaccacacatatccagactgggaaggggagggacttttggtttttctttggcatggggtggctcggggccaggcttgcccaaagcaagagggtaagtgaacygagaaccagtgtggtccagcaagaagcacagggtgggttcccagccccagctctgctacagatgtgctgtgtggccctgggcaaggcttctcacacttctgggccccattttccttgcctgtgaaagaggggttgggccactcccctctgcatcctgccagcctgtggctgacccagaggcctcacagaccccctgcccaccttgccaaatgccttcatctcaggtgtctcatctcattggtgcatcacaagaacctcagagaagggcactggtcaggactatgggcaagggactgtcccaggtctctcagccagcctctagcagaaccaaaactaggcttgcctcccgcaagtccacagcttcttctatgggagttaggaagtattttttggcatctaacccaattccctmtgcaagctgagctcatttgccatgtgtgggtctctgcagctgccacatctgcaggcatttccctccttcccttgccttttcactccctcccctcccatgctgagcacccagtgagcctggggagtccaggaaccttgtgatgagagcagaggccccgtctggtttttctcactgacgtctgcaccccctacacaccacatacacacacacacacacamtgctcaatcagtgtggggtgaatggagggaaatgcagtcctggtgagggcagaggagggcacttttcggccacagccgggggccaggagcttttggaaaatgcttggagtgagagaggagggagtgggtgaggtgggggttgaagccagaggggaagcagcctcagggatgagaggcctctgtgtggtgggggcggactctgaggaggcctctgccctctgcctggccctcccccagcctcctgcaggtgtccgagcagcaggggccctgcgggcaggggcatgacccttacagcaatggtggctggccctgtcacagctaatgaccctgacggcccaggctgggaaggaggtggggtgtggagagaggaagggaaggcagaggatgcctctgtgtgtgtgagcagggtgtttggggtgagacccctactcacccccgcccctcccccagcctacaggactgtgtgcagygtgaacgggcccctggtggtgctggaccgggtcaaggtaagactcttctgctgcctccctggcactaaggccaaatcccagggcgcctctcccctgccctgcaggatttcttctaaattaccctttccctccatggcccccagggcctgctctgttctctccatccaggcacccactcccactctccttccctagctgtatccccagccgtccaagctttctcctccctgccttttcagtaaaaaccataaaaaccccatggaggcccagccctgggccttgggaaacctcctactatccctaacaagctgtcctgcctccgtttccctatcagtggcatggacgtacctaacctcctcagaggaaggctggaccacagcacggctgtacctaacctcctcgagggctagactctccccaccctcgactctcacaggatcttcttttaacgggaaagaggaggaggtggcaagtcaatgccaactaaattttctagggatcttgatggcctccaaaggcctttggaatatctcagtctcagcaacatgggtggtaagtgaagtgggccccaccaaaggtaagtgggctgtgggctattttgtagcccctgggaaactggcagacactgacagtatcttgagtcctggggttgggaattcttgagccataaagagccctgcaaaggtacaagatcactctcttatcctccctccaccaaccagccccactccctcagcgtcccaccccacctcctagctgagcaaactggaagtctcggtgcccctttgacccctcttgtcccagaccccacacctgccagcgcccatgtctgtagctccctcccaccccactgctaccttgtgatggcgatggccttgggctcccagcctggcaccctcctatcctgtctccatcctccagcccttcagacctgacccttgcatcaaatttgcccagggctctccagtgccctcwgcttacaggtcttttcttttttttttttttttttgagacggagtctcactctgtcccccaggctggagtgcagtggcgcaatctcggctcactgcaagctccgccctccaggttcacgctattctcctgcctcagcctcccaagtagctgggactacaggcacccgctaccacgcccagctgattatttgttttttagtagagacggggtttccccgtgttagccaggatggtctcaatctcttgacctggtgatccgcccgcctcggcctcccaaagtgctgggattacaggcgtgagccaccgtgcccagctgcttacaggtcttttctatgagggtgcctgcaagcctttccactcactctcatcactctcccttccctgtgtagaaaccaacacctgaaatagtgtctgcatggggctgccatttgagatctctgggcacttgcatgtcattttttaaaaatgtgatcagtaatgtatgtttattaacaaattaaattacgagatgtcaccgccagtttcactgctataattttaaagcagtgatgagcacaaatactattttgagatacctgcaacgactgtaatgtggtatgaaaatatctgtgatttctgatggtaacaaagtcacaggtaccgtggaaatgctaattctaccgtggtttgttccttacattcagaactagaggaaacactaaatttgcgtaaacgttaatgaatgtaaaaatgtaactttcccattcaagatcacagaagccctgagttctctctgtagactctgagataggttctaggcaaagaacccttctcacaattagttggacaagaggatagagtatgtagaaaggaatgacaaagaatgggggattgtgtctgtgcattttataatagacacacaataattgtacatattcctgaggtacacagtgatgttttgatacatataatgcatagtgatcaggtcagggcaattagcatatccatcatctccagcatcctttctttgtgttgggaatattagtatcctctttctggctatttgaagakatatatatatatatatatatatatatatatatatatatatwtagttgttaactacagtcatcctattrtggtatagaacactagaacttattgctcctggctagctgtaattttgtgcacagatttttccctctgcctcctagactacacttcccyctattccctccctctgactcatccccagggttgagaggtcaccttctccwggatgcctctccctcttctctactttttgtggttttattagtggcatccactgaggtatttggtcaagatctggccatgtatctcctccctacccttccccacacacaccgtgccctgctattggccatgaactgtgttttgttcatcttcagctccagaagcccaacacagcatttttactgaacacataggctatagtaggtgctcagcatgtttgctcaaaggaaaggtgagtacattaatgagataaatgaatgaataaatgttagcatgactagctatgcacctgtcaaaacctgagccaacaatattaaataaatcagacccattctttgctaacaaacagattctgagttcatacggacattaccrcttgaccccccagtgtaagggacgccccaggaggaagtgtggctgagtagttaagtgcagcacactgggtttggattttaatcccagatccatcccactcttttctgctagctacmtgccaaccctagatcaacagcattagcacygcccaggaacgtgttagaaatacaaattcttgggctccacctcagactgacagaatcagaagctctgggggtagggcccagaagtctgtcctcacaagccttccargtgaactgatgctcaagttagagaaccatcratctcggattgtaaatcccagtttcctcatctattaaataataataggattattgtgaggttcacatcagacaaatgtagtattattctcccttgagaatagccagcaatgtttctgcctggaatgcagaaatgctaataagcytgattmaacagttggtgccacctcctgccccctctccacctccaccacactctccaccagacctgccattctccatgggacccagtgtggcatggagtcggaacctatacaggtgtccattttctccactgtaaaatgaggccgatctaggaaaccagaactaggtccccagayctgtggttttgcgactatcggatgcatctgtagctttggcagagaaaaataattgggtggtggaggcayctctccccatccctctccgttgcccctacccctttccctctaccaggatttggcaaatgctacaattctgtttctacagcgccaccttctgcccacattgaatcacacaggcaattactcttcctgcttccgtcctcaaatgtaagaacatttgagggaagaattttgtgtagatcagaggttcttagcccaaggaattaggcccttgaaattgtgtgcagacctttgaaggtatgcatgaatgtgcctgtgcatttttctggtaggagtttctacagtttcgtctgatttttcagggttcgtgacccagaaaagtctaactctctgatttgtataagttgaacaagcatcagaatatcaggggtgcagggggcttgttaacaggcagattgctaggccccaccccagagctctgattcagcatgcctggggtaggaggcccaagaatgtacatttctatcaagttcctaggtgatgctgctggtatggggaccacacggagaacctctgttctagagaatsttctgactcctgtagtctgtgattcaaattggtccctgtttgagaattggagtaagcactcaccttaaccaccagactccatccccaatgtctgtggctgctttcaaaagagtctgcatcagctctgaagacaatttccaaagaggagcctccgcactgccctggccattgtcagcaggagggaccttagaggcagcattcctgtgcacaaatcccgacaggcttgctaagaacttccagtcctccgtgtgtagacagcagctcccctgtgcctggccacttgctggttgagagctcagttgaatctccagcacggggttacattgcactgagtcatgccctcttcctgcagccctcttagtaaccgacatcaaccgagttgatgggatcaggcctgctcagtatgcggctgggaaatagggccccttaagatacaagctcctggactagctatcccccacgggaattctcccaggtacccactgccataactggtcatgagatcccaccaccaacaacaataacgacgaacatccagcacacacttagagcctggggctcttcctaaaggttccagacactacaccctccatgcctgagtgtgaaaacctgatggcccttccccagatctgaccacaatttctgccatttaaagttcattttctctgattttgtccttcagggacacagaacgcaccactctcctctccactctcctctcctgccaccctccctctctcacccacataaactcacatgaaaatgatcactttttttttttctttttgagacggagtcttgctctgtcgccaggctgaagtgcaatggcacgatctctgctcactgcatccttcttctcccgggttcaagcgattttcctgcctcagcctcccgagtagctaggactacagaaaatgatcacttttaaatcactccaccgcctgatttctttggggcacactctggcctgtgttctgtacagcaacttttcccctgaggttgaaacagccctccgtcacctccagggagatgacaaataatgaggcagggcccgtttcgtatcgaaacacaggttatcagagtgggagaggaaaacgagccgggacgtgtgttccacgcgtttcccaggccctcgctgtccgtgctcctgggctccctcttgtggttgagaacccaagacgcctgggtgttcggagctcctcccacctcggagccctcctccccggccggcctagtgctgargcccccactccgcaaggctgaggggtggtttggggaaccacaggtcaccttcctggcatcctcttcacaggacaagggaggactcaaggtagcgctcccttccgtgtgattgtcagggctgcaaacctagtctcaagttcgaccagcaggggttccctggcggagtggtccctacttggtcacaccttgctggggaattggaccctccgccccaacccgcaagcccttaaggtcactagtttgtggccagtaggtgatataacgatagtaatgatgatgataatcaccagcactgtgctgtaacatgtcctaaaaatgtattatattttaattgcaaaaataatacatgctccttgtaacttagtgaaaaagaggaaagacacgtaaagttaactatctgcccctaaccgctttattctcagccccgaaagaccctgctgaatacgctcaaacacaggcaaatatgttagaggttgacctcggggtcagtcccttgagagccaagggactgacagtggatccactgacagtgtcagcggatacacattttacgcattcttttggatactggcatagcaggcgatagtatggatgtactgtaacttactcaatagtcccattattgacagacattcgtatgttctcaggttttgccattacaaatagtacaatattgtatcccttttaaacggacgcttttgtggttataggatagattcccagaagtggaattgctggttcaagtacttttttatttcaaattagatattgacaatttggggcaagatggcttgcccagaagggttgtggtaattcayatttccascaaccaggtatgagaggacccacttccccacatccttgctggccctgaatatgttctctctgtagttttacctatctaataaatgaaaactagtactgtctcgcttttatttacatttctctgataactaggaaagttgagtgtctgtccatatgtttaccattttgattttgcttccttctccgtgaaatcttcctaccaagcaagttgtgcatacgggagctccttgtttattgctcacaggctatcttttgcaacaataaatgaaacaaagatttcatctattgtgtctctgccatacagaagtttgaaatactcatatgatcaaatattttttgtttataccttctgaatttcttgtcttgcttaaagacattgctcatctgtcttttaattggattattcagaaagataggaaagaagaaaagctcttccagtattttttaaaaattgtttttactttatatttaaattttttttacatgcctggaatgtatttgggtttatgatgtggttatcttctaactagatatcctcttatgttctatatattatttcccctctgagaattaattaatatacaacatttgttctataatagtcctataaaatctgggatctccttctggactttttttctttcctactgatccatttgtctacctcatatcaatttactgcttgacttcagtagctttataacaagttttaatatctgaaaaggcaagtcctctatctctgatctttttcataactactttggctattctcagacatktatgtgaactttaaaataattttattaaattttaaaataaacaataatccattagggttggatcaaatttatatacttttyaaaaggattaatgtttttatgctagtaactaagaacattaagacaataatgttcttcattgtttaggacttgttttatgttattccataatttttttttgtacctttcttgttatatttatttctagctattttatgagttttggccctattgcagatgggatggttttctccrttgcctcttctaactggttactactaaaatagaaaaaaaaggagggggggaatgatttttaaatatttatcttataaacagccaaattatcttattcattctaaaaccttctttctaaaccagaacctcttgagtctttctaaatgtataatataatctgcaaataaagggaattatgtctctttttccgtcagtatacttttactttactttttattttgaaacaatttcaattttataaaaatttgcaaagataaaaatagtagtaggaacatccatgtcaccaacggttaatatattatytcatttgctctatcatttgctctccatgtgtgactgtgtgtgcataattttttcctgatttttttttttttttttttttttttttgagacggagtttcactcttgttgcccaggctggagtgcagtggcaaaatcttggctcactgcaacctccacctccccggttcaagcgattcttctgcctcagcctcccgagaagctgagattacaggcgccctctaccacgcctggctaatttttgtatttttagtagagacagggtttcaccattttgaccaggctggtctcgaacttctgacctcaggtgatctgcccgcctcggcctcccaaagtgcagggattacaggcatgatccactgcgcccggccttcctgaatcttttgagggtacgctaagctcaagtacttcagtgtatatttcctaagaattaagatattcttttatataactacagtagagctatcaacttctgaaatttatactgatacaatactttaatctaccatccacattccaatttatcagtttacctgatatcgggtaagctgataaattggaatgtagcattttttttttcactccagtataggatccagtctagggtcaggtattgcatttgtcatgtctgtctagcttcctataatctggaacattttcccacagcccttctttgacttcccacagcctttctttgacatttttgaagaatacagtcaccttcaaccaccacctttaaaaaaatagaacactcggccaggcgcggtggctcatgcctgtaatcccagcacttcaggacgccgaggcaggcaggtcaggagttcgagaccagcctgaccaacatggagaaacsccatctctactaaaaatacaaaacattagctgggtgtggtggcacatgcctgtaatcccagatacttgggaggctgaggtaggagaatcgcttgaacccaggaggcagaggttgcagtgagccaagatcgcaccattgcactccagcctgggcaacgagtgaaactctgtcttaaaaaaaaaagataaataaaaataaatagaacattctctgtttatgtttaattttcttttttctttttctggtcttactgtataaacaaaaacttccaaaacaatgttaggtaacaattataatataggcatctctgttactgattttcattggaaatgaaagtaacgttagcattttaccatgtacaaggatgttgatgttggttttggttaatagtttagtgttcaagtagttgccttccattcctgttttatatagaattgtattagaaacagatgcttggccaggcacagtagctcacgcctgtaatcccagcactttgggagaccaaggtgggcagatcacctgaggtcaggagttggagaccagcctggccaacatggtgaaaccccatctctactaaaaatacaaaaaatcagccgggcgtgatggcgcacacctgtaatcccagctacttgagaggctgaagaaggagaattgcttgatcctgggaggcgcaggttgcagtgagccgagatctcgccattgcattccagcctgggggacagagtaagactctgtctcaaaaaaaaaaaaaaccacacataaaacagatgctgaattttatcagaagccttttggcttctatttacataatcttataggattcttttttaatctatgttgacgaactctctattattatgaattttgttatcaaatattgacaaattccctaaagttgattgctctagtcttgcattcttggattaaatcctacttggtcatacatgtttatttaatgcactgcttgattagactaataatttatttctgcatctatattaataagaaatattgatctatagttttccttttggctctatctttaatgtatttgggaattgggggctttctatttggtagttgtttccttctaattgttattcattttattttattagcttagctagttcctcccgtacaaggctgaatagaatgagaatagcagggattcttgctttgctcctaattttaaacggaatgctttatgcatcgtatcattgaatatcatatttttctgtagggtttgtttgtttgtttgttttttgttgagacagggtccctctctgtcacccagtgcagtggtgcaatctcagctcactgcaacctctgcctcctgggttcaagtgattctcctgcctcagcttccccagtagctgggattacaggcacccactaccacacctggctaattttgtatttttagtagagatggggtttcaccacgttggccaggctggtctcaaactcctgacctcaagcgatctgcccacctcagcctcctaaaatgctggggttaaaggtgtgagccactacacccagcctatgtagggttttttgaggatattctttttggagttaagaaatttcccttttatttcctgttttcaaagagtacttttgttcttttttgttttggttttaatcatggatgggtttttttgacttttttcaaaatgtttttaggtgttcatagtttttaatcttttaatttgttaataaggtgaattacatgaatagattttctcatattagactagccttacwtccctaaaataatcccaacttggtcttttaaaatttctgtttatgtgtatatgtttatcttcatttcttttctttactattttggcttataacttggtcttttttatacattgctagattgggttaatattttgttaggatttgtgcatccatgttcacgagtgagattgcctacaagtttcccataattattttattttggtatcaaggctataattgcctcataaaatgagttaaatacagtaccttctcttcctggctttgaagagcttaagtttcaaattatttattccttgactgttagaactcactggtaaaactatctgggattgctatttaatatcttaaagatttcaggattattctggctttcaatatcattttcagttggttctggtttgagttatatttattcatgttatctaatttctcaaatgtgttgcataaaattgttcatagttcatctttttaatattatcagtttatctagttgtgaatttatcccaacaattatttattcatgcctttcttatttcttaatctgtgttgccagcaatttgtctactttattcagcttttcaaaaaaccaattggctttgttggtcttctctattctatatttgttttctgttttaataatttctcctcttatttcctctactttctttggggttttaatgctgttcttttttctgacttctcacattgcatacttttagcttcttcaacatttttcttatctaatataatcatttaaagctttgaatgcatcacacatatattgacatacagcttttcactattatgggagcgaaatgttttctagttctgattataaatgcttctatagctagaatgcttttctttccaaatgtaagaggtatttctaaccatttttttgctgttgttattgatttctaacttacttttatggtcagagaatatggcacagctttatatctttcataggtaatggcacaaaatcatgacctcctcattcttttccagataatctgttatttcagttttgattgcctctaatgacaaggagtaattcagaagcgtgctttaatttctcagaatattaggaatttgggaggaaagtgttgtctttttaccatcaatattttgtttgtttgttgttttgggtttttgtttggtttggttttgtttttcatagagatgggtctcgctgtgttgcccaggctgatctcaacctcctaggttcaagtgatcctctcacctcagcctcccaaagtgctgggattacaggcgtgagccactgtgcctggccccattaattttagttggattatgattatggcttactccctggtaaatcagcgacctgggaagtgaggtgaggagcctaggggatgcaatgcgtttgctccaggactttttccgggaagaaggtgcaggtatggggcttagatctcttggtgctgatgacagctgacgatgagtgtcaatggggatggtgtgctctgctagcccagcttcccaggccaagtctgtgacctcctctagctgtgggtaaagactgggacttggtggctcccagagcgtgcacagacagcagagctcagggattccccggggcaaagctctacctgcccatgtgctgcctgtggtcctggaggaacagcctgatggtttgttggtttggtttttggtttggtttggtttggttttctgagatagggtttcactctgtcacccaggctgacgtgggacatgatcacgcagtggcatgcagtggcatgatcatggctcattgcaagttcgacctcctgggctcaagtgatcttcctttctcagctacctgagtatctgggaccctgatgtgttataaaaattgaaatataactcacatactgttaattcagtagcttttagtatattcacagttatgcaaacatcatcataataaaattccaaaacattgtcatcacctcaaaaagaaacctcatgcccattagtcctcactccagtcctccctctcccagcccctgagcaccaactaatctactttctgtctttatggaattgcctattctggacattttctattaatagaactgtgtaatatgtggcctgctgtgcctgacttttttcacttagcataatattttcaaggttcattcatgttgcggcatctatcagtgcttcttttttttaatgaattggcatatttgtttatttctcaattcgtgaaaatgtccttaatttgttgatgtagcaaacaaatttcaactctgctaggcaaaaaaacaaatcygctttgcagtgaacttcatataattcaactgcatacaggcaacacactatatatgaaaaaagttactaactgaattatgggtattaactactgaaaagagttaacagtttattataattttttttttcacaatctaggaagctggcagccagcagcagttctaacacaatttcgggtgctattgggaattcgggaatcttggtggagctgttactgtagtgaaacttgttcgcaaaatacaagcatacttttactagcacatgtgaaggaatctctctaaaattgacctcattggttttgttctcagcaaactgatctgggccattcaacatagtttttattgtgcctggtgttgatgcctgttctctttttacaatacattcrtgaccattggatgatatcaatttgacatacatggcatcagggacttcatagccaccataggttttctcctctccatccattttgttcttatgaaatcctcctttgcttcccaaggaacttgagaagtttttcattagccccacagccaccatagccgggtccccatgtactgccatagccccattccagggcygccccctgacccggctgcctgcccccatgggttccagggcagtsccttcctttttaatgctgaatgatattctattgtatgaatacatcatattttgtttatccattcatcagttgatggacattgagttattttcacttttggctattatgaatattgccagactgctttccaaagtggctgcactattttctattcctcccagcactgtatgagcattcaaatttcttcacatcctcaacacttgttattattattttattttatttttttgagacggagtctttctctgttggccaggctggagtacagttgcatgatcttggctcactgcaacctctgccttccyggctcaagggattctcctgcctcagcctcccaagcaggtgcccgccaccatgcctgrctaatttttgtatttttgtagagacagggtttcaccatgttccccaggctgatctcaaactccttatgtgatccacaygcctcagcctcccaaagtgctgggattacaggcatgaaccaccttgcctggcctatcttttttattatagccatcctagagtgtgtgaagtggcatctatctcattgtggttttgattttcgtttccctaataactattgatgttgagtatcttatcttgtggctattggccatttgtatgtcgtctttgtagaaatgttttttcaaatcctttgatcaaatccttttgattattatggtttaaaagttcttcttcttttttttttttttttttggatggagtctcactctatcacccaggctggagtgcagtggcgtgatgtcggctcactgcaacctctgcctcctgggttcagtgattctcctgcctcatccttccaagtagctgggactacaggtgtgcaccaccacacctggcaatatatatatatatatatagcattttcagtagaaacggggtttcaccatgttgcccaggctggtctcaaactcctgatctcaagtgatccgcccacctcggcctcccaaattgctgggattacaggcatgagccaccacacccagcctgagttctgtatatattctggatattagcctgatttttaaaatccttgatccctggaaggactgcgtgagtcaattctagtcccatgccactggtatcgaaggacgcctgagcagagggaagcactttgcgagtgtgtttacccctagtccacagaggcagaaacagatatgctgtccaggatcccgaggcagcccagtcattattacatctttattgaggttttacaaagtgccaggcaccatgctaatggatctgcatatgttatctcatttcctccctgcagcagccgtgggaagtaggtgttattattatccacattttaaagacgaggaaactaaacctcattacttatgacttacgtatttaatgagttactgaaatcgtaaagtaacttccacaaggtcaggcagctactaagcttcagagtttcagctgtaacctggtcttgcaactctgaagtgggtgcaactgcctcccaaacagaattcaaactttcacttcccagccccttgagttcatttccacaagtgtctggacactagaggggagagaacagtttgggactgggtcagggagggccggaggaggagaagggactttgcctccagtctcactgtcacgtggctgctctcccctcctgccagtttgcccagtatgcggagatcgtccacttcaccctcccagatgggactcagagkagcgggcaggtgcttgaggtggctggcaccaaggcgattgttcaggtgagtggggtcaatgggacattggctagttaaatcaatgaattaacccataaagttcccacactatctacaaactctgaaggcaggaaatggtctatttccctgagagcacagaamgtgcccagaatgggtagccccattccctccagcaggccccttagtggagaaactccctcttgttcccacaggtgtttgaagggacatcagggatcgatgccaggaagaccacttgcgaatttacaggggacatcctacgaactccggtgtcagaggacatgctgggtgagggacagggaggggcaggggtgggggtgctcctctgccctcccagcccagcttctctgaccaaaccctcagcacactacactgtcacttcctgtttacttcctgcctgtctctctggtgggctctttgaggtctggggtatgtcttctctctgattcctgaccccagctcagggtctgacatacaggtgttcaataaatgaggaaggtgggttcaataaactagagacacagtaggtagccacctatttggagccaggctgaaagggactgctaagccttgaatatcccctaattctctcccaagacctggcctggccctctcctctctctagtcctggaatcccccattagagtcatggtcctgggccaaggccttgcctgtaaaggtttccaggagaggaaggaagactctcacaggacagtccttgtagctggctctctgggttacctgtgggctgccggggagggggatacagggcactcctgtggggagtgggtgggagctggtggtggtgtggagggtagacagtagtgagggacacagggctagcctgagcaccctgcaacactcctcgtccaccctcaggtcgggttttcaatggctccggcaagcccattgacaaggggccagtggtcatggcggaggactttctggatatcaatggtgagtgactggaggttctggatggcttcgggacccagccctaacaccttccccactcttggaagttctgcccagactcacaagcagatcagatgtgatgggagagcagcaaaggcctctctatccccaaatcttccactgaaccccaacactgccgtcagcactccatgtccatcccctgtaaaatgccatcatcattgggcagtgttccacgcctgcccgaaggccatcatgcccctgcctttggcttcctgtccacaatcctgagaatgggctgcggtgctctgccggctctcgtccattcaagtgggcaccttccccaggcctcaaaccctatcccatctgtttactgaggacacactgggaggcctgtgggagcccgtggcttgccctacgccacacagaaagtcagtggcagagcacagaagactcatctgctcagacaggaggctgagtcacccgcaggccctctgaaccctgcactagtatctggaggtggtgatgagggctctgccctcttgggccctgaagcctcagcctgagtttccacctgcctgccacttccaaagcacaagggcagctctgtccaaggtagcactgggcctgtggctatttaaatttaaactaattcaaacagaaagaaagtcccatttcagagtcacacgtcatgtgctcaatagccatttgtatctagggctacatcaggcagcacggccagagcacgtttctatcatcacagaaagttccgtcaaacagggcggctctggagtctggggtcagtgtcgaggagagcagggaagggtttgaacccctgagcatggctctgtgatcgccctctcccaggccagcccatcaacccgcactcccgcatctaccccgaggagatgattcagacgggcatttctcctattgacgtcakgaacagcattgcccgcggccagaagatccccatcttctcagcagccgggctcccccacaatgaggtgaggcctgcagggccagcaggcatggctgggggagggacagagcagaggctggggctgctggaccagtgaggacagctcctgtgccaagcaggcaggggctggcagggctggggtcgccagcatcgagactggcagctgtccctgggcagctcagggactcaggactgcacaagatttcctccaggtccaatcttcaggctgccccaaatgaggcagcccatggggagctcccagagtagaaagtcctgcttgggggagctcacagcccctaccaccatccctgcactcatctttactcacccgctcctgcttctctcaaccaccaacagtgaacagccgcttcctctcagagcagctggtgtgacaaggtctctagatgctcctccagccacccagcaccctgatcactcaaaatggcctgagtgatcagagggcataagtgcccccaccctactgtgacccttccttcccagctctggacatggtgtcttggaggcccacagactacaggcccagggcaactctgtgtccaaatagcgcccccagcaggctgtggaggggtatggagctgccctatgccaaggtacccagacccataaagaggcagttgctctttgggactgttactctgtcctgcctctcgtgtcaggcacccccagcccactagcagcccacaataactcccaccccccaccccaaraaagactagcacctggggcagccccctcacctctctgggcttggatccctcccaccaaaggccatgagccagtggtgctcagtgggacaggggtcagctccractctgacgtcctcctgcccaatccactctgccctagattgccgctcagatctgccgccaggcggggctggtgaagaagtccaaggctgtgctggattaccatgacgacaacttcgccatcgtctttgcagccatgggggtgaggagacttagtagactggcaagttctggaggctgtgagcaggcagcctgtctccctcagcccctggcatgacctgatctgatggggaagccatcagtgtcccggccagccaggaggggtgaggatgggagcagtgaccacggccatgtgtccctcaggrtgtcccaaaggcaatcacagtggtaggatgggccctgggtggcctgaaggaggggaagccaggggattgggggaaaaaagatagcttcaggaacgggaggcctgggaggccagggaggtgggcagagcagcagctggcgacaggasgggcagggatggcactgagcagagctggacttaaagaagtctcagcctctccagggggatctgacaaggccctatgaggactggggcagcaaacccagtgcctgccctttccagccccggggtcaccccatggccttggtgtcttcacccccagcgactggtagctggtcagtccacaggctttcctgaggacacctgggaggggccaggccttgccctcaggccacagggccctacctccagcccaccctgctgtgtatccaggtgaacatggagacagccagattcttcaagtctgactttgagcagaatggaaccatggggaacgtctgcctcttcctgaacttggccaatgaccccacgtgagctttccctgatgcccaaactgccctcaggtgggcagaccccgtccccttccaagacctacagtaccagggctccagggcatcccagaactacagccatacgccagagctgggagaacaaccctcattgtgtagatagggaaactgaggcctgggaagggctaggaaaactcacaggcagagggagccagaacatgactctgtctgctgcctgtgccctctgctcttcccacaacccatgtccagccaccattccaactcagggctcctcatctctgtgtcacatccacaaagtcaccccaagaagatcaaactgctattataaaagtgtagaaaatgggagtttaaatctgggggtcaggtggatgaaaacaattctaataaactatcctgggtatttctggagggtactccagaaagcagataatagaattctggaggttttggtgacatccccaaggggaagagccacagctccagagctgggaactgagagtgtctgaagctgaggtacggtattcaggagcactycacgtgggaagggttcatagggctggcaagcatagggacgagcacattaggtgtgctttgagcagtgaaagggacagtgagaggagcagtgagagggacgaaaccatccagaggacatgsagtgagggtgctccagctgacccaagtgtgggtgccctaggataagacagagctaaagcaggtgcccccaactcatctacagtgtgatatgccagagtccttccccttcggtccacaggggacaaaagccactctcatcttcatcaggcactcctggccctgcctggcttttcccacccaacttgcctcctggcctcagcccctgtcccctttcctaccttggacagtaggcgaggtgtgtgttggartctgcctactcccaggaaccatggccctggcctaggggatgggggcaagggctcatcttatccattcctctgccactatgcacaacaccagcttcccagttcaccttgcgctcagcccccaggctatgtggtgcattagcccaggcctccaggctctctaaacacctggctacacctccaggatcgagcggatcatcaccccgcgcctggcgctgaccactgctgaattccttgcctaccagtgtgagaagcatgtgctggtcatactgacggacatgagttcctatgcagaggccttgcgggaggtaagctggctagcaaggggtgtcagattcctccctacccctccctaagcctgacaccccagacggtcaccctgcaaatagaggggagctggtccacccaagcctgccccactcccatgagttccagggcttggtctcagcctggccattcctcccctgccccccactccatttctcacagggtcactgaacctcccacccacccttcctagcttcagcctctcatcccctttcttaccccagtgcccatggatattgcaggtctctgctgctagagaggaggtgcctgggcgccgagggtttcctggatatatgtacacagacctggccaccatctacgagcgggcgggccgygtggagggtcggggaggatccatcacacagatccccatcctcaccatgcccaacgacggtagcctcctcacagcccactaccctccagagctcccctgtcctcccttttccaaccagatacttaaagggcccacgttgctttgcacagatgtgcagcagcrcttttcctccatcgagatagacactgccctttcctccaccatccatgccccccacacatccctatcactcccatgagggaaacagaccccaggtggccctgagtggttggagacctgggcccccacccacactgaggccagtgagttttcttgtagatatcacccaccctatcccagacttgacgggcttcatcacagagggacagatctacgtggacagacagcttcacaacagacaggtactgccctgtccctacccacttcctgctctcagcccagagaaacactgaggaacagatgtttcactgcccccaggcatgaattaggaggggccagccaaagcgaaccccaaacaggagacagccacagggaagactgcatggttcacagacagaagacaggcctgagcagaatctggtttacctggctctgggatcttgagaagataatttcatctcttggatcctaggtttcctcatccataaaatgggaataatcaaatatatcacccagacgcattgtggaggataaaaataagttggcatatagaaagcatctggcagatagtcaatactatttgccttccctttccagttatttgcttcggtgggcagaaaacaacggctaactaacacacatctgtcctgtgtgtaggttaaaggtgacctctatgacgtttttctctttgcttggcaggtatttttttttttttttttttttttgcagctattaaccattaagcttcaaagtggtttttgtccacattatcaaaagttttgaaatactgagccttttattaactaatgccatgtcatcttccccctccactgttctgtctagggccacatataagacagctgatgcccaagccctagaatttgtgggagataagagagggtgggtgtggctgttgacccctcggaatgtaggataagtgaggagcttctcctgagaacaatttggggacagggggagcaaagcttgagtcctgctgtccaccactccctttttcttctccctcagatctacccccccatcaacgtgctcccttccctgtcgcggctgatgaagtcagccattggggaaggcatgacaagaaaggaccatggagatgtctccaaccagctggtaaggagaagagggtccgggggctggtaggtcctctagtttccgaagctgaaggcctgagccccatctgaaggacaagcttttctcctggcaaaattcctttcygaacggggtcccagtgtggccaggttgggggctactggactcccgtggtaagcccgcagcggccaccgacgccttgcccctcccccagtacgcctgctatgccatcgggaaggacgtgcaggccatgaaggcagtagttggggaggaggcgctcacctctgaggacctgctctacctggaattcctgcagaagtttgagaagaacttcatcaatcagggtaaggcgcgtcgctggtgtggagccagtaacctcttcaccctccttccgccccacacacattcctaacactccctcccgctctgtccctaggcccctacgagaaccgctcggtgttcgagtcgctggacctgggctggaagctgctgcgcatcttccccaaggagatgctgaagcgcattccgcaggccgtgatcgacgagttctattcccgcgagggggcgctgcaggacctcgcgcctgacactgcgctctagccccgcgcgccgtggcaccccaacaccggcagggaacctaccctcggctcccgggtctcccctccctcgccaccccaaccagcggcttytgcgccgccctccgccctccgctggctccgaggtggtgggggcgccgcacgctccatccctttccctcgctcgattccttttcccgcgctccatgcctccccctcgactcccggtgctgcggaagaactgaaggttgcgatgccttactctgacgggagcatctgtatttttatgttaaaagcccacaaaataaaaataaaaagtaactgagatgaatttaccttcgttgaaaacaagattggcaaaagaaagataaaaatgaaaggaaaagataattgttgaagctgggggctggggttatgagcacacggagttcattaaactattctccctatttaaaaaaaaaaaaaaaaaaaaaagcccaacgcggatgctgagactgttgtcccagctactctggaggctgagacgggaggatcgcttgagctcaggagttctggtctgtcgtgcgctatgctgatatggtgtccacactaagttgggcatcaatatggtgacctcccggagacgggggccattaggttccctaaggaggggtgaacaagtccaggtctgaaaccaaacaggtcataactccagtgctgatcaatagcagaaccgttcctgggaatagccactgcacttcagcctgggcaacatagcgagactctgtctcttaaaaaaaaaaataaaaattaaatttaagcccggcgcggtggctcacgcctgtaatccaagtactttgggaggccgaggcgggggtcacttgaggtccggagttcgagaccagcctggtcaacatggcgaaacccccgtctctactaatacaaaaaaaattagttgggtgtgatatcgcacgcctgtaatcccagctactagggaggttgagaaaggagaatcacttgaacgcggggggcagaggttgcagtgagctgagatcgcgccactgcactccagcctgggcgacagagtaaaactccatctcatattaattaattaattaattaatttttaaaaagctgcattaatgtcttaacagttgacaataaaatttttcttagggagataattatcttccttaagaaatagcttgggccaggagcggtggctcacatctgttaatcccagcactttgggaggccgaggcgggcggatcacttgaggtcgagagttcgagaccagcctgaccgatatggagaaaccgcatctctactaaaaatacaaaaaaaaaaaaaaaaaaattagccggctgtggtggcacatccctgtaatcccagctacatgggaggctgaggcaggagaatcgcttgaacctgggaggcagaggttgcggtgtgccaagattgcaccattgcactccagcttgggcaataagagtgagactccgtctcaaaaaaaaaaaaaaagaaaaaagaaaaaagaaaaagaaaaaagaaagaaagaaatagcttgataggctgggtgtgataattcaagcctgtaatcccagcactttgggaggctgagacaggattgattgcttgagcccaggagttaaagaccagcctgggcaacatagtgagacccctgtatctactaaaataatttttaaaaatcacctaggtggcacacacctgtagtccagctacccaggaggctgaagcgggaggattacttgagcctgggaggtcaggctgcagtgagccgtgatggcgccactgcactccagcctgggctgcagagtgagacagggtcgccccctgtctcagtaacaaacaaataaacacacaaatatcttgataaatttcatgtggaacatgagctcaggagccttggaagggacaaccaaggccacaaaagatgtgtgtgactctaaacagctctgcctgagagatgctaggtagaatttggtttgctccagacaggaagggagaagagttgctagggagagggcctgaaggacttggggggtatgagtgcagaagactgaagatccccagttaagaaatggatgaagagtattctataaattaggctgcctgatgttcctttgaaagctgccaacttttttgtaatatcaatccctcctctgtctcccctgccccatctacagtgaaatcatgaatgcttcctaggaagggaaagaagggtggtttgggaggatagaacttcagcaaagagctgagtttcatttctaggtaaacgtgttgtagatgacgtcagaattattggatcaagagctaggaccaaaggaggacctccccattcccaccccaagataatttacagccatcttggggaaaggtttgggtgtccgctggggaaaggtttgggtgtccgctgggcaaagagttgtttttaataacaatttcattgaaatataattcccataccatacaatttatttataattgtaagagttaagtttttggtatagtcacagagttgtgcatccatggccacaatcaattttagaacactgtcattaccacgaaaagaaaccctacacccttagctttcacctctcaacacctccccacaatccattcactcctcagccctaggcaactactaacctactttctgtccatggatgtgtctgttttatttcatataaatggaaacatacaatatgtggtcttttgtgactggcttcttagcaaaatattttcaaggttcatccatgcatgcatcagtacttcatttctttttattaccaaataatatttcacagaatggatataccaccttttgtttatccagcagtttatggacatatgagttgtttccacttctttgctattatgcataatgctactatgaacattcctgtgaaagttgttatgaggacatgttttcatttctctcaggtagataactagcagtggaattgctgggttggatggtaactcagtttaatgttttgaagaacagccagctgctttccaaagtgggtgcaccattttccatttccccaagcagtggatgaggtttccaatttctccacatcctcagcaacgcttattatctgtcctttttattatagccatattagtgggtacaaagtggtatctcattgtggttttgattttcattttcctaacaatgaatgatgttggctgtcttttcccatgtttattgatcatttgtatatcttctttggagaaatatctattcacatcctttgcccattttaaagttgggttgtcattctattattgagttgtaagacttgttcacatatttgacataccaattccagtcctttaccaatgatttgcaaatattttctctcattctgtgtgtgtgttgtctgttcactttcttgatgatgtcctttaaagcaaaaaaaatttaattttgatgatgtcttgtttattttttcttatggtgtcatatctaagaacctattgcctaatccaaggtcacaatgatttatgcttatgtttttttctaagagttttatagttttttgtttttgttttgagatggagtctcactctgtcacccaggctggagtgcagtggcacgatctcggctcactgcaacctctgcctcccgggttcaagtgattctcctgtctcagctacctgagtagctgggactacaggcacgcaccaccacaccgggctaatttttgcacttttagtagacacggggttttgccatgttgcccaggctggtctcaaactcctgccctcaagtgatccgccctccttggcctcccaaagtgctggattacaggtgtgagccaccacgcccagccgagttttacagttttgttttgttttgttttgttttgtttcgagacgaagtcttgctctgtcgcccaggctggagtgcagtggtgccatctcggctcactgcaagctccgcctcccaggttcacaccattctcctgactcagcctcccgagtagctgggactgcaggcgcctgccaccacgcccggctgattttttgtatttttagtagagacggggtttcactgtgttagccaggatggtctgcatcacctgacctcgtgatccgcccgcctcggcctcccaaagtgctgggattacaggcgtgagccaccgcgcccggccgagttttacggttttaactgttatatttaagtctttcatccattgtaatattttatattatgtgagccagggttccaatttcattcttttgcatatggatgttccagtgtcccatgttttggagagactattctttctcccattgaattgtcttagcaaaaatcagttgaccattaatgtgacaggtgatttctggactccaaatttattccattgatctatatgtccattattatgctattactacactttcttagttactgtagatttgtaataagttttgattgggaagtggatgtgcttccacttttccaagatggttttggctgttctggatcccttgaatttccacatgaattttaggatcaacctgtcagtttctaaaaggaagccaacctgaattatgaggaggactgcattaaatctgtagattgattcggggagtattgccatcttagcaatattaaatcttctgatccatatccatggacagggagtatctttctatttattccagtcttctttaatttctttcaactaagttttgtaattttcagggaataagttttgttcttctcttaaatttatttctaagtatgttatgctttttgatgccattgtaaatgggattgttttcataattccattttcagattgctcattgctagtgtatagaaatacaaatgatttttgatattgatcttgtattctgtaatcttgctgactaatttattactttgaatcgtttttaaatgaattccttagggttttcagtatacaagatcatgtaatctatagagatagtattacttattccttttgaatctggatgcctttcatttcatttccttacctaatttccctggctagaacctctagcacagtgttaaatagaggtggcaagagtggacaccattgtcttgttcctgatcttaaagggaagtcattcagctgttcaccattaagcgtgatgttagctgtgggtttttcatagatttcctttatcaagttgaggaagttcaatctattccaagtttgttgagtgctttataataagaggtgtagaattttgtcaaatgatctttttttggctactgagatgatcgtggttttttatcctttattccattgatatagtgcattatattgattttcagatatcaaaccaaacctatattcttgggataagttccctttgtcatggtgcacaatctttcttaatatgttattggatattatttgctagtgttttatggaggatttttgcatctatatacacaagagatattggtctgtaatttttttttcttgtgatgtctttgtctgattttagtagcagggtaatactagcctaatagaatgagttgaaattgttcatttttcgtttatattttgggaagactttgtgaataatttgtattaattcttctttaaatgtttggtaaaattcaccaaacatctggacttggacttttctctgtcggcagtttttactactaactactactactactaactgattatctttaattattatatgtctattcagattttccatttcttcctgagtccattttggtaggctgtgttattatgggatttttttcccttgttatctaagttatctaaattgttggcaagtaattgttcataatatacccttgtactcctttttatttctgtaaagtacatagtaatgtcccccttcatctcttattttaataaatttagtcttctctcttttttttggtcagtctagctaaaggtttgccaatttttaaaaaataattattttactgatgcataatagatgtagataattccagagtacatgtgataatttaatagattcacataatttttaaagatcaaatcagcgcacttgggacattcatcaccttaaatatttgtcttgtctttatgctagaaacactcaaattatcctctcctggatattttgaaatgtacaatagattgttgtaaaccatagtcaccctactgatctatcaaacactaggtcttatttcttcaagtttgccaaatttgttgaccttttttaaaaaccaactttgaggccaggcatggtggctcatgtctgtaatcccatcactttgggaggacgaggtggaaggatcacttgagcccaggagttcgagaccagcctgggcaacatag

SEQ ID NO: 96035 - DNA, 26435 bp, Homo sapiens
gcttcctgtggaaggtgcccactccactcccacttttcatgcctccagagcccaacttgtaccacttcacagttttaccagggcccaaatctcctcctagtttgggactagaacacctctcactctccaagccatcctccaatcctgccttttccactgcttctcttacctgctcttgcacactatgactacatccttgccccacctgccccagtcaggggactgcagaactgagggcagatcttgggtaaggcctgcctctcctgcctttcttctcccaatgctccaactgggggttcatgactgcaaaaaaacccgttgtgtcaacaactccaatggcctcccttgatatagtccatcatgtagacagatgcaggatgctggggagggcccatgagagaccctgggtgacaactcctggccctggtctggccccagcctgggtctggagaactgaaagccacctggcttgttttccacaggggccagaaaaggctggagcagccgaagtctttcggaaacagtatctgcggtatattcagggctgactcaggaaagaaggtaagggaaagaaagagtggagggctgccagccccactctcctacgctgccaggcctcagcttggtgcatcttcttgaggccttcagaagtgatgagcggctccagggcatggaccctgctgctgctgcttgtcccaacctgagggaaacaaagcccaggcctagggctttagcatgaggcatgtggggagtagaaattttgtggcctttgaataggatccagtattaatccagtaataatccagccagtggattattaaagaaaaaaaatcgaacaagaatagaaattacacttctagttgatttatccttaaaacctggctgtgggattattgagctgatacagggactccatggccataaagtaggtggcagcctgtagatctatgttcacttccagagttttccaaactggatggaagagaaaatttgtggtgtgtgtagcagggaacacgtattagggactcaataccacttgagagaccagactacatctgtgcaaataaccttgtttatctagccattaaacaggaaaaaacaagtttctctcctttggggctttctgagcctcaatctactgatgggcagtacattgtgtctctccagggtaagggtgggacaggtggatttgggaagtctcagtgttcccaaggaccataagaatcctgtcttctggagatacccattaatatctcttgaggaaatactgggaaacactgccaaactgatctatggatcagtttaatccattttattaatagctcattttattatttgcagtaacatataaatcctgccctaagttattggaagacaattttataaaactgaaaacaaaacattttccctcctaaaaacactcaagtcatattaccgatagcatagatcactggggtcgcgccctcagccttgctctgggccccctctctggaagagattccttcacagagtgaccaactcctcccattttaaaaatggaaaagtcctatgtcccaagagccctcctcagttctgcgcagactattgggctcactctcctctagcaggtactggaagagccaggactggctgcagtcagccccaggaactctctgagacctacaggtcatgatgcaaggggactggtatcactgattaagctactggccggcccgtcctctttcttctgtccagtctcttgcctgcaggtcactgtccagctctcctgggcaggtgaggggaaggaaagctgcctggccctgcccaccacccacaagcacccaagcatgacactctgagttccagctctgaccccgtctcctgcacaaacccctcctccgccccacccttgcttcactccaagtgcccttcctgctccttctcactatgcattcatttctcaccagtcttaagactactgcctccaggaagccttcctgactgctccagtccattctaaccccttttctagcctcccaatgctcccagctggttgactctcccagcccccctttctaactttctagcttcagagagtgtcagagagggagtcatgcctgtaaacccaggattttgggaggccaaggcaggaagattgcttgaggcaagagttcaagaccagcctgggcaacatagggaaactttgtatctataaaaaattagccagatgtggtggtgtgcacctggagtcctagctactggggaggctgaggtgggaggatcacttgagtccaggagttcgagtctgcagtgagccatgatcacatgactgcactttagcctgggcaacaggggaggaggcatccttagaagcatcctgagagaatcaagttagatgggagcaggctttcgctcatgtacacatgtagctgtgatggatggaactgctaagttggaaaggggttgagaaccctcaggattctgggaggaggcactctggctggaagtacagtcttctgggaacctggtagggagtgacaaagccagtggagacagttgcctggagaaagtctcacagcctctgctttcttccttcccccaacaatcctttcctccacccaccagggactgtcccttgtctcagcaggagctctcccagaagctctcactcagcaccaagcttgggctgcttcccagatgcccaaaggcagatggggaaggcgggttccagccaggctcagctccaggagctgaaaagaacgctccagaagtggctctgtcttgcattcttccttaggctcaaggattcgcagataaggagccatgactttataacctttagagtatatagagatttgtatgtgtgactatgtcactaaaaaaggcactacatccattccatggaattctaatcagcaatgaaaaggaatgactgctgagacaggcaacaaaacttgggtaaatctccagagaactaagatgggtaaaaaaaaaaggttacatactctatgattccatttataatttttaaattcatttttattttaaaattatacagggagatggggaggtcgctatgttgcctaggctgaacttgaactcctggcctcaagtgatcatcccacctcccaaagtgctggattgcaggcatgagccactgtgcccggcccaattctatttatataacattcctgaaatgactaaagtttggatatggggagcaaattagttgctgccagggttcagggcagaaagggagtgtgagtataaaaggargagaactggaggaatactgctggagatggattccagctcggtatctcaactgcggtggtggatacatgaacctacatgtgtgataaaactagaattaaacacacacatatttataaaaatgggtacgacaggctgggagtgatgactcacacctgtgatcccagcactttgggaggccgaggcgggcagatcacctgaggtcaggagttcgagaccaacctggccaacatggtgaaaccccatctctgctaaaactacaaaaattagccaggcgtggtagcacgtgcctgtaatccctactcaggggggctgaggcaggagaatctcttgaacccagcagatggaggttgcaatgagccgagatggccccactgcactccaacctgggcgacaagagcgaaactccatctcaacaaacaaaaacaaaaaatgggtacgataaaaaatggagaaatctgaaagattgatggactgtatctgttaatatctgagtagtgatattgtagttgtgaaagatgttaccactgggggaaactgagatctctttgtagtatttctttcaattgtatgtgaatctaaaattatctcaaaaaattataatttttttttcaaaaaataaatacaaccaagtgcagtggctcacccctgtaatcctagcactttgggaggctgaggcaggaggatcacttgaggctagaagttcaagatcaatctgggtaacaatgcgagacctcatctctacaaaaaaattttaaaaattagcctgccgtgctggtggatgcttctagtcctaactcttttggagctgaggcaagagtatcacttgagcccaggagctggaggctacagtgagctatgattacaccactgcactccagcctgggagacagaatgagaccctatctcttaaaaaaatacaattttataaaagggggaactatgggttccacacatttgctaatgggcaaggcagcctggaagagatcaccctccctctatcccttgcccaccatttccttgcagcaactttacagaacctcttccagaggaggtctgttctggaaaaatccaccccactgctgtagttctttgcctctttcttctgggacacacaatgttggtagctcagtaccagagctccatctagaagccagataactaaatcctgataaaggaaccagacaggctcggaggggaggtctgtgaaacttattccactggttttacatggcacagaattcttattggttcaacctcacagccctctctccatgtacacttatttttgggtttcctgctataccgtagcataggagacatcacagttggtgcagggcccaatgatggaatgggggattctgattattcaagcaccaatgtcctaatccatcattaccaaaagcatgtactagtgcacataattcacagggtgttgtggcaatctggtccctaacctctgagcatttctgctgctataaaatggacatacactttatcttacagagtgttatatagttaggcattatgaaagacatataaacatccctgacacctgacaaggagacacattcccaaaatggcagtacagactgggcaattggagggctcatggtgccttgggaatcttaggagatgtcaggagaccaaatgccccagtgggaaaactgtgcatctcagcagaggctggtggatgcctctcctcagtgctgctgcagtggtttaaccctggctgtcacatgtcaccctagtgagccaagaggaggaggacaagtgttggacctaagttgaaacccgaaatgactgagttcatctgtaagtgattaactagattaagtttttctgcttttagggaagagtggaggattgagtcagaaatcaagtttagttgtagaaaaagttatctttttgtacccctgagtttgcagtctgtaaaacattggagccactacacagatacacactttcgtatacagtgtgtgcttatacactgatatacacagaccatgggcattctcacaggcatatacccagtggtgtgctggtaagtgttaacagccagctttctggaaaacaacaataacaacaacctaagttgtagcagttactgatttctgtggtgtaaatactcccaccacggtgatttcaagctaccaacataattacacctcatggaagatggaagagttgtacataaaactgggtctttgtgagctgtgtgagctggctccagcataagttacaggtgcacatttatgcatctgcctaaaggtgcctaaatatgcaggcttgcttaggtttcttcaagaactgaaacgttaacatgaaatctgtagacacattagtatagaaaaatacgtgaggacatcatctcaactatatgcatctgtagacaccttcagtcacttagaaacatacacaaagagaagttcgaatatataaaaaaatacacacctacgcagattgatgcaggccaggacacgcatataagctcacacatagacacccacatgctcagaaaagaagagggagtaaaccaaccggatttgctcaggttgctgccctggcctgaggccccacatccctcagaacaacttaagatcaaggcagataaggtccctcttttctttcagttcccttacatggctgaagagacttgaaggacagaacgtttacagcagttgtctacggctgcctctgtgttctgaagaccccatgcacccctcgtcccttctgggttgggcctggcagtcccgtaggctgtctttcccttgctttgcagatgccagccccagagtcccacctccaccgttggtaaggaagcccctcacccctgcctctttcaattgtgggaaagtgaactccagcctctctctccttcctcatcccagatcaacagcagatgttagtatgacccccctcctggctccctccgtgactccrgctctgccccccacctccacctccacctccaccacttgcttgttcatctctcacctgggccaatgtccagccttctaagtgtttcccttctccaaactctcccttcccatttgtcaccctataagtaacctgccagattattttaaagcacagtgctgaggtcacacatgtactggcaacttctaatgcaagaccgactagggctagatctctttgaggctccctgaccacacgtccaacaactcctccctcagttcacaatttcacttctccttattttctctttctcttcctgatctgttctgtaaatttagtttctgctgtggaatttgcttgctcccttctttagttcaaatcaggcatttgctacccctcatgtctgtgacaccgtgtttatagtttataaaccactctcaaagctatttgtggagtactgaggttagccctggacatgctgtggtgagtaaaaacagatgtggctgtgtttcatgaataaagtcaacaaaatctgttgaggaccctgaccaaaagtcatctgtcccaaaatcctaagtggatttgtgaggaaagatattttcccattgtctctcttaacactcttccccctgactcccaaactatggcctccctggggtcataggaacaaagtacagaagacagagaagaagactgtggcttgcagattcttaaagaactttattaaccttgtgagtgtcatagaagcagctactgggatgttgcaagcccagtgcaaactggtataccttrctatattgcaacatcttgaatttccttccctttatattaactacccacacataataagccacatctattatttgtgtgagcctatgctttttacttttattttagagcctctcgtttcctcatttgtaatatgtgatyagaaatctgtcattctcggcctgccgcggtggctcaccgctataatcccagcattttgggaggccaaggcaggcagatcacttgaggtcaggagttcaagaccagtgtggctaacatggtaaaaccctgtctctactaaaaatacaaaaattagctgggcgtggtggcacatgcctgtagtcccagttacttgggaggctgaggcaggagaatcacttgaaccaaggaggcataggttgcagtgagccgagatcccgccactgcactccagcctgggccacagagtgaaactctgtctcaaaaaaaaaaaaatctgtcattctcataaggttgttaggatgatcaaacaagataaaggtacataaagagctctatagaattataatgtacaaggccgggcacagtggctcatgcctgtaatcccagcactttgggaggccgaggtacgcggatcaaaaggtcaggagatcgagatcatcctggctaacacggtgaaaccccgtatctactaaaaatacaaaaaattagccaggcgtagcagcgtgcacctgtagtcccagctgctggggaggctgaggcaagagaatggcgtgaacccgggaagcggagcttgcagtgagctgagatcacgccacactgtactccagcctgggcgacagagcaagactctgtctcaaaacaaacaaacaaacaaacaaacaaaaagaattataatgtacaacataaacgtattttatttattctttttttttttttttttttgagacggagtttcactcttgtcacccaagctggagtgcaatggcacaatcttggctcaccacaacctccacctcctgggttcaagtgattctcctgcctcagcctcccaagtagctgggattacaggcgcctgtcaccacgcccaactaacttttgtatttttagtagagacagggtctcgccmtgttggccaggctggtcttgaactcctgatcttgggtgatccaccccctcggcctcccaaagtgctgggattacaggaatgagccaccacgcccggctactttcttctttaaatcaattatatggccattatttatttcataaataggcattcagtgactttgaaatattatggtccagatagagacaacagggttgtacaacagaaatatgtaggtcaaaattttaaatattctagtagtgacactaaaaaatataatagattggcaaaatttagtaatctataatcttgatctactacatccagaatgttatttcaacatgtgattcatataatagtgactaatgaggtatcttacactctttttttgtagtaagtctttgaaatcctgtgtgtattctacattgacgggacatctcattttggactaaccacatttcaagtgctcagtattcacatatggatactgtgcaggacagcacacactaattggtaatgtaaatacaagttagttaagrtctgtgaagtactttatggtttccaaaactcttttggcatttaaatcttgcgtcagccccagcaggtagatgtttatcatttccattttgtagaggagaggctgcagcaattacctgtaagtcacccaagctcatccagctagtaaatggtgaactcaattcttgtcttaaacctgggcactttcccttttgcttgcttgcctaaacaagcaatacaaagacaaacttaatatttatacacatacgtcccatggctcattgcagtagtacaggacagaaacaattatttcaaaatccacctacaatctagtctccaaaaatcctgcccagtttaattgcaccacaatcyactaactctgtaattctaaaaatgtgtatgttggataatcttccagctctaaagtgctgtgaattaaaaaaatgccrtaggcaggcataaaaaaatcctaccctctattatattctccatctgatatagaatatatgatatatattctataaatgaatacatgatacagagtctatcatgtagtgatttactttttacttttgtgaattacaacgtggtagggtaggaaatgagaaascttaaaaagcctaattttctcactaaagcataaccagacacagcagcctattaggggtttctccagaagatggcaggcagtcaagggggacagagttcgacccgcgacaggccaactgatttccccaaaaagatgccaagggcagctaaccgccctcctggcccgcgaagctgctccttgagggcccaaaacttcccggaggagccagaggaggccctcaggagccacagctctccctgacttggcctgtatttgcacccctagggatcccattccctttcccgacgcagcgcaaggaaggggagcggaatgggggctgaaaggcaataaaaaacttgtamagccgtatctgctagttctcccagtgggctatgtccctgcaaatatcctccacaagaagtaaactgggtgggtaggaagaggtgaaggctccctcctcagggctgccgggaccgcctcgagggcttgtctgtttaggtcccaattcctcccggatccgtacattcacacgagcgcagggcaacaatctgagcgagtgttcgtgtgtgcccgtgtgactcgccatcgcgtggcagatgttcagtagaacattacagtaatttctgttacaggtccatgggcgcaggtccctgagcccacagcttcgcgggggtctggccgagcatgcgtcacaacctacgcggccaagagcagtgcgcacgcgcaacctaacgcgggactgccagcaacttccgggcgtttacaggcaggcaggtcagtgatgtgtcctaagggtccgaccgacctagatacccctctttgattcctcctcttgggattagtgtccatctctggaagcaggatccaggaggacgggaggggccgctgcggaccgcagtcgctccacctggaggagacaccagaaggaagacagcctgagggacgcagccayccccggctcctaccggcgccccgccccgcgcatgcgcacgcgcacagggagtcagctggctgcgcgggaggtcacgggaagtggggcggtgcccagacagctggagggaaggaggtgtcaggcggggagagacgcaaacggcgggaccagcagcgacggtagcagcagcatggccgcgatctatgrgggtgtagaggggtgagtgcggcccggcggagggagcctgggcccgaaggcggggcggaaggccgtggccagcctggcaagctggtggccttgatcctcggcgtccgggcactttgggcggcgggaccttgcggtgaagaggtgtgtgcacgcgcaggggcgccctggagcgcacagctgtatgccttacggggactctgcctgtgcaacagccacaccccgggttggggatcctttgtgtttcttggcggaaccacgcccctttcttccacgaaacacccactccgctgtcttcagctggagaagcagctcctttttcctattcctgacctcggacagagttttgcagaacaggtgtcaggtgtgaaattgctgagcgcgggcagggtggggagtgggagtggggagaagcgggacaaagatcktggctgaggttatccgggagctggagcagctgcgagccagagtactaggttgtcctgatgtctgaaaaccgctccatccctgttggccttccatgctgctttcactagattgcatttttctgctcagaagcttgtttactgaactttttgtaatagctctgcccctgggtatgaccatggacaagatatttaccctccctgggctacagttaccgtatgtgcaaagtgaggatagggataaataagatcgctatgtccctgccagtggcaacattctgtgaatctgagtttgtcaaatcagggaataatgggggtcgctggcctctcagccagggcactgtactttcgaatctgtgattgttttcacttctctggcagccacaccccactgctgattcacagaccccaaagtcttttcacatgaattgttaggaatgatctttcccatcctgtatttgtagcacttaaaaaaaacagtataggagtctgcattcatccttgttatagtcatctgtaagatatgacccgtttcttccagttcgtcaagacatgcttttggatgtggaatctgccacctcatgtattaactacccccttgaaatttcatgtcctctttgagtttgatgagcggtcttcagtgtcttcttctgccattcctaaaagtaatgatcaataaagaaacatatatcccatcaccacagatctccctgtgaactactgtgacccccagtaatcaacatttgaaggtttagttgcttaagtatgtatgaagtcaccctgccatctggtcagcatttctagyaaaggtgtcttgaagaccttggcagctggatcttgaaatgcagtctttagctattgtgagggaagcagagagatgtgccatttttcttaggagtgtttgctgagcattgcctgtgccagctcctgtgctcgttctgagagggtaagtaagtgatcaggagcttgacccagtggagcttgaagtctagtgagaggcggacacaaagcgtctgaacacacacttcatacagaggagactttaataactttggaggcactatgaaggtttaactaacggagacttaactaattcgttggggtgggccacacctcagaaaaggtttcgaggactaggtgaagcgtaagtagagtcttgcaggataaggaggacatccccaagggaagaggagtgagaattatgtttcagttaaagagcactcaaacactgaaccacagaggcgggtttgggagtggtgattgagtttgtcgaagytgtctcctccatcatactgggctctgccagtgtggacagcacaagcttagctctctctgtgggtttttccgagcaagatcaagtgccctcttgtgttctgtaggggaggcacacgatccgaggtccttttagtctcagaggatgggaagatcctggcagaagcagayggactgagcacaaaccactgggtaaaaaccacactgaggggatcagagggcttggttctgattttattctctgtaattcctgttgaggtggtggctgggactcacagagcagcctgtgggggcaacatagcttctgtaagcctttgtaactccttcttcccttgattggggccagctgatcgggacagacaagtgtgtggagaggatcaatgagatggtgaacagggccaaacggaaagcaggggtggatccwctrgtaccgctgcgaagcttggtgagtctggggyggagcctgggaattcagccatctgtgacactgagacagctagcaagtttggactagatgagtttgatgactgcagagggaaagacctccaagacttagtccctggtgtcaaaactgtcataatctcacccagtctcatggcttcagttgccacctacaaactacaaatgtgttggaagagcacagggctttggagagctgctgagaccttggtttgaatcccagctttgctgctcagtatctgcgtaaccctgtgtaggttactcaccttctctaagcctcagtttyctcatttggaaaatgtgaatagtagctacctcagagttgttgggaaagtaaaatggcatgatacattgyaaagtggttagtatagagcctgacccataagcactcattaaatgttagctattatttactcctggttcagatctttctcccaagttgcggtagctccagctactccctggacatatatgtgagatgttctgcagacacaggcaaaccycgtgtataccaaaccaagcttacctctctccatctcccctcaccttgccccgctgcctgatctttctgttaagagcactactgcccttccaagctccaaagctggcattgttgaatcccctctttcttctgtccatccccagtccaggttgttcttataaccacagccttctgaggggtcattgtgtggggagaaaggaggactggggctgggtgaacagggtatggccagatggggagaacaggaatcaggcatcaggagggggcgggggttgagaaaagagctggggctggggctctgcacactcgctcacctcccgcgtggcctagggcctatctctgagcggtggggaccaggaggacgcggggaggatcctgatcgaggagctgagggaccgatttccctacctgagtgaaagctacttaatcaccaccgatgccgccggctccatcgccacagctacaccggatggtgaggaagtggagggaggggtgagagtgagaactggtttttttgggaaagccccttagatatagctgacaaaacttgttctgcaaatatccagaaggcagccactcttatattcccctcaactctttaagtagtttaagtctctgccagagcaaggaccaggcagcaggaggaagggcaagaaaggtctcttgatgggaatccaggagtggggtcaaacataactcccctgcagatgagggaccacctgggggcgktgtagtgaggaaggcaggctggggaagctgtcagtgctgaggaggaagtggggtggccttgtgatagtgtaaagagttttggtgtcatgggattggtgtttgaatcccagttcctgttttgcctgctataccatgttggcgaagttccaaaactctgagtttcagttttctcatctataaaatagaggwagttgtattcataagatggtttagggtatgagtgaatatcactgtgagaacgggtctagcacaatcccagtaaagcaggtagagtcactggaagaccggctgggcaaggagccacattccctctaagaggtgcaggcttgcatttctctttgtccccctagacgagggcgttatgggattagagtttttctgagacccaggctctcaccctcaggcaggaaactagctgggctcagttttctcctctacaggactgggtggtgattcccttgcctggggctgttttctgtcctgtctttccacagtggcaagctgttgctctgtgccaggcctcggccacactgagcctcctattccctttccccaggtggagttgtgctcatatctggaacaggctccaactgcaggctcatcaaccctgatggctccgagagtggswgcggcggctggggccatatgatgggtgatgagggttcaggtgagctcactgactggcccagctccaggtcctggatctgctccttccttcactccctgtctttctctccttagccttggctcactgagcccttggggcttcctggggacaactcctgaacctggccattccatgtgcaggatcatgactgagatcatagaggtgcaaatgctggacgagctgctgaccctgctctccagcagtgacttgcacccaggactcagattcatccctcagcacaggggcctgcctgtgttgacttgctgtccttagggaggagttgaaactgagggtaaggccatagatgccaggagatgccataccagtctgctaggggaaagggtgtagaagcccttccaacatcacctctctctaggtagtgtgtgtttattttcataggggcccttgaggtccagttcatggcagtgactccggtggtatttgtgacaacagactgaccttgccttatccttgggtaggagctggtgtgacacagcctcacctattctgttttccccctccaactttcccttatcttggtcagtcagatacagtttgatagagaccctcccacccccctctcccaccccctgccacccctggctgggaatcaggaaacctaatttgtataaaattcaagcagatcactaacctgtctggatctgagtttccctcctcgtgagctcaggatgactgctcccatcttcttagccctctctgctccctgcagcctactggatcgcacaccaagcagtgaaaatagtgtttgactccattgacaacctagaggcggctcctcatgatatcggctacgtcaaacaggccatgttccactatttccaggtactcctcctgctcccagtaaacatgcgcacctggggtagggcagtgaaacactccaagtaagagtggatgcaggggagggcctgggcrgaccggcaggaaatagggtgagttgtgggtctgagttgcagggtgaagtcataggtgaggacagggtgcattctaggaggtgcattctaggacagggcagtgcattctaggagggtgtcagtcatgaggaagcgatggtttggggacaggtgattagccagacttcattcttgggcagctagaacctgctgggaggtgaaagagatggcattctaggctagaatgaaaagtgcaggatgagatcacagggcagagacagcaggtagagtatgaatgtgtgcactgggctgtgagctgcttctggcctggatgggtcaagagagcccttaaagaggtggacagggagagttctgggggatatgcatcttcctcctctgggcgttggggattgactcctccttgtctgtgctgtgttcatttgtggtaagttaggaaacatctgcctttagcggaaccagaggtaaaaggcgggagagaaggtgaaagggagaggacaaggttgatgagtttgatagttacctgtgaggcccagttagtcttcctgtccagacatttaggtgggctggggctggggctgggaccaggaccaaggaaggaaaatagagatgctgggaagtagggcctggattatcagggctgagggattgatgattaaagaggggcccggctaggccaaggtgaggaataggaggggaccaggaagagaaatcacttgatgagcagttgtcataggaagtgcagttagtaactgttaagctatccggactcagccaattggttccaaactctactgataggtctactgctccctcttctatcctttagtcattcttacagggttgtttcaaagatcagatgagatagtatataacgtgcttactacattgctgtaggtgctcaagttttaccacccaccccctcagacatttacttaaaatatattctgggggctgggcacggtggctcacacctgtaatcccagcactttgagaggccaaggtgggcggatcacttgaggtcaggtgttcaagaccagcctggccaacatggtgaaaccccgtctgtactaaaaatacaaaaattagccaggcgtggtggcgggtgcctgtaatcccaggtactcaggaggctgaggcagagagaaytgcttgaacctgggaggcggaggttgcagtgaggtgagagcacaccactgtactccagcttgggtgacagagygagactctgcctcaaaaaaaataaaaaaaatattctggggaaccattggttcctcaggaccttagaggtgttaaagatgtataagtttgttgggattggaaggacctaccttctgtggtcaaataagttttgggagaaacaaattgatttcttgattgcaggacttctcagagcctttaatttgctaatgtgcattgtgactccccaagggagagttacaatatgcaatattccttggattcctttgaccaaagaaatcttttcaagagcaccccaacccagctactcaggaggctgacgtgggaggattgcttaaggccagcctaggcaacagcaagaccttgtccctaaaaaggaaaaaaaaaaaattacaaaaaaagagcagctcaagaaactataggaaacactttggttaacacaaatctgttctctgtgctgccttcaaactaatctataagaaataatgaagtccatgttagggaacacagataacttttctcaaatgagaaatctcaaatccctgtactttggagttaaaaaaaattattctagcttttccaacagtagagacattaggaaggccaactttggtgggcagattggggattttcctttgcttctgatgactctcttgtgccctttctcctctcaggtgccagatcggctagggatactcactcacctgtatagggactttgataaatgcaggtttgctgggttttgccggaaaattgcagaaggtactggaggtggggggtgggttttatctggctttgttctccaaagatccccagttgggagattgagtggggttcagacaggactgacaacaattttcctctcaccaagtgacctcagttctctgccaccactggccttggtggtggtgggccttggggtggaggcagaagggcacgtgggtcgtgttgacagttttgtattacctgtgtttttttcttwaatagctatcatggcttgcttaggctgtatgcctgtttctgaggaatttatgaagcarttgtcctttggacaaatctataactttcttttcctagccaattatactcaaagaactaggggattatagagaggttaggcatattttgttgggtgtcaggagatgctgaacagagggcttgtatatctgtacattgctctttctccactgtgaggtccatcctgccttaatttgggttcctgcagcctcagggcattctagggctctcttagatcctgctggaytgagtcccctctagaaaagaagcaggaacaggctaaccaacagcagactgttagaagttggtggagggcactgacaggagtaccagccagctgttcagctaggatcctgggtccccagagctgacagcctcataggaacagacttacagtaactcagtgtgagctggatgcatactaggtgccagtgcattcctttagtgggtgctgccctcccttcctgagttgggggcctgagtgagcacctctgtacagggcacccctctacagagggaggtagctggtatgtttgtcagtggagacttgcttctccacctgccacgaggcgggcatccatccggcagtagactcctagctcagggtgctcctgtgatggctgccttgcaacagagagaggatagcccaggaatggcagctccctcctttctcaccagtttccttcttccgtcctccctaccccaggtgctcagcagggagaccccctttcccgctatatcttcaggaaggctggggagatgctgggcagacacatcgtagcagtgttgcccgagattgacccggtgagttgaggtgggagtgaaggtggggagctgctgggtgaggagtggtcctttcccactgtggatgggactatcccatcaaaccctgcatagattggatactattttaaatgaacttagggtctaagaagcattctgcagaatgtctgtaacaaaaaagttctttggtcaaatgccgccctctgtaattggcctgtaatctgtatttatgtatagtaaattagtttaatgtacgtgtgtgtgtgtgctgtcccctttctattttattttttatttttttgagacacagtctyactctgtcagccaggctggagtgcagtagcgtgatctcagctcactgcagcctccacctcccactctacctcccaggttcaagtgattctcgtatctcagcctccccagtagctgggattacaggcgcgcatcaccatggccggctaatttttgtatttttggttttgccatgttggccaggtaggtcttgaactcctgacctcaagtgatccacccaccttggcccaaagtgccgggattacaggcatgagccaccgcgcccagcctgtcccctttctttcagttaatttcagttcagtcatgtttctgttcatttccctcacttctgtctttccttcctctctattgttgcttaacgctttttccttcctcttctctccttgccctttacaaatgtctcctattttcctccctttttttttcccctttcctgagtctgtctactgtttcttggcttgagggcgagtaactgggatagagtgggttggtcataggaaactcccgccttcagcactggagaggctaggttggcccccatatccattttctgctctccacccaggtcttgttccagggcaagattggactccccatcctgtgcgtgggctctgtrtggaagagctgggagctgctgaaggaaggtgagcctgsggggaggctggaagggcaagggcaggggacggggctggaaaggaggtggcccaggaaagctttttgccccagagagaacctgcttcctggaccctgaggcctagacaggccactgatgctcccgtctaaggccctcaacctcattctgccattgagccctttaatgatgtcccatccaccttccttgaactcttgaaaagatgttgtgttccaaatgatttattgaataatagctacttttaaaaagttaaagacaaatcagacttaaaattggagcactgactggcatgtgataacctgggggacatccctagtcaacataattctagctagaagaaaagaggcctggcttcttagccctggcagccttatrccaggcagttggatggtttctaccggacattctgaagtagctcaaggactcccattgctaccatggaattcctggcattgggtcctttggagctgagaggagagcaggccccctatgytgctggctccaatactcgagtacccagtgcaccctgtgtgctgggcacttggcatgtaggcccctccagcatctctacaggagtacctcagrgtctgggcgtccttgtctgtcttccttcctggccccagtacaggttgctgttctcctcttatctctgtccttgtgttcttccctccaggttttcttytggcgctgacccagggcagagagatccaggctcagaacttcttctccagcttcaycctgatgaagctgaggcactcctccgctctgggtggggccagcctaggggccaggcacatcgggcacctcctccccatggactatagcgccaatgccattgccttctattcctacaccttttcctagggggctggtcccggctccaccccctccaagctcagtggacactgggtctgaaaggaaggagtcttttgcttcctttctcctttttacaaaaacaaacatagaagaaaataaatgcactttatccactccccaattggactgcattatcaaacacatgtgctatgtacatcctcagtgcacctgccagcagatatcctggagggctcatgagtgaatttagtccaagatttaaagccctgcccccaggtgctcagcctgtgatctgtatccactcagcatgcacttgggcagatgatttgtctgtgtgctacccttccccccatattaccatacatatgcactgtgtggctgccagttaatctgtgacctgttttctcctgtcgtgtcaagtgggtaacgatccctggcgaccacagtcagcagaaacaagtgctcaccattcagaacatcacagggagtaaccttaggtatatcacaccctctcctgagactcccagcaagatttaggggctagagtacaattctagactgggagcatctttacctcactggatttagtaactgcaggtaagcaggacattttgaagtttttcctatgaatgagtttttgaaaggttatgaggatggctgagatccaagaagaccaactaggtaccgctcacctcggtagctgacctattcctggctactactagcctggctctgcttacagcgtgacactatgtgttgtgtgttcctgggaatgaggagcatcagtgaagagcagacatgattcctgccctctgggtaccatagttcagccagtgaaggcaaacctgaagcttcggttccacagcctgtgctgcttggtgaagactaaggacaggagtctcgatccacaatagctgcctctccaggtgttttattagaggcatgtggatcatgtcctgcacatcagttctccaacttacagacatcagttattctagagtttgttttaaaacacggttttggccgggcacggtggctcacgcctgtaatcccagcactttgggaggccgaggcaggtggatcacgaggtcaggagattgagaccatcctggctaacacggtgaaactccatctctactaaaaaatacaaaaaattaacygggygtggtgtcgcgcgcctgtagtcccagctactggggaggctgaggcaggagaatggcatgaacccaggaggtggagcttgcagtgagccgaggtcgcaccactgcactccagcctgggcgacagagcgagactctgcctcaaaaaataataaataaaaataaaatcaggtttttgtctactcccctcccctgccctaaggtatctgatgataataggttaaggatgggatggggaattttcatttctattatactgaacagcttgagtaatttctgctgcagaggtccagcatctgcacttgagggagtgctatgctacagctggtaagttctgattaggccttctaagacatcttgaatactatcttgttgcccaagtcggatgatgctgttctttcacagtgtagcattcacgtagaacagaatagtaacagctctccttccatcagctctagcccagtgctgcaagctggagctttgagcaataagaactccagccaggtcccttctgaaagaacagccagccatcttcacatccagctatgaccaaatcactgtggtctagcactcagcaagtctccagtccagcacctggtaaaaagcttgcagagagaacaaggacacagcagaggcatctttgctatatcccacagtcttgaaaaactgttaggttattaatgagtggtgagctttggagatttttttaaataatgctctcaggatgaggatcaaacagcattttggtgaaaagagtttataactactgagacctacttatgttcttcagaatatggccatcacttttccttagaattgtctagactgcaattccaattggacagtggaggttttagtggaggagcacatcttgatttttttagtcccagcatagaaatgttgaaaaaaatgctgaaaaaaggtagtattaaagtgcataaggtcagatgtgttcctagttcctgtcacatttaggagatgtgatgaggtcacttcccagttattaaagctctattaggctgcagtgcagaaaatcgcaagtgattttttaaaatttattttagaggtgaggtcttattcttgcctaggctagagtgctgtggcactatcatagctcactgcagcattgaattcctgagctcaagtgatccacctcagccttccaagtagctgggagtacagacatgtaccaccacacctggctaattctgtcatttttttgtagagatgggtcttgctatgttgcccaggttggtctcaaactcctggcttcaagcaatcctgctgtcttgggctcccaaagtgctggaattataggtgtgagccaccatgcccagcccaaaagtgatttttgctgagtttctccccttttattattttattttattttattttatttattttattttattttattttattttattttattttattttattttattttattttattttattttattttattttatttttgagacagagtctcactctgttgcccaggctggagtgcagtggtgtgataacggctcactgcgacctctgcctcccaggttcaagtgattctcctgcctcagtctcccaagtagctgggattacaggcatgcaacaccacgccctgctaatttttttgtattttttagtagagttggggttttgccatgttggccaggctggtctcaaactcctgacctcaggtgatctgcccgtcttggcctcccaaagtgctgggattacaagcgtgaaccactgtgcccggccttctccccctttaattttaaacttatagtgtcccccaacaaactatcagaagaaattcatgggattttgtatcaccaaggcattaagagatgtatacagtcctctcatctgagcctgtaacagccctgtgatgagacaagagagcttggaacaagcattggaatgaggctagcactgccttatctccctgtgtgatcacagggatagtacagcttcatctgtccctttcattcagcaaacatttattgaatgtcttgcaggtgtgatgagtactctaagcattaaaagtaagtacaccaaggccaggcgtggtggctcatgcctgtaatcccaacactttggaaggctgaggcaggcagatcacgaggtcaagagatcgagaccatcctggcccacatggtgaaactccatctctactaaaaatacaaaaattagctgggcgtggtggggcgcacctgtagtcccagctactcggcaggctgaggcaggagaatcacttgaacccaagaggcggaggttgcagtgagccgagatcacgccactgcactccaaccgggtgacaaagcaagactccgtctcaaaaaaataaataagtacaccaggccgggcacagtggctcaagcctgtaatcccagcacttttgggagggtgaggtgggtggattgcttgagttcaggagttcaagaccagcctgaccaacatggtgaaaccctgtctctactaaaagtagaaaaattaggtgggcatgctagcaggtgaggcatgagaatggcttgaatccaggaggcagaggttgcagtgagccaagattacaccattgcactccagcctgggtgacagagtgagactccatctcaaaaaaaaaaaaaagaatatatcatccacctcttcagggaagttacattctaataaaccctatttacacaaaactacatgtaactataggattttaaaatgctgtaaataggcaagtcagctcaggatccaccaagccccccgccccgcccccttccatttttaggaaggaggcaaagaaatgatagggctcagagcaaaacccatgggtcctgggctggtcccatatcgtcttttatcatatgataaagcccctcaacaaatcactgggagatctgagtgaggtttcagtttaaataggcattgccaaaccataatcacaacagcagggactgtggctgcttggtaacccccgtaacccttgtgcctaagacaatgcttgacatatagcaggatgtgaaacttgttcaatagttgaaaggcagatatggaatacttgttttctaggtagtaagagccccagttttgcccagaaacaggaaaacaaatgcctagtttcccttctagctcaaagatgccactgcctctttgttcagagctgtacatatcattgccactattggctaccatgtattaagtgcctattatgtgccaggcagcattttaaaattctgtcattatagttccaggggagaggtgctgcacctttacaaataaagaggttatttgtaaataaaatgcaggccaatggcacaaagtagtgaaggtggaattcactcaggtctgtcacttccagcccatgttttactactttgtaaccctatttggaaagaaaaccgcaactaagattatgacccatcctgacacaaaaagtttcacacatatacaccacacataccgcacaccccygccccccacagtatgatggcacagtgacccaaccttaggcaaaagggtaccactgccaacaaatgcacttaacattttattgagattctcaacagctgccatttggtttgtatagcaaattttttacaaagtaatttttttccattttcgatatttttatgaaaattattttcttcagttttaaagccctgtccctcccccaaagaaggattaataactaccaagtaatgattaggggaaaaaaagcaaaaacagctttataaacacttgtgaaacaggggtaagtgtccgaagtcaagaccttctgggcccagtggaggtgctgggctgctccgggacaccatcaccacttcaccatccacaacatcctcaagagctgagcagccctgcacagaccctggggggcttcctgttccacaagctccactccctttttcctctccatctttgctgttgggcctcccctccaaatctgcctaacaaaggcagcacgatctttaatgcctgtgcagctttgtaagtggagccaggttactctgttttgaaagctgagattccctgtccagtctgggggaggaaaaattatccaatgtagcatggatggtttcactttcttgtccactcagacacatgctcatacttattaaatggatttattggatgcttcaaaagtcctgatgtgtagtagcacaaaagttccttgtaaaaaaagaagttgcaaaattataaaaatttctgcagcagttctggctctggatgacaaagctcattctgattagtagtttttttgacatgcacagcagcttcccctataagtcctacgttcggagggttccgtttagacaacaggaagttggcatccaagtttaaaaggctctctgctgacaaaatgtggtacatccatcaacagaattctactcagcaataaaaggaacaaactaccaagacgttatctgtcatggacaaacctcaaaaacattagctaagtaaaaaagccagacacggctgggcgcagtggtttacgtctgtaatcctagcacttttggaagccgaagcgggcagatcacctgaggtcaggtgttcaagaccaccctggcgaacatggtgaaagcccatctctactaaaatacaaaaattagctgggcatgatggcgggtgcctgtaatcccagctactcgggaggctgagccaggagaatcgcttgaaccacggagatggtggatgcagtgagccgaggtcacaccactgcactgggcagctgagcgagattctgtctaaaaaaaaaaaaaaaaaaccagacacaagaccacatattgtatgatttcattgattcaaagtgtccagaaaatgcaaatttatatagagagaaagtagattgttggttgcctggagctggggtaagaacaggattaactgtgaaagagcatgaaggatcttatcaggagggataaaattgttccaaaactgagtaatagttatggctacatcactgagggaagttactaaaatcactgaattttatacttgaaatgggtgagttttatgatatgtaacacatgcctcattaaagttttttttttttgtttttgttttttggtttgttttgttttgttttaagtgaggcaggaaaatagggtctggaggcagggaacataaggccaattcacacttcagctgcgacaggaaagatcctctccatagggcatagaccaagtaaatgactttgtaactttacttcatcctcccatttacatagggc

SEQ ID NO: 96036 - DNA, 24123 bp, Homo sapiens
  misc_feature (1)...(24123): n = A,T,C or G
gattacagacattccaacttttcgtaagattctggtaggattttttttgtgtgtctccccttctgtctttgaatggagtgagtccatgctgtctccataggagatgagaaggggttggcctttactggcagctacacagaagatggatttttcttcattattatagagtcagtgctgtgaaatccctaatttgggctaacttaggctgagtttactgaagttaaacctcttaagtatgttctgaatacatagccacatgccggagttagtccccatgtgccttaaaggtagttgagaaaacaaaagagccctttaccccttagggcacagaaggggctgcgcttgggctcccagtatccccagctaccagacaattcttgaggtcggggtgcatgctcccctggggttcctgggtttgcacctctatttcctttcctctctccctggagcccacatcccacactgcctctcctcgcttcatgcacatggcgtgtgtttcagtgccatctacatgcagagccacctctctgagactgcttgtttccaaacacaaagtctttggcatctcctaaaatttccttcatgcagcttcccaccgcagccccacctctccgtcagtggaagttcacacctcaccacccccatcccatccatcaccaagctctggcaattttacttcccagctgtcccctgaatccttccgtttccctgccaaatcatttgatgttgattcaggcccctctcagtgctgcagagccctcctaagagaacttctcccacttctcttagccccagacccagcttcccttggttggaggagaaggaagcgcaaacgcggatactgcctgcatggtcctgcgaggaagccccaccctggccctggggccttctgtttgcctgtcactcgctctcgatgctaccttctctcaccagtgctttgggtccttcccagcacagggcccagcatagcccttctcttccacctagcagattccagcacattctttacttttcttttttttttcttgagacggagtctcagttgttgcccaggctagagtgccgtggcatgatgtcagctcactgcaacctcctcctcctgggttcaagagattgttttgcctcagcctcccgagtagctgcgattacaggcacacgccaccacgcccggctaatttttgtatttttagtagagatggggtttcaccatgttagccaggctggtctcgaactcctgacattgtgatccgcctgcctggcttcccagagcactgggattacaggcgtgagcctccgcgtctggcctccagcacattctttagctcttgacttggatgactcttgacctgggaggctgcctcgacacgtggagattggtgtgtcctgttagtttttatgcctcttttcctcatgaaacattagtcatgatgttatttctgtgattatctttttttttttgagacggagtttcgctcttgttacccaggctggagtgtagtggcacgatctctgcttactgcagcctctgcctcccgggttcacgccattctcctgcctcagcctcccgagtagctgggactataggcgcccgccacctcgcacagctgatttattgtctttttagtagagacattttcaccatgttagccaggatggtctcgatctcctgacctcgtgatccacctgcctcagcttcccaaagtgctgggattacaggagtgagccaccatgcccggccctgtttctgtgattatcttacattgtcattgtccccccaggcctgtctttcactgtggcatgcattgtctagggtagatgcttgttagatattttatgacttgctgtctttttcaacaggacaaattgatggccaggagatcactgccaccgccgtgctggccccctggcctaggccaccccccaggagattcagccctcccaggagaatgttgccaccaccgcctatgtggcgcaggtctcccccacggatgaggagaaggtaaacaatttgtagtttcagtggactgatcaggccacaaacctcatgtgaccgcagtgactttcagaccctttattcagccctgcctgccttccactgctgtgcgggctggcagagagcaggagcccttcagagctcatggagagagcaggagggccacagctgcagtaagccacaggcaggagacgccctagagttgcaccaacacagctttctgagtctgggcagtggcgtggtgtggccttcctaggagaccactagacctgtgagcccaggtgcaggcccacctttttctgagctaacaagaagagctaggagagggagaagttgggggtcagaagagttgtggggcgggggtggtaatccctcggcagaggccacagtttggtcttccgttgccggtggtgagctgtgctttcagcctttggggaagaggaggaaagcctgggcttctgccttgggtctcacaagcacccgttcccaagagctcagggcaggcccatcaggtgggacctgtcccaacttctagtattaaaaagtaaaacttctgccaggcatggtggctcaggcctgtaatcactttgggaggctgaggcgggcagatcacgaggttaggagatcgagaccaccctggctaatacagtgaaaccttgtctctactaaaaatacaaaaaaattagccgggcgtggtggtgggtgcctgtagtcccagctactcgggaggctgaggcaggagaatggcgtgaacccgggaggtggagcttgcagtgagccaagatcatgccactgcactccagcctgggcaacagagtgagactccatctcaaaaaaaaaaaaaaaaaaaggtaaaactttgccacgtgtggtagcaatcgcctgtaatcccagcactttgggaggctgaggtgggtggatcacaaggtcaggaggtcgagaccatcctggccaacatggtgaaaccccatccgtacaaaaaatataaaaattaggcctagcatggtggctcacgcctgtaatcccagcactttgggaggccgaggtgggcggaacacgaggtcaggagatcgagaccatcctggctaacacggtgaaaccccgtcactactaaaaaaaacaaaacaaaattagctgtgcgtggtggcgtgtgcctgtagtcccagttactcgggaggctgaggcaggagaatggcatgaacctgggaggccgagattgcgcctctgcactcagcctgggcaacagagtgagaccccatctcaaaataaatatatacacacacaaaaattagctgggcgtggtggcgcgcgcctgtagtcccagttgcatgggaggctgaggcaggagaatcgcttgaaccctggaggcagaggttgcagtgagctgagatcgtgccactgcactctggcctggagacagagtgatattccatctcaaaaagtaaaactatggggaattgcccagaaagaagctagcttgcccctacagcctgagctactctgatgtggtttctcctcttcccgcaggtcccgstccccgaggcgcaggtcccccgtgcgccggagatcacggtccccgggccgccgccgccacaggagccgctccagctccaactcctcccgataaacaggccactgaagctctcgcccctgtaacttataccccacccagctcagttttgtcacttttctagccaaaggaagaccagtaggaaagcaaacccttgactctggcaggatttgcaggcagcaggcagcacccctctgccagccgggccccggctgcagaagtgctgttggtttggatgctgtgtgcctgtcaagattccctccggttttctggctagaaagctcatccgtttccggtttctaagagtcagttcagtggcagagccaccagggaaaagtgaggctcttgggggtggtttgaccctgcttacctgggagcacacttttcccttccccgatgacctgggatggtggccaggccgtgcccttgctgttgctgggcagtgtccttttggaaagggagctgccccaggctttagtgcagctgccaaccctgttaggcctggcctctcgaggcctcttctgacctcaagggtcacaccccctcaaagatcctctcacccatggtagttgctgctcgtggttctgtctgtccgtgcaccgatgcacacaccgcaccccaccactgtactctgaaattggcgagtgagtggagagccagctctgcggrgtcatcacgcagccatggttgtgcctgccgttcatggtggtctttcaggttatcttggcaacatgtacattgcttttattttttttcttttttgctttcattgtacagtcagtactataaaatttctcttttgagttttatacctttgtagcattttagatgacattgtgtttgtactttgttgtgtagagtggaagaattgtgttgaataaacccaagatcggaatgcaaatctagttctgggttcactgccttctcacttgtcccctcgcccctagtaactttctgttcctcaccatccgcagtggcacctccgatgctttcagccaggagaacctagggtttgtgtgctgtggggaccaggttgctcctagggtggacaaatagaaggagatggttttatcgccaccttggaatgtgtgtgtgttttcagacagactctcgctctgtcacccaggctggagtatgtaccatggtgcgatcatagctcattacagcctccaactccttcttcagtgtccagagtagcaggggctaatttttttttaattttttaattttttttttgagacagtctctgttgcctgggttggagtgcagtggcgcaatattggctcactacaacctctgcctcctgggttcaagtgattttcctgcctcagcctcctgagtagctggaattacaggcacctgccaccatgcccagctaattttttgtatttctagtagagacggcgtttcatcatattggcccggctggtctcaaactcctgacctcatgatttgcccaccttggcccccaaagtgctgggattacaggcatgagccaccgcgcccagcagcaggagctaatttttaagaattttttgtagcaacaagttgttgctatgttacccagctggtcctgagtcactggggttacaggtgtgtgtcaccatgccaggcttgcttcctcctccgttaagtggccatttttccacctcaaaaattggtttgggacacaaggaagaattggaaatgcttaagatgagaacaaaagttgagaccacccaacacagctgggaccttactgcccagtgctcccagtggtctgaccaaaaccccacaccagacagtacaaaggcccactcccgagctgccgcttacggcccagcgggaacagactgtattcttatctttcggcatttctctgcaaataaaaaggtgccactgcggtccggcctttgtgcacttgcccttgtgctgagcaaggcgggtggcctgttcttaccgctgggttctgctgcccccacccccatttcggtgactaaacctgcagctctgatcctgttcccaaaggggcaggaggccgggctcaccccaggcagcccctggcctccctgacggccccctcgggaggggttccgtgctttgatcgcctttccagcgccgatactgcagtagctgggcccggccgagagctcgcggtcacgaacaccggcagcctcttgcctacagtgtcccgcgctgcagaagagcctgccctggcgctgagctggtcgtggctgcttcagcagtgggcctgcgcctccttgtaggccagccctggcccagatccaggtgcctgccccggaagcgcgcggctgcccggggtgaagccggagggcggcgagcggctgtttcggccggtaggtggaggcgttgaccagcctctgggaacggggcgggacctagttgggggggctccgccccctccccaggaggcgagctcagcccgcgacctttatcccgcgcgttgcggtcaagatggcgctggtggcttctgtgcgagtcccggcgcgcgttctgctccgcgcgggtgcgaaacccggggtgggcagggatcgggccggggccggggccaggaccgggaactaacgggctcccccacgctgmcttcgcaggggcccggctcccgggcgcggccytcgggcggacggagcgggcggccggcggcggagacggcgcgcggcgcttcgggagccagcgggtgctggtggagccggacgcgggcgcaggtgagcgggcggcgccgagggagggcgggcgtggggtcaggacccgcgggggtccgcgctcgcggggtgctgtcggagaaccacgtctgtcgacgctcggtttgtgtttagaacccaagtttcgaaacagaaccttgccgctctacctgggttcgttcgtcatgagataaaagtttctgtttttaaagttggcggaggccgggcgcggtggctcacgcctgtaatcctagcactttaagaggcagaggcgggcggatcacctgaggtcaggagttcgagatcagcctggccaacatgatgaaaccctatctgtactgaaaaatacaaaagaaaaaaattagctgggcgtggtggtgcgtgcctatgcctgggaggctgaggcagaagaatcgctggaatctgggaggtggaggctgcagtgagccgagattgtgccactgcactccagcttgggccacagagcaagattccgtctcaaaataaataaataaataaaaataaagttggcggggatatgagctgttatctaagttattcaattggaagtggaaaagaattggaatcttttggaataaaattacgtttgttaacactcccatgtggcacagaacctygtacctacccgcccgtcagaacccttggtaaaacccactggaaaggatagaaaaagtacttttggaagagaagcctgtgcgctccctccagacaggaggccgagctgagggcaccgagagggcacgcctaggcgccagcagttctgcttccaggacatgctgacctggacctcccggtgcagcagtccctgctgtggctcctgagaggaggccctccccctccgcaagtaagtcacagcccctgccctccccaaccccccagactcagggctgtgcccaactttgcacagcttcaggactccaggctcctggtgcctctgaacttggttccgtcctctctgtctgggctgagggagctgcctgggctctctctacaaacttgagagggacaaactaagaccaacttcaaactgactttttttttttttttttttttttttggagatgtagtcttgctctccagtcgccagactggagtgcagtggcgcaatctccgatcactgcaacctgtgcctcctgggttcaagcgattctccctcctcagcctcccaaatagctgggattacagggacccaccactatgcccactaatttttgtaaaaactgagtttytgaagggatcatttctgtagcatatttgaatatatctcaacaaaatgcaaaaaaaaaaattattatttttttttttttgagacagaggctccctctgtcacccaggctggcgtgcaatggcgcggttccggctcactgcaatctcagtcaggcctgactttctgactccaaactctactttgtctttttttttttttttttttttttttttttttttgagacggagtcttgctctgtcgccaggctggagtgcagtggcacgatctccgctcaytgcaagctccgcctcccgggttcacaccattcttctacctcagccgcccaagtagctgggactacaggcgcccgccaccacgcccggctaattttttttttttggtatttttagtggagacggggtttcaccatgttagccaggatggtcttgatctcctgacctcgtgatccacccgcctcggcctcccaaagtgctgggattacaggcgtgagccaccgcgcccggcttacgttgtctttttatatggtaaagtggggaggcactcgagtaaaaaaattgtcattgtacgaacacttttccttttttaccggaggtaatgtgtgtgtgtgtgtacataaaaatctttaaaatatgcctcacatttaccattctagccattttgcaatgtacaaccccgtggccgtaagtatattcacaatgtgtagtccacactacccattccaataccttaagataacatgtttttgagtccgggcccggtggctcccacctgtaatcccagcactttgggaggccagggtgcgcggatcacgaggtcaggagattgagaccattctggctaacacggtgaaaccccatctctactaaaaaatacaaaaaaaaattagccgggcgtggtggcgggcacctgtagtcccagctacttgggaggctgaggcaggagaatggtgtgaaccccggaggtggagcttgcagtaagccgagatcgcgccactgcactccagcctgggcaacagagcaagaatctgtctcaaaaataaattaattaattaaataaaataaataaataaataaataggaatgacaaccacatggatgaaccttgaacacatgatactaagtggacaaagccgacaacaaagcccggcggtatcccagtgatatggaatatggctggagcaggaaaaccgcagacacagaacgcagactggcggcttccaggggctaggggtgggatgaggagcaactgctcatggggacagggattccttttgggacaatgaaaaggttctggaactaggcagcggcgatagttgcacaacacagtcagtatactgaattgtgtaagtgcctgacttgtttacttaaaaatggctaatttaggctgggcacagtggctyatacctataatcacatcactttgggaggccgaggcaggaggatcacctgaggtcagaagttcatgaccagcctggccaacctggtgaaaccccgtctctactaaaaatgcaaaaattagccaggcatggtggtgtgtcctgtaatcccagcttctcaggaggctgaggcagaagaatggcttgaacccaggaggcagaggttgcagtgagccgagatagcgctgctgcactccagcctgggcaacagagcgaggctcttgtctcaaaaaaaaaataaagatagaaaatggttaatttggccgggcatggtggctcacacctgtaatcccagcactttgggaggccgaggcgaggtgttcacgargtcaagagatcgagaccatcctggccaaccaacatggtgaaaccccatctctactaaaaatacaaaaattagctgggcatagtggcgcatacctgtagtcccagctactcaggaggctgaggcaggagaatcgcttgaacccgggaggtggacgttgtagtgagctgagatcgcgccactgcactccagcctgggcgacgagcgagactctgtctcagaaaaaaatgatagagagagaaagagagaatggttgatttaaaaagcatgcagtttatatagaataaataaaattgttaatttatgttatatcgatcttacttcaatgtaaaaaaccaagggctcactcctgtaatctagcactttgggagcctgaggcagaaggaccacttaagctcaggagttcaagaccagcctgggcaacaaaataagacctcgtctgtactaaaaaataaaaaagattaactgggtgtggtggcgcttgcctataatcccagctactcagcaggctgagttgggaggatcgctggagcccaggaggtcaaagctgcagtaaccagagatcacacccctgcactcctaggtgatagagtgagaccctgtctcaaaaataataataataaaaaaataacccccaggccgggcgctgtggcttacgcctgtaatcctggcactttgggaggccgaggcgagcggatcacctgaggttgggagttcaagaccagcctgaccagcatggagaaaaccccgtccctactaaaaatacaaaattagctggatgtagcggcacgcacctgtaatcctagctactcgggaggctgaggcagtcgaatcgcttgaacccaagaggcagaggttgcggtgagccragatcgctccattgcacttgaacctgggcaacaagagcaaaactccgtctcaaaaaagtaaataaaaataggaccaggcgcgggggctcacgcctgtaatcccagcactttgggaggccgasgtgggcagatcgcgaggtcaagagatcgagcccatcctggctaacacggtgaaaccctgtctctacttaaaagaaaaaaattatccgggcgtggtggtgggcacctgtagtcccagctactcaggaggctgaggcaggagaatggtgtgaacccggaaggcagagcttgcagtgagctgagatcgcgccactgcactccagcctgggtgacagagcgagactctgtctctaaataaataaattaataaataaaacccccaaaatgcacagctatcatggcttagttgagggtgcaggctggtcaggctgcttttccagtgccaggtgtgagctttctcttctcattctttaaattaggggtcgctgtgatgaaattcaagaaccccccagtgaacagcctgagcctggagtttctgacggagctggtcatcagcctggagaagctggagaatgacaagagcttccgcggtgtcattctgacctcggtaggtgcnagttcagctccctaccccagcccgagttcttggcctgagttctctgatgtgagcccaggcctgttgcacatggaagaggcagagcctgccaacgtgtggcacaggccagccggcagccccaccaccctggactccaggcgccttcacrggaggcttccaggagcaccgtctgggtgtgcccyagcagggacccaaactgccatgggcctcaagcagatcattcccaaaggtgaaggtggaccagtctcagagacagccttcccaggagacagctttcccaagagacgcccttcccgggagacagccttcccaagaggcagccctcctgggagaccgccttcctgggagacagccttccctgcccgggccgtcgtccaggcggacactggggagagctgtgggcagcgagtgagggagagccatgcatctatggggtcaccttggaccctaagcacacctggtggtgggttcctggagtgctccccactaggatcacttgggtgccctgagccagtcctgcgaacaatacccatgctctctgatcctctgtgggccagtcttcagggcgagttctcaagggtgaacctctttggtctgagttcttgtgcaggggactctaaatgttgcctgagtgctggcgaacgctaggcgtgtcatctgtgggaacggtgtcattaccaacatcgccgaggggcagtaagcagtgtcaggcccaggaggatgggacccttgaggagaagcgggcattggctgaggtgaggggagtgaggggtcctcggaggctggcgtggctttacagggcctggcctagaactcctgacctcaagtgatctgcccacctcggcctcccaaagtgctggccacgtccagccttatatatttattgagacagaatctccctctcttgcccaggctggagtacagtgacgtgatcttggcttactacaacctccgcctcctgggttcaagcgattcttgaatcttgaaaatttttaaaatttttgggagagacagtgcctttattgcccacgttggtcttgaactcctgggctcaagcactcctcccacctcggctccccagtgtgctaggattacaggtgcgagccattgcacctggttaatttttttgcttaatttttacttttttgtacaggcggggtcttgctatgttgcccaggctggtcttgaactcctggcctcaagcagttctccaatcttggcctcccaaagctctgggattacaggcatgagccaccacgccaggcctgggttttgagtaacggaagtagaacgcgttttgtagaaacaaaggaccggcctacccattctgtgcggcaccagctcacacctgtttgggaacagcggagctgcgttgcccacccgcaccgttcctggctttttcacatcgcctgaggatgtggaggccatcccatctgtcccagccgcctcctcctcgcacacattaggtggctgtcgccctccttcctgcagacagggcggggtaaacatccacccagctctgcttgtgtgagtcagggtgagctgggttcagctgcaggaacaagttcacccacagccttggggggtctggccctcgggaggaaaacgtgccgtgttgtgcagaggggaaggtacccttgtcatttgctcagggggctgtgaccatgcagggtccccagggtgggttctccactcctccccgagcccgcctccctggccggyagccctgactgggagtctgaggctcctgtgctggcgcccgctactccagccgtrggagggtcccttccacctgtgctcacccctcgcccttccttggtagctgctgagaaacccacacattccagatcattctcccaccctagcacttcctggtccacacgggggtccctggcttgcttggccctttgcgggtaaatgattcagaacgtgcagctcctctggattctcaggagtcttcmccacacctctgggttcttctgcccgagccaggcgtgcagagccagagggccggcgcacttatgtccctgagaggtgcctggcgctgcctgtcctctcctatccagtttgaagcgggaaagggaagaatgttctgggaagtacagggaagccaggtccaggagaagccttggccgagtccctggagcgcctagtcctggctctgtggggcagcacccacaccctgagcgtgacctggccctgctgtgcgtcgtgcacctgggctccccagccctcctgctgtgatgccagctgggaggtggactctgatgggyatgtggccccggctccccctgcaggaccgcccgggtgtcttctcggccggcctggacctgacggagatgtgtgggaggagccccgcccactacgctgggtactggaaggccgttcaggagctgtggctgcggttgtaccagtccaacctggtgctggtctccgccatcaacgtgagtgtccccactcccaggtggcctcgctggctgttctsggccagcgccrgggggtgggacagacactgtcctgcccttggaatctctcacaggggaaggggacggttggagaggccctgagatgtgcacaggtgagcgccatcgcagaccacggggcgtgttgagaaaggtgggcctcgggtgagggccctggcctgggtcaatcagacaagacccagaaaagagccagtgggtagggaccagggcctggggttgatgccagcctgggtggaggctgtgtgggtgagtgggtgatcggacccacattttggaaacatcactccatcccttctgggggaaggccagggaagccgagaacaacacgggggcttaacctcaggaaccagggtgtcctgcggggtggctgtgacaagccgggtgtgggccggagcctggtggaggggagggctggtgtgagaggaagcctcaagggtgcacggccatgcagacaggatgggtcctgcgcggggcagtgggtacctgcagtgaccacagggtgagtgtggggttcccaggacatcctggttgcgctagctgctggggtggtatcggggcccccttggggcatgacagttatgactaaatgcttgtgtggcattttagcattgagtaaaagcactgagaggacaagcgacttgctcccctaactgaatggtttttaaaagtgatttatctgttgccgaagaactaatgaccctcggctgaggacgagcctcagaccctccttgccgagcgctaaggggccagttccttcctcatccatttcccagtgcacacccagcccagcccagaccattgtgggtgttgaaccctgcgggggtcggggtgcgccaagggcacaggccctccttccttggacctggccctctggaatgtggttgggaccagcagcacctaagagccctgtccggcctctccctgcagggagcctgccccgctggaggctgcctggtggccctgacctgtgactaccgcatcctggcggacaaccccaggtactgcataggactcaatgagacccagctgggcatcatcgcccctttctggtaaggccctgggctgcagccangctccatgcttgttgtggagggaacagacccgcctggggccatgtggtgagtgggtgtctgcatttccaggttgaaagacaccctggagaacaccatcgggcaccgggcggcggagcgtgccctgcagctggggctgctcttcccgccggcggaggccctgcaggtgggcatagtggaccaggtggtcccggaggagcaggtgcagagcactgcgctgtcagcgatagcccagtggatggccattccaggtgaggcacggggcatggcgggcgcccgatgatgctggggagaccagaaggttctccacccaaaggttttctgtggacatcgtgacttcgggagactgttgataatcacagccatgtgggtgtcaggaggctgctgtaacaacgcagcacagaccgggtggcccagaccgcagaagctcatctcacggtgctggagaccagaggkgcaaaatcaaagtgtgggcaggactgcacttcctccctgcgttccagggaggctccttcctgccccgcccacttctgctggctccaggcctccctgggcttgtgggcgcctcgctctaatctctgcctccatccttacgcagctttctcccctgtgtttctgtgggtctcaggtctctctctcccttctcaggacacctgccatgtgatttaggacctaccttaaatccaagatgatcccaacttaattacatctgcagagactctttccaaataaggtcacacttccaagttccagagcagtggttagggcttggacctatcttttggggcacacttttcaacctactacaaagacaattgtccacttcatagaaaaagagctggtcatatcagcgatggtatagaccagggcccagcaaattctgtctctaaagggccaggtggcttgtgggctctgtaggtaagacctttgtagcagaaagcagccacagaggagacgtaaactgacaggtatagctgtgttccggcaaagctttayggacagtgrgccaggtgcggtggctcacgcctgtaatctcagcactttgggaggctgaggcaggcagatcacttgagatcaggagttcaagaccagcctggccaacatggtgaaaccccatctctactaaaaatacagaaatgggccaggcgcggtggctcacacctgtaatcccaacattttaagaggccgaggcgggcggatcacraggtcaggagatcaagaccatcctggctaacacggtgaaaccctgtctctactaaaaatacaaaaattagccaggtgtggcggcgggcgcctgtagtcccagctactcgagaggctgaggcaggaggatggcgtgaacccgggaggcggagcttgcagtgagctgagatcgcaccactgtactctagcctgagcaacagagagcaggactctgtctcaaaaaaaaaaaaaaaaatgagccgggcgtgatggcacgtgcctgtaattccagctactgggaggttgaggcaggagaatcgcttgaacttgggaggcagaggttgcagtgagccaagatcatgccattgtaccccagcctgggtgacagagtgagactctgtctcaaaaacaacaaaaaaaattttatggacactgaaatttgagtttcacataattttcacatgtcacaaaatactaaccttcttttgattttcaactattcaaaaatgtaaaaaccagcccggcacagtggctgaagcctgtaatcccagcactttgagaggccaaggtgggcggatcacctgaggtcaggagttttagaccagcctggccaacatggcaaaaccccgtctctactaaaaatacaaaaattagccgggtgtgggggcaggtacctgtaatcccagctacttgggaaggctgaggccggagaatcacttgaacctgggaggcggaggttgcagtgagccaagatcatgctactgygctccagccaggacgacagagtgagactcctctcaaaaaaagtaaaaactattcatagcttcagggccttgagaagccagatttgccaaccctgatacaaatgactgaaggctgtgctgccatttcctrtgctgtaagacagtatttaatatagtgccatggaaatttttttatttttattttatttatttattttttttgagatggagtctccctcttgctcaggctggagtgcagtggtgcgatctcagctcactgcaacctccacctcctgggttcgtgccattctcctgcctcagcctcctgcgtcgtggaaatattcttcataatatagttgagtgaaaatgacacgttaagtcgctgggcgcggtggctcacacctgcaatcccggcactttgggaggccaaggagggtggatcacctgaggtcaggagttcgagatcagcctgaccaacatggtgaaaccccttctctactaaaaatacaaaaattagccgggcatggtaatgctcctgtaatcccagctactcaggaggctgaggcaggagaagtgcttgaacttgggaggcggaggttgcagtgagccaaggtcacgccactgtagtccagcctgggtggcagagacagactccatctcaaaaataaataaataaataatacaaaattagccaggatgtgtgtgcacgcctgtagtcccagctactcaggaggctgaggtgagaggatcacctgagcccagggattcaaggctgcagtgagtcrtgatcactagtgcactccagtatgggcgacagagaatatcctgtctctttaaaaacaaaacaaaacaaaaaaaaattagggccgggcgtgstggctcatgcctggaatcccagcacttggggaggccgagatgggtggatcacctgaggtcaggagttcgggaccagcctggccaacatgaggaaatcccatctctactaaaaatacaaaattagccgggtgtggtggcacacggttgtaatcccagctactcaagaggctgaggcaggagaatcacttgaactcgggaggcggaggttgcagtgagccaagatcccaccattgcactccagcctgggcgacagagcaagactccgtctcaaaaaawaaaaataaaaaataagttgggaatcaccccactgcccctgaaagtgggatttcagtggcacgtcccattctctttagaccatgctcgacagctgaccaaggccatgatgcgaaaggccacggcyagccgcctggtcacgcagcgcgatgcggacgtgcagaacttcgtcagcttcatctccaaagactccatccagaagtccctgcagatgtacttagagaggctcaaagaagaaaaaggctaacgattgggctgccasaggcttacggccacacgtgcccctgtgggtcccagggaggtcttaaacaaggtatttttcaacttaaaagtactgccagcgtttcattttgctgatgttacgtagaagttcctgttcctcatagcccagtggcccaaggcccagccacacacaaacacacatgggtgcctgtgcccgtcaggcaaggggagttggagggcagccttttgacttgggattgtgactggcaggggatgccattctggacctggtgaggttgccacggagtgtctctgttcccaaggcagaatcgtaagtcaagtccctggtcatccattctggcctttggactgcctgctcttaggtgtaaggccaggtggtcttggcccccatgacccacacagaactccccagggaaaagccctttggtcactgcccttactcatcaggatgaagagcgcacagtgaatcagagcaactgggggatcctgagccagcgggagtgggactctggaggcagctgtgctgccagggatccaaatgtcccttaagaaggattttgcaagaaccaaactcatccaaacccttgaaacaaaggtttttcctcccatgcgattcagaccaagttaccacatcttgctaagatgtgatgtttcaaaaaccagaaacctcatcgggccccagtcagtgacccagtggacccgtgggcctgccttttccctatcctaatgtgtccttgcccaggcacagggcagcagccttgaagggctgagccacggcgagctgggcggttctttgcacgggaccttagtcccaagccacctgcctgggcagggaggagtccagcccgcccactgctctcaggctctccaaaagctccagggctgctgactagctggggctggcctccccttgcagtgctgggtaagaccgggctcttgagacagacaagtgcctgggggcccctgcagggccctggaatgggggctgcggggtgggcctggggagagctgttctgagagccccgagggcccaggaggctggtgtgttggcgccatccctgtcccagctgtgctcacagtacaggctcctgggagcgtttgtagtttccacagaggatgagcaaggagcatccctgagctgccttctggggccagcaggctccgggggcagccacgtcccaccaggacatggggtgggcagcccaggccatggctgcccctaaggagctgaggctgggtcctaaggaaggacagaggcctgggagccaagctgtggggcccgaccgggagcagctcatttattgagcagacatctgccgggcagtgccccctgcacccctcatggggctcacaacaccccatgaggtcgctggatgcagcccgtcccacagatggggaacggaggtacagagcagcacatcacgtgtccatggcccctggtccacgcccagccgactctgccttggggcctcactgaagggtggctgccaccctgaaggggccactgttgggccattcctcagagccagggtctgcaggtggcatgccccagccaggcctcgagtcatcggtggaacttgagggtcacctccactggaaagtggtcgctgatggcaagagcctgtggggacagagtgagcctcaggggaaaagtgcaccccacccacagggatgggaggggccggtgaggcctgggtgcccacccctgctgctgcctgcggtggggcaggggcaggggccggggcagagggtgtcaccattggccctttgagggaaaggcaaggtaccctgcctgcccagagctccacatggggtgggccgggctctccagggtccttggaaacgagccctggtgcagggaggaagctgaggtggccctgccttgggcgctggaccctccctgctgcctgcgtgcgcccgggcggtggggacccaagaccagcaccgccccacggcccactcgcctgagtctggtccaggccgaattcctcctggaagtcgtgcacggtggccgactggggcttcaggctccggcgcaggcgggcgccacaggccacaatgcggtcgtaggcgcagtctgagttgcccaccgtggtgtcggcgctgtcagggatgagccacttgaagacctcactgctcctcagacggatggcggcccagtcctgcgcccgcacatagctgcagtcggcgttgaagtcgcccaggaacagcatgtcctgcgggcgccgcggagccgtgtctgagccgccgcaggagccgtcgaggtcccgccctcatgaaccagacccccggggcgcgcctgcagggaccccgggaccgaggggtgggcttacgkcggtgccccacttgtcgatcacgtccaggtacacgtcgtagagcgcgtcgatctccgccacggcttgatgcggcgccgcgtgcagcgggatcagcaccaggttctgtgctgctgcgggaaggggtgggggcgtcagagctcggcgggaggggaggggcggggcccgctcaccggtgccgggggccgagaacttgaccacgaagggctcgcggctgaagacgtcctcggggtctgggtacaggtaggtgtccacgaccgacaccgcgtctttcctaggagatggggaggacccgctgagcccccgacctgcggccccgcgcgcccctccctgcggcccgcccctcacctgtacacgaacaggtacatctccttgtactggtcccggcccaggggctggctgctcacaaagctgtactcgtgctcggacacgctgyggagacaggggcccgctcagggtcggggcgccgcgccggggcgagatcccggcggggggtcgcgacgaggggccctgcccaccacacctgttgatctgctccatgagcgcggacacggcgctgaggtctgggtctcgcacctcctgcaccagcgcgaggtcatagccagccaggatctggggaggagcggcgggtgcgggggtcagcgcggtcagcacccctaaacgccgccccgccccggcccgggccccaccttcgcgatgatgctgccgcaagcggggtccgacactttgctgtcaccgaagctctgaatgttgaaggctccgatgcgaagcgcggcggtcccggcggcttccagcgcccagagtgcggccagcagagcccggggcccgcccatggcgcggagcgagaggctgggagggacagacgctgccgcctacgcagacccgctgtcagacccaccgacccaccccttccctccgcggccgccccttgacggccagtgcgacgcggaatccgcccctgcgttctgcaggctcccagggcactgctgggctctcagggaccgctgccttctcactgcgcgggaagctgcagccggaatggagggtccggcccatccagccccagctcagggcarccgagagactcaccttggatgtgggtgcagaggcccgaggctcagagatcctagggggatggggatcccgggtccaggctgcgggcgtgtccgacacaggactgcactgactccctctggcagtagctctggcaccaaggcaggggccggtatttgaggtcctgggccagggaggggccgggctgcactgggtcccgccccctcgactcagctgggtgcctgatgaactcctggctttcattcccatggagacccccagggtaaggggtgggagacctgcctgagccggttctggtgccccagacctgtcccaaaaccgtcccagaagcccctgccagccccctaggagggaggtagacggtcagccacatcccggtgcggctgtgttcttgtcctcgcccctagaaattaggtcgcctagactctgcctccctgagcagaatcccttcagggaaagcaaggcagcgcaggtaggaccagccacactccctacccagcatctcctgctgctgctccacctgctcaccctgcggtggaggccgaggctcccagatctccctgtccccgtccctggtcctcccacccacccacaggcctcaggcagcgcagctgggggcacagctccagctgggcagggcaggaggctgttggtcaacatgccaatgacacccacacagcaccaaggcgccgccagggctggcagaagcccctgggtggggcggccaggcacgtgagtctaggagtggcctgggaggcaggtgctgctgcgggggcctgggcaaaggtggtggcaccagccgcggaggctgccactgccacaacatcacaagctgcaggttctcatgttttattgtaaagcaacaagaaactcttatgtacactgtccgtcttggggcgcctccatcctgtgccatcttctctaccaggccaggcaggcatgggtggggcgctcagagtcctctgccctgtccctgcccggccaggaccccgcagacctcatgctagacgatgaccgtctgcacctccagctggccctccggcgaggcgatgaccagctcgcctgcatgctccaggatctcgatgtcctctgwtgacaccatggtcacagtggcctgttcagtgccacttgtccctgcccgggcggcaagcacagtgccctcgctgatggccgaggccagcgtcatggccacctgctctgtcaggctctcgggggtggcratggtgatggtgtcggcggcagccgcctctgggcccagcgccgtctcctcgtccatggtgacgttctgcacgatgatctggtggccggcgctagcstggtgcacgatctgctgcaccaccttcatgatgtggctgtccacctgcagggccacggctcagcaagagcggctgtgccagggagcctccccgcccccgcctgccctacccctcacctctgtctgggtgccctcgatgatctccgtggcctcactggtctccgcatcgtccgcagtggcctgggcagatgggcagaaggacagaggtcagccttggctgcccctgggtcccagcacggccccagggccccacacccacctcgatgatatactcctgggtgtcagctaccacggacgagaactccaccaacactgtgtgcgggtcttccgtgaggacggtggtggctgccgcggggctgtcctcagacaccagcaactcctccacctccagcaggcagccccctgtgggtggggactcggtcagggctaggcaagccccggccccctcccctccccctcccacctccaccggcccagacctttggtgcgcaggtgcckgttcagcgtgccgtgctcggcgaagccacggccgcacttgtagcacttgaacggcttctcgcctgtgtggtgtcgcacgtgccgcaccagtgagcccttctctcggaagccacggctgcagaactggcacacgtgcggcttctcctccaggtgtgtcctgaagtgcacctgctgtgcgttctgtggagacacctgtcagtgccagcctggccttggccacaacagactacagctctcccctcccgcctgtggcccaagggaggggctgggtcaagactgagcatggtggaggcagggaagggggtgcacctgggccacggccagggagcaggatggggggatcaggcgccagggtcctgcggccagagacccaccttagtcttgtagcgcttgccacacttgggacaagggtagggccgctcgtctgagtggacgcgccggtggccacgcacatgggcaatggtcttgtagagcttcccgcagtcgccacagcggaagcggcgctcacgcacgtgcacctcctggtgcttcttgagcaggtaggccttggggaaggccttgccacactgcgcgcaggcgaacggcctcggccctgcagccacacacagcatcaggccaagcccatcacccgcgggcccgccaggccgcctgccacctgcccacagatcccctggctccctgctgtctatggacccaccctggacacccagaagcaccccggccacctatagcccatccactgccatgggccacacacccacccatcacctaccggtgtggcccctcttgtgggcctccagggtggctgctgtcgggaaggtctcactgcactgaggacatgggtgggtcctgggcaccgctgaggcctcgctggccacctgctggggaaccacaggaaggtctccagcacccggggcaggctgtgccctggcagtaccaagaacacaaccatgggccccaccctggcaggctcccttgtggccccagggaaggcagtaaacagatcaatggacaaagtcactgcagaaagccacttcagggaggcgaaggccagcgtggggacagcccctgggatccagccctgggaggagcccrcaggtggtgctggcacctactgtctccagcggctgcacttccagtaccggcagctgcggggctgccactgccaggggctggggactggacccggcagcaggagctggctccagggcaccctcctccccagcagcgcgctcaaggacgatgccggagttctgcatggcctggtgcagcaggttctcacggctgccctcgcs

SEQ ID NO: 96037 - DNA, 13619 bp, Homo sapiens
cacccaggctggagtgcattggtgtgatcctagcagcctccacctccaggctcaggtaaggtgatcggcagtcaggttggggtaacaatgggcccgctttctgcaagtaggttgctcaccactgcaaggttttgagcagagggaatgatggtgggtgttgcagaaacatccctctaactgctgcacagaaaaagggactttaggccgggcccagtgactcacgcctgtaatcccaacactttgggaggctgaggcgggcagatcacctgaggtcaggagttcaagacagcctgaccaatatggtgaaagcccgtctctagtaaaaatacaaaaattagccgggtgtggtgacggctgcctgtagtcccagctactcgggaggctgagacaggagaatggcctgaacccgggaagcggaggttgcagtgagccgagatctcgccactgcactccagcctgggtgacagatcgagactctgtctcaaaaaaaaaaaaaaaaaggggattttagggcctaagcagaagcaggaaggggctcagaaagccactgagagccagaatgggtggtctctgagtggggcaaacagaacgaagagcaggttggagcttttggagcttgagggttctggggagctgctggggaggaggaccaggagacaggtgggtgaggtgaagccatggaggaggtgagtgcagagccccaaaagacctccattcatggtgtgctgaggagtaactgagaagccggtatccaggggatttaggggtatggatgggatgattgtcccctctaaactcatgctgaaactttatccccaatgtaacagcattaagaggtgaggccttcagccgccccatccgggagggaggtgggggggtcagcccccygcccagccagccgccccgtccgggaggtgaggggcgcctctgcccggccacccctactgggaagtgaggaacccctctgcccggccaccaccccgtctgggaggtgtgcccaacagctcattgagaacgggccaggatgacaatggcggctttgtagaataggaaggcgggaaaggtggggaaaagattgagaaatcggatggttgccgtgtctgtgtagaaagaggtagacatgggagacttttcattttgttctgtactaagaaaaattcttctgccttgggatcctgttgatctgtgaccttayccccaaccctgtgctctctgaaacatgtgctgtgtccactcagggttgaatggattaagggcggtgcaagatgtgctttgttaaacagatgcttgaaggcagcatgctccttaagagtcatcaccactccctaatctcaagtacccagggacacaaacactgcggaaggctgcagggtcctctgcctaggaaaaccagagacctttgttcacttgtttatctgctgaccttccctccactattgtcctatgaccctgccaaatccccctctgtgagaaacacccaagaatgatcaataaaaataaaaataaaaataaaaataaaaataaaaaaagaggtgaggcctttaagaggcaaagggggccgggagcggtggctcacgcctgtaatcccagcactctgggaggccgaggcagacggatcatctgaggtcagaagtttgagaccagcctggccaacacagcagaaacccccatctctattaaaaatacaaaagttgggccgggcacggtggctcatgcctgtaatcccagcactttgggaggccgaggcggggggattaaaaggtcaggagttcaagaccatcctgaccaacatggtgaaaccccgtctctactaaaaatacaaaaattagccaggcctggtggcatgtgcctgtaatcccagctactcaggaggctgaggcaggagaatcgcttgaacctaggaggtggaggttgcagtgagtcgagatcatgccattgcactccagcctgggcaacagagcgagactctgtctcaaaaaaaaaaaaaaaaaaaaaaaaagttgccgggcgcggtggctcacgcctgtaatcccagcactttgggaggccaaggagggcggatcacgaggtcagggtattgagaccatcctggctaacatggtgaaaccctgtctctactaaaaaaaaaaaaaaaaaatcagccgggtgtggtggcacacgcctgtagtcccagctactcgggagggcgagacaggagaatcgcttcaacccggaggcggaggttgcagtgagccgagatcgcgccactgcactccagcttgggcaacagagcgagactcggtctcaaaacgaacaaaaaaaaaatacaaaagttagccaggtgtggtggcacacacctataatcccagctactagggaggctgaggcaggagaattgcttgaacctggtggggcggaggttgcagtcagctgagatggcaccactgcccgccagcctgggtaacaaagtgagaccgtatctcaaaaagaaaagggcatcctgatcaggtgacctcagrccctgctttgcccagagcccaggccactggcaagcatgggagtggatagacccttggaaggcagagaggccaggcacaggcagcaagactagaccctccctttctccaaacggcctcctttcccatgcaggcctcagcctggctcaacagaataatgcctgtggacattccacagccagacccaaacaggaactacaaaatcctttttttttttttttttgagatcgagtctcactctgtcacccaggctggagtgcagtggtgcaaccttggctcactgcaacctccgcctcctgggttcaagcaattctgcctcagcctcccaagcgtgtgctaccacgcccggctaattttgtatttttagtagagatggggtttctccatgttagtaaggctggtctctaactcctgacctcaggttatctgccctcctcggcctcccaaagtgctgggattacaggcgtgagccactgcgcctagcgggctacttatattttctattgcaatgtaaattgatgcaactctgttaaggtgaaatagtgtctgttctcgtgccactgaaagccatccccaggtcggcttgcagtacaagatccttacttggggagacactggggccatcccctcacagatagagactgaatgcctcctgtgtggggggcacccaaaggggtcctctagccccagatgcagggccacatcaccctgttcccaaagtcagtcctctcctataaagcgcactttcctcccagcctccgccaggaccttccccacaagtgaccatgcctcccctcctacctgcacacatacaggcatattctgaggacgttaagccgaccagatggggcagagctcagctttggggttgactgagtttaatcccaactcaaccttgtccagccggcgactctcggtggctcagtttggccatctataaatggagatgtgaataatccctgcctctcaggcctgtcctgtgactctgaggaggtaatgcagggaaggagcggtgcagcggcctaggtgctcacagagtgcccaggaagccaaggcagccgggcaagtgtgggagaagatggcccatggctgggtatcatcaacagttcccattccagccgttgtctcaaatcaactacctgttgctctgtggtaaaagcagagtgtgattcttgtcaaatccagttctgctcaaagtcaaagtcatcttttttttttttttttttttttttgataggagtcttgctctgttgcccaggctggagtgcagtggtgcaatctcggctcactgcagcctccgcctcccaggttcaagcgattctcctgcctcatcctctcaagtagctaagattacaggcatgtgccaccacatacggctaatttttgtacttttggcagagatggggtttcaccatattggccaggctggtctccaacttctgacctcaggtgatctgcccgcctcggcctcccaaagggctgggatcataggtgtgagccacagcacccagccaggatgaatttcacaaacattatgttaaaccgtagaagcaagagccagaagcacataccgtataatcccaagtataaagcagtccggaggcttggttgtgactctatggtgataggagtcagaaaagtagtcagcaatgtgctatctgctattgactggataggaacaagagggaacttcctggggtgttggaaatactttatactttggtctgggttatgtttacacaagcatatacatatgtaaaaaaatctgctgggtgcggcagctcacgcctgtaatcctagccctttgggaggccaagacaggaggatcactggaggccaggagttggagaccagcctggccaacatagtgggactccgtctctacaaaaaatttaaattaaaaaaaaaattaggcgtagtggcacacacctctggtcccaaatactttggaggcttaggtaggagcatcacatgagcctaggaggtcaaggatacagtgagctgtgataaggctacagtgagctgtgatctagccactccactccagcctgggggacagagcaagaccctgtcgcaaaatatatatatacatgtaaaaatgtaaaacttccggccgggcgccatggctcacgcctgtaatcccagcactttgggagaccaaggtgggcggatcacgagatcaagagatcaagaccatcctggctaacacggtgaaaccccgtctctactaaaaaatacaaaaaaattagccaggcgtggtggccggcgcctgtagtcccagctactcaggaggctgaggcagaagaatggcgtgaacccgggaggcggagcttgcagtgagccgagatcgcgccactgcactccagcctgggcaacagagcaagagactccgtctcaaaaaataataattaaaaaaataaaaggccgggcgcggtggctcacgcctgtaatccaagcactttgggaggccgaggcgggcggatcacgaggtcaggagatcgagaccatcctggctaacacggagaaaccccgtctctactaaaaatacaaaaaattagccgggcgtggtgccatgcgcctgtagtcccagctactcgggaggctgaggcaggagaatggcgtgaacccgggaggcggagcttgcagtgagccgagatggcgccaccgcactccagcctgggcgacagagcgagactccgtctcaaaaagtaaataaataagtaaataaaataataataaatgtaaaacttccatcgagctgcacggttttcatgccctttactgtaatgttttgcctcaattaaatacctaataattgatgacgatgacggcgagcaatcactgagtaccaggttctagacagtgtccttagaccctaatcccccagcctggtaatggctggttcgtgttacctccaaggaaccgggaacgcgtttttgcaaaggactgaggcgcgtactcacgcctgccggggaaggagccccgggctggctcgcgggactggccggtaagcgacccacgtggtggccccgtgtcccgagcgcgtccacggcacagaggcacgggcacggccgacgaaggtgccccggccccctcccgcggcgctcctgcgagagccccgcccatgcccgcgggagagaccggccaatggacagccggcctggcccgggtcactccgtgaagggcctcgtcacctaggctgaccactcgcttccaatgggtgagcggcccgcggcagcccgggaacagcggccttgcgcctgcgctgctctcccctctggcgcatttccgcagcgagcgcttcactccgaatgccggttggagccctgccagccaatcaccggggcgtcccaaggccggtagccaatgatcgcccctctccccgcgccgggcctcaccgattggcgctgagctcccgcagcccgcgggaggcgggggcggattggcgaaggtgcaggccaatgggcggcgggcgcgaggcgctgggccaatgagcgcsccgggggcggggagggcgccgcggcgggcggctgcgaggagcggccggcgggcggcggcggccggcgggcggcgatggcggcggcggaggccggtggcgacgacgcccgctgcgtgcggctgagcgccgagcgggcacaggcgctgctggccgacgtggacacgctgctgttcgactgcgacggcgtgctgtggcgcggggagaccgccgtgcctggcgcgcccgaggccctgcgggcgctgcgagcccgcggcaagcgcctgggcttcatcaccaacaacagcagcaagacccgcgctgcctacgccgagaagctgcggcgcctgggcttcggcggccccgcggggcccggcgccagcctggaggtcttcggcacggcctactgcaccgcgctctacctgcgccagcgcctggccggcgcccccgcgcccaaggcctacgtgctgggcagcccagccctggccgcggagctggaggccgtgggcgtcgccagcgtgggcgtggggcccgagccactgcagggcgagggtcccggcgactggctgcacgcgccgctggagcccgacgtgcgcgcggtggtggtgggctttgacccgcacttcagctacatgaagctcaccaaggccctgcgctacctgcagcagcccggctgcctgctcgtgggcaccaacatggacaaccggcttccgcttgagaacggccgcttcatcgcgggtccgtgcgccctggggcgggaggctggggggcgggcggcgggccccctccctgccctttgacccggtcccctgtgccccgcaggtaccgggtgtctggtccgagccgtggagatggccgcccagcgccaggccgacatcatcgggaagcccagccgcttcattttcgactgcgtgtcccaggaatacggcatcaaccccgagcgcaccgtcatggtgggagaccgcctggacacagacatcctcctaggcgccacctgtggcctgaagaccatcctgaccctcaccggagtctccactctaggggatgtgaagaataatcaggaaagtgactgcgtgtctaagaagaaaatggtccctgacttctatgttgacagcatagccgaccttttgcctgcccttcaaggttaaagattgagtgtctttaatctgcagaataaaaaaaaagaaattgaaaaccagttacccaaattaataggtggggcttaagcatctgctcggctaagtggcttcaaagagtgtaattggagttaagcaaaggcattcattgttaaccttgtaagtacacgtttgggggacgattttgtttacagatgcttgtaatcgaagatgcacttttaggcytggaaggcrttgtgggctgggttctgggccttgggtggggttggcaggggcaggctctgcacctgtccgggattcaggtaaccagggcctgccgatgggactgaggcgggtctaggggtgtgtgtcctgtattttattgaaaaactcattcagggatccagcccctcagggggcagagggactgattattctgactgttgggagaggcttgcatggaccagagccccatcagtatgactgaaagtccagcggagccttctgtgtccctgtgcctcccagcagggtgggagtggaggaggcggctgctcccaggtggcatctccctgcccttgggtgcaaagtgctgccctcaccactctcccacctcccttacttccttgaaaaccactctgatgtcacaactgagtgtctgttccgtttcagatacccagggctgctgcccagttctgtaaacgcagcccagctaaagctctgctgtctcaagtgtgcatttatacccaggtgatttggacggagcagctaccatggcgtggacgccttcactgaactccgggctgcagtgcagggagctcagagcagtgctgctaccaaacagtttttaactttgaacaactgtgtcaggcaatggatttgaattttaagtgtattaatagctgtgctctgtgtcgtaggcaaaattccactgaaggagcctctgtgccctgcagccggcagcgcggctgaagcatgtgttggccaaggaatgcctgtcatccaggtgccctgcagccagcagcgcggctcaagcatgtgttggccaaggaatgcctgtcagtcatccagggctctgggaggggacgagagttatgtccccaagaacaggaagtcctttacaaagcatccagtctcttcctgtcctccccttccctaggctggggtaggggttagagactggtggcccaggaggtcacctgccttgccctggattccctcttcagtggccagcaggacttggcagggccaccagctcgccaaggttctgggcggggctccagcctctcctgcctgctccttggctctgctgacctttcacaggcctgacagcagactcagcagggccatcccgggatgctgcaccttctggctggctccctaccagcgcctttccctgtacctggcagcttctctcttggccccacagtcacagcactccacttggtcacaaagacttcagagcaataagaggcgtcctgagccttcagcacctcccaggcctgggatatcgggttcagagggtgctgcagagcagcatgagggtggctccacccatgaggctggtgacactgacgctggcttggctaagttggctcaagccgggtctggcctgacagggtgcagtcacaccaggagcgcatggcagatgcagcctcagtgatgcctctcttgccgggtaggggctgggagtccccgtgcaccctgtctctggcccatgaggggctgcagcactgtgggcgccagagcacagattaaactctcaaacccacactggctcaggtgtccttgctctcaccttgcattggcccgggtgatgccgtctcaccacgggtgggaggactcaaagtagatgggtaactggggttccaactccagagctggaatgccaactgcccactcccagcctggttcagaggaagatgttttgaagaatgagggaaagccaggcacaaagggaagccagggaagcaaagggccctggagtgaagctggtgggctgccgtgtcagagcgcccagggcagggagcagagctcagaagtaatgctggcccrggcgcagtggctcacacccgtaatcccaacactttggaaggctgaggcaggtggatcacttgagatcaggagttcaagaccagcctggccaaaatggtgaaaacccatctctactaaaaatacaaaaattagcgggacttggtggcatgtatctgtaatcccagctactagggaggctgaggcatgagaattgtgtgaacccgggaggcagaggttgcagtgagctgagatcacgccactgaactccagcctgggggacacagcgagactccgtctcaaaaaaaaaaaagttgggctaggcgggcccccgaggctggcctgactgtcccaggggcacaggctccagcaggctgcctgtctgtggtccaggcttcaggaaccccctggtcttgggtgtgcgggggctgggaagtggctgggggtgcacagtcccacacctgtcattcactgaacaggcacgtattgacagcttgtggcgtgtcaggccctgtgcccaactctgggagtcaaggataacctgacagactcaggccactttaggaaaacgaaatccaccccaaccacacttagcgagtcaccctggccgggcctgggctgccctccagtcggtcagccggactggatttccacgcggccgagccctacgcctcccagaccctgagctccagtctgcacaggccaggtgtctggagccgggcctggtgacaggcatcccccaggtgggaggaggggctgtcctggctctgacctggatatcagatccagagctgagggggaggcgcagggtcaggaggggaggggttctgttctgagtttcccctggccaaggctgcagacaagggacgcagacaatcggcacattgtgagcaggggctgcaggatggaaccagcaagctgctgtgctgagcgccccaaacctgggcctacaggggtgagtgcctcccgttactcctgcagcaaggacccagggggtgccccaggccacccagcccctcccttccccagcccacttgctccctgatgtctaaccctcatgacccttctgaccctgatgcacgcccaggtgaagaccaagccctcctgcgggggctggagagccgtgrgcctgctcctgctgctgctgctgctggtgctggccgctgtggggrttgtggctggagggcttcttggctctgctcagggccctcccaaggtgagcccctcctcagcaccagggacatggacagtggaaagggagaagggaagctggcatatcccagcctccagcagagcaagggtgcggagcaggcagtgacaccacctaggagcagacagccagaggaccaaggggtggaagggcccactcaggggtgtcaggagtcctgcagcccagagctggaggctgtgctggggttgcacagctgcccggctgaactccaactcccactgccagccaaggctgcagacgctgcgaatgaccctcccgagcccccacatgccccggcccaaccaaaccatcctggtggacgtggcccggaacgcggcgaccatcacagtgaccccacctcagagcaaccacagctgggcggtgctgttcgacgggcagagcgtgagtgggcagggaggggtcaccctggcaggtgtcggtctggggggccccgcctcacccccctgcctccccagggctgcatctgttaccgccctgaggagcaccaggtctgcttcctccgcctgatggaggacagtgatcgggagaccctgcggctgctggtggatacctccaaggtgagccgtcctgctgggcgcaggcccgggccaggggctagacaaagggtcctgtgtgcagcccagtacgggacaggctggagctstggtttcagggaacaggaagctctctccgccctaagcccaggctgctgacaagagctgagggtggggacatcactgggggttggagggtacccggccctgccaagccaggagcagggagcagccctgtcccaccgcccaccagagccttctcaacaggtccaagaggcttgggtccccagccaggacacccaccacacccaggagctgctggcagtgcaggggagcctcgaagtggaccccgcccaggcgggggctttggtgcagcgcctgtgcatgaggacccccatctactgggcccggcgagcagagggtgagtcaggaccgctgtgggggaaggccaggccctcgggatggtttgaggagctgggggcggagcccttggagattcacggcaccctcgccacagggccccggagacagcggctgatttatctctgcatcgacatctgcttcccgagcaacatctgcgtstcggtctgcttttattacctcccagactgagcccccgacctggcccagcctggcccgtccccaatccagtgggctggccaggccacctgcaccagggaggacagctgctggcagggactaataaacccttccacctggccatggtggtggtgttctctatggaccgaggccctgaaacgcgggcagggaggggcagaraacrcactagcttgggggtgggcaccagcctcagacccctcagcagctttgggccctcggccgactttcccaggcagtgcaggctagcccagtccaggagtgtgcagcctggcttgggtcgagctctgtcacatctggataagcaactgggggctgagagtcccagggcagcctggcccagcaggtcaaggcgccacagggggccatcaggtccagctggcgcaggccggcaggggagggtctgctctgacctgggtgctgcatgggtccctccagctgccaccacctgcaccaggcagtcccgaggggtcacaggctagcccagcacactgtcattgaaggccaggcagacaacagccttctggtggccgccatactctctcttgatctctccagtctccacacaccagagccgggccaggttgtcygaggaagctggagrgggagattgtgcagggctaagagcgcaggtgcaggccaagcaggcggccccagcagaggggaagctgcagccgaggtgggctggctctggaggccagcgccgggggccagggatgggggaggccagggyggggctcaccagtgacgatgtactgggagtcccccgagaaggcgcagccccacatccagccgcgggaggactccccggggttgccgctcttgatgctcagctccgtcatcagggagaagttggacgtcctccagatcttgcacgtctgatcagccgagcaggtggcgaggagcctagtgggtgggcatggggcgtgtccagcagcagccactccatccagcagcccctcccctctccagcccccagcccaggcaggtcccctcccgggccagcaggccctgcacgcacgtggagtcggggctgaagcgacactgcagggcgtagcgcgtgtgggcagggatcttagtcttggggatgagctgggtcacctcgtcaccaatgccccccgtcagattccagacatagcagtttccctagaggtcaggaggaccgtcacggagggcccaaggcctcaggtctgagacacagggaaggatgccctgggggccaacactgggggccaactgtgcatggggaccccgggtgaggggcaggcaggcccctctggtcctgcctgcagaaggcacctgggaagcctggccccaascaagggccacacctggcaagccaagaacaggaggccacgcctggccaaggactcaaattctccttcctggaggatgccgatggccaacggaagtagacaggagaagggcaccagctagagagacagcatgacaaaggccagcagaagggaaatccgggggcaagaggtacaagtgatgcactgggattaaatgaagttaatgaaaaaaaatgaggctggagagaagagcaggggccacgccacagcagcctacgggcgaggccagcagccccgggtctcctcaggggaatgacgccacctggctgatactgaccaggcaccactagaagcatccaagagagaacgtgtcaggggccaggggaggtcagggagggggaaaggaagcctcagagagtgtgtcagccgtcaccagaaacaagggtgactgggaccaggaggcaacagagtgaaaagagggaagtggatcgacttgggagagactccagaaagcggagtgaccgacctgcagacaggactaagccatcgggagcgacactaaggcttctggctttgctggcaaggtgggtgttagtgcccgggatggggaaagcaggagggggccgctaagggacatccaggaataagcccacctgcagaggctgagggctgagtgccaagctgcccgcacccagcacctgccaccaggactcacggtgctattgacagctgccatgtagctggcgtcgggatcgatgtgggcggacgtgatggagacctcgggctcagggatcagctgctcgttgtggtctgttttcaagtcccagar

SEQ ID NO: 96038 - DNA, 21984 bp, Homo sapiens
ctatgagtcatgcactataatcatccccattttacagataagaaagcaaagacttggagaggaaaagcgtcttgttcaaaggtaaatacttaatggccaagccaacatgcaaatctagatttaattgcagcttcctcttcatctaccattcgaactaattcaagctatgtaatatttcccactgaaccttcttgcctctacttcctcatctttaacatggtcaaaatacctgtcctgcccaagttagttatttcattaaagtagaaaaatacaagagaagcttttaaaatgtgaaaacctcaaaatgaatgtaaaaattatgatgattcctttagaatttgtcaacaccttctttttctctactcctgctaggcatttaccatctcaaaaccatgtatttaagatgcaaaactatatttgtatttgccataactggtttctttccctatggcttcatgaaaatgtggctcgaatgtgtttattatgaaagccccaaattaatcacgacaagacttcaccagcccattccacaatagactcccattactttgccctgacttagaaacctcatatacagtcttgattcagtacagctctgtgatgctcttggaaaatgcaaagtgctttcttaattgaggcaatctgtgtcccactacagagaggtggtttaacttgtgaattcaggaaagcaactggtttgactcaattttttggccatgttctcagttcattttatttaaagcaatcaaactgatgtgtgtgttctatgttcattgaaccatagtgggtttacataagctcatagttttagttgttctttttacattctactcctctggtttgagcttctatgttttgtatatttccattcatggggttgagatatttgattcaggctttatattttctgaggcccggaataagtatttcttccacactttaggaagtgtggtcctcttcactactctaygtaaacaagaggaaactaacaggttgtggtgggattagaatttagtttattattagaactcagtttattttgccaggttttctggcaactttacctcttttctttgtcagggcacttacgctttctcctgacgcagtggaaactccacagggccagggctcagggctttcttgctcacattgtctccactgctgactcagagcctggcatgtagtagaggtacagcatgtgtgtgtgtgtgtgtgtgtgtgacacagacagagagagacagagagagtgagacacagagagagacagagaaacaagagagacacacagagagaaagatggtgagacagagacatagagaaagagaataaataaaactttaccagccgaaaaaaagagaagagaaaagcaggcaaaggacgtgccattgagctagcattcattcaataactgatgcaccaggcgctgtgctaaaaacacatccagttgtcataaaatccattcactcatcaggaaatcttttagtatttccttacagtctattaatagttttgacagctgtaacaagcatatgaatttccacctgttggattaaaagcagcacatttgggctgtgataagtaccatttgtggacacatgacagcagcaagaagtgacatcctgagaaggaaaaacataaactacgtataataagaaaaatgaataaatatgaatatttaagactctgcttttctgggtgtgtatgtttcctgtgcttttgttgtatagaagaggggttgtaagtgtgggagtaaaaatattagggtaaaggaaatctagataaacactgaccaatctacatttgaaaggagcttgtgatgttctgagagggggtgaggagggttgtgaatatatttcacagttttttttttttttgacagttgttatttagtttttatttagctttatatagttttatttcataatcataaacttaactctgcaatccagctaggtatggaagggaatagggaatatataacacccaaaggagctgtagcaagagcacaaagattataggataacgtgagcaaatggggtggaggggtgctctcacaaggtctgtggttaggataaaacacaagtcaaatttattagagttgtgcacagtcagcaatggtgatcttgctggttttgcccttcctggacccaaagctctccatggccttcacaatactcatgacttctttcaccttgccaaagaccacatgcttgccatccagctactcagccttggcagtgcagatgaaaaactggaaaccgtttgtgttgggttcagcatttgccatgaacaacacaggacctgcatgcttcaggatgtagttcttgtcatcaaatttctccctgtagatggacttaccaccagtgccattatggcatgtgaagtcaccaccttgacacataaaccctggaataattctgtaaaaacaggaacccttatacccaaatcctttctctccagtgctcagagcatgaaagttttctgctgtctttggaactctgtctgcaaacagctcaaaaaaggcatgacccaagatgttagataatacagtggagttgaccatggctgatagcagggggctccgggtgtcatcagcatctgcaaagccatgtatttaccatttttggaagccttttaatttcaaaatgattttagattcacaggaagttgctaagattgtactgagaggttcccccataccctttccctttaaaaaaaaaaaaaaaaaaaaaaaaaagttggtgtctgtctatgtggcccaggctagagtgctaagacacagggcaccaagtccctaggctgcacacagcagggggaccctgggcctggcccaagaaactatacattcctcctgggaatctggggctgtgatgggaggggttgccatgaagacttctgacatgccctggagacattttccccatggtcttggggattaacattcagctccttgttacttatgcaaatttctgcagctggcttgaatttctcctcagaaaatgagattttcttttctatcgcattgtcaggctgcaaattttccaaacttttgtgctctgcttcccttataaaactgaaggcctggccaggtgtggtggctcacgcctgtaatcccagcactttggggagctgagacgggcgaatcacgaggtcaggagttcgagaccagcctggccaacatggtgaaaccctgtctctactaaaaatacaaaaagttagctgggcatagtcatgggtgcctttaatcccagctacttgggagactgaggcaggagaatcgtttgaatccaggaggcggaggttgcagtgagtcgagatcacaccactgcactccagccctggtaacagagtaagactctgtctcaaaaaaaaaaaaaaaaacaaaaaaaactgaatgcctttaacaacacccaagttgcttcttgaatgctttgctgcttagaaatttcttctgccagataccctaaatcatctctcttaggttccaagttccacaaatctctagggcagggacaaaacgctgccagtctctttactaaaacataacaagagtcacccttgctctagttcccaaaaagttcctcatctccatctgaaaccacccccgcctagatttcgttgtccatatcattatcagcattttggtcaaagtcattcaacaggcctctagggagttccaaacttgctcacattctcctgtcttcttctgagccctccaaactgttccaatccctacctgttacccagttccaaagtcgcttccacatttttggttatcttttcagccgtgccccactctactggtaccagtttactgtattagtcgattttcatgctgctgataaagacatacctgaaactggacaatttacaaaagaaagaggtttattggacttacaattctacatcacttgggaggcctcacaatcatgatggaaggagaaaggcacatctcacatggcagcagacaagaaaagagcttgtgcagggaaactcctctttttaaaaccatcagatctcatgaaatttattcattatcatgacaatagcacaggaaagaactgcacccataattcagtcacctcctaccaggttcctcccacaacacgtgagaattcaagatgagatttggatggggacacagccaaaccatgtcacactaccatgcctgacttcctttccatttttgtatatttgcttgttcttcatttgcccgagaagtaactctaaagggctgtattatttggatattagattggcattttatctgactgggatatcttgctgtgattgtccatgtataagatcagcttttctataaaccatatttttaaaaagatatattaattttttaaaaatccacctgtctaaataaatgcacaaagccccccaaaaacctagattctaagaaaaatctatgtactgccatacaatgattgatattaatatttatggtgataaattacacacaaaaaatgtgtgatctctgtttaaacaggcaaaaacaaaaaacacatgaaataaatctatggcatctatagccaaaactggaaacaacccacatatccatcaataggaaatcagttaaataaattatagtacatttatccaatggaagattaagcacatattcaatataattatttatacacacatatagatacacacatgtataaatatagagaatactgtgggtgtatgtgtgtgtgtgtttatatacatatatatacacacacagtactgttgcctaccttcttttgtcttaattctgtgaactctcattcactctgcttcagtaggatacatccttctttttggttcttagactcaccaagttgatccttgactcaagacattgcatttgctgcttcctcttcctggaatatccttccttctgatattcacatgagtagtctcttcttgtcattcagatctcaaatgtcacaatttcagagagcccatctctgatcatcatatctaaagttgtcctcattcccccatagctttctataccatgttttatttttttcataacatgtattttattactcctttctccattggaatagaatctccattagattaggaaatctgcctatcttattaatgcctgcaactggaatacttttgaagagttcttggcacgtaataaatactcaactaatatttttgtgtacacagaaataaagtttggaagaacagatgccaaattgttactagtggttacttctgagtaaaggagtagcatggtaggtaaattattaatagatgttcactttccaccaagatatgttttagttagtcttaacttacttgaaatgaaatttattactttaataattagaaacattgataaacattttagtcacaagaatgatagataaaattttgatgcttccaataagttatatttatctagaggatgcacttatgtagaatactctcttgaggatgttaggtgagtaacatgttactatatgtagtaaaatatctatgattttataaaagcactgaaacatgaagcagcagaaatgtttttcccagttctctttcctctgaacttgatcaccgtctctctggcaaagcacctaaattaattcttctttaaaagttaacaagaccaaattataagcttgatgaataactcattcttatctttctttaaatgattatagtttatgtatttattagctatgcccatcttaaacaggtttatttgttctttttacacataccaaactcttaatattagctgttgtccccaggtccgaatgttaagtcaacatatatttgagagamcttcaacttatcaagtattgcaggtctctgattgctttggaaccacttctgatacctgtggacttagttcaaggccagttactaccacttttttttttctaatagaatgaacaaatggctaattgtttgctttgtcaaccaagctcaagttaatggatctggatactatgtatataaaaagcctagcttgagtctcttttcagtggcatccttccctttctaatcagagattttcttcctcagagattttggcctagatttgcaaaatgatgaccacatctttgatttgggggattgctatagcagcatgctgttgtctatggcttattcttggaattaggagaaggtaagtaatgttttatctttaaattgctctttgattcatccatttaatttttttaccttcatttttatacagtaaatttggttttctatacttacacatattagcattatcttccttattttttaaatgaaaaatttgatttgaatttttaaagtaatatcttttttactatatctcacaagacatatgacagcttccctttttagtattggcatataccgatggtaatatataaatgtatattggtgttaaacataactgacagaaattgtataaggtctctatgtacatttatatgtgtatctaaagaggaagcccagattagtaaggatacaagtagcaagtgggaatctacaatggaaaggattgctttctctcacatggcttcaatagatactcttgttaaataaatgttctcttttaagctcattcttgtgcatcgcatagactcagcctaagcctgaacaagagcatagagcctgagctgatcattctattactgtttttaaatmaatgttaatcaactgtggtgaattgggaaagtttgctgagtgtatgtgacatcgatttcatttatttacaactggttcaagaatgcaagaaaaayaaatacagtcagatccagaaccatagtttatttaacttctaattggctcaaggagtaattgtggggaggcatatagatattctctgctatgtcaatctcaaaaagagaaaataaccctaaccatctttcagctttgtagattgctatgtgttttctgccttttgcagtttctttcaggcctgatagtttttacttttaattaaactacttatcttcaaactaagaaaagaaaggtaattactttatactgtattattctatcaagaggtacagaagtttatgttggaaaataagtttacatgttctaataaaaacattttaaaggagcactgaattacaatagatgattccgtcagtgtttatcttactcaatttcattttataataagctgatttctcacatgagattcttcttctctgaaaccatccttatagaatataatatagatatctttaaactaggaatattttcaaaacctcagttctgaaatcctcccttattcagtgatctgtgtctttaaagaaaataatcaaaagaaacattttgagatatttagaaaaatgatgcttagcaaagtgataaacactagaatgtagttttgtttccgcactgacaacaagaatcttgttggtcttgtaaatccttttgcctgtatcactgggaaaagtgatgagcacatagtagacgggtgcttgttgaatgtgtatatggacggatgcatgaatggatggatttagtaatcctttccaccaacatatcatgttactaggttaatataacctattactgtagtaaaagagcagggcccatccaacaaaagaaatatctataaactayagggtttcaaagtttgaagtcagtgggaaaaattttaaaacctgatgtaagtaaaaacccaaaactgtaatcatccatgtctatcatacayttgtgtctgacaggcaaacgggtgaaccacctctagagaatggattaattccatacctgggctgtgctctgcaatttggtgccaatcctcttgagttcctcagagcaaatcaaaggaaacatggtcatgtttttacctgcaaactaatgggaaaataygtccatttcatcacaaatcccttgtcatacmataaggtgttgtgccacggaaaatattttgattggaaaaaatttcactttgctacttctgcgaaggtaagcagttttacatttatataccattctgtytgtcttctacctttttatgtgcttgtctatttagaaattttgatgtacttagattttatgataaaggtgttgaagagagttatccttatgtggagattcttagaaacataaataaattatacrtagcttcttagtaataatcrtttagaaagtcaaaataggtatagatttgtcatttgttgacgagctaatgagggtgaaatacagattaaatgctctactgagacaggtggcactgtacgaataagatagataaaaattcatcacatcagcaatgtctatgcaagaatgcaagtgacggaaacctaacattcarcagttgtctcaccacacttgtgccacacagtgtttcattttgataaggaattggcaagatattttaacatcatttagatgtaataaaagaagatctgttactgagaaaaaaaaccaataactacttacttactgcaaataaatattagctttggtctttgtgactaagtagcttaaagtttggttaaaatacatctacagctggacacaatggaacacacctgtagtccctgctatttgagaggctgaggcaggaggatcgcttgagtccaggagtttgaggctgcagtgagctatcattgtgtcactgcactccagcctgggtgacaatgtgagaccccatctctaaaagaaaaagaaaaagaaatctacaaataatataaaagataactaatgattttaaaacattatcaattagtttrtgtgcaatagctgtaaataagtgcagtagcataagaaataagacatagatgacttgagtgatccaggggagtgccactgaagttggctttaaaggaaaggtacagtttggtcatttatttgtaaagtgctatgaacttgtacaagggaaagccaatttcccgtgtttaccaagtaaggaactatgaaagtatytaatccgtttttcagtcatttactatgactaggtcaggtttaacttctttttctgcatgttttayttgctatcaggcatttgggcacagaagcattgacccgatggatggaaataccactgaaaacataaacgacactttcatcaaaaccctgcagggccatgccttgaattccctcacggaaagcatgatggaaaacctccaacgtatcatgagacctccagtctcctctaactcaaagaccgctgcctgggtgacagaagggatgtattctttctgctaccgagtgatgtttgaagctgggtatttaactatctttggcagagatcttacaaggcgggacacacagaaagcacatattctaaacaatcttgacaacttcaagcaattcgacaaagtctttccagccctggtagcaggcctccccattcacatgttcaggactgcgcacaatgcccgggagaaactggcagagagcttgaggcacgagaacctccaaaagagggaaagcatctcagaactgatcagcctgcgcatgtttctcaatgacactttgtccacctttgatgatctggagaaggccaagacacacctcgtggtcctctgggcatcgcaagcaaacaccattccagcgactttctggagtttatttcaaatgattaggtgactaacgccatatccatttcttttttttattttagtagaaagtagaaattaaaccactttaactttaagaaaaaaagcctcgtagtactttatcatgccgtcaatcaagaacgtagcactaatgcatgttagtgtttaacatatatgagttcattcagtccgcagaaaaacataggcagctatggctggtaaaagtgttttatagaaacaaagacagtcccagagaaagagatgtcaccccaagccacggagcttgtatgtgctggtgttgggtcaattcaggctgcctggcccagagcccttgctcttaaccccatactgttcttcacgacgccaactccactccataaatgcagttttcataatcattaaatgtatttaagtgattactgatttatggacaacaatcagggcggtgactatgccttacttatttgttcattcacagtttgttttcactcagttaggaattgctgttcttctgtttatttgaccaactatgagagctatgaatcaatcataatctattattattgataagagacttagctaggttgtgctttttaaaactgtatgtaacagaaaaaaactgtaataacatatgttttacataacatgatttctctccaaagtgttaatcttttgggaatttgaaattagaatggtctattgaattattccaattaaattagatatttagtatcatgtagacacaaaattgctcctccataggattgggaatgccaaatttctattgatggctgatgactttaggtcttataaaatattttaaaacttaatttcagatgtgagaacttattactaatttgtcacaaatgttgactatcttccaaagttattacttgaaaaagcacatccagaataaattcacatatttacagcaggcatacgcatcaatttaacatcataaaggaaattgtagccatattttatgatagtcttacaaatacttatcaaacattttgagactcaacttactgtaattttgttatgtagctccctagacatgtttaatccttgttagaaacacttatttataaaagccctgaccaggccgggcgcaatggctcacgcctgtaatcccagaactttgggaggccgaggcgggcggatcacaaggtcaggagatcgagaccatcctggctaacacggtgaaaccccgtctctactaaaaaacatacaaaaaattagctgggcgtggtggcgggcgcctgtagtcccagctactcgggaggctgaggcaggagaatggcgtgaacccgggaggcggagcttgcggtgagccaagattgcgcccctgcactccagcctgggcgacagagcaagactccgtctcaaaataaataaataaataaataaataaaaataaaataaaagccctcaccaaagtttaacttttatgtagcaaagtcccattttttaattattattattattttttttttcgagacagagtcttgctctgtcaccaaggctggaatgcagtggcacgatcatggctcactgcaacctccacctcccgggctcaagcaattctcctgcctcagcctcccgagtagctgggattacaggatcccactgccatgcctggctgatttttgtatttttagtagagacagggtttcgccatgttggtcaggctggtctcaaactcctgacctcatgatccgcccgcctcggcctcccaaagtgctgggattacaggcgtgtgccaccacggccggccgcaaggtcattttaaggcaacaattcttactaatatccaaggacataaacccaattacaaatggagtaaatgcaaacaggaatatccctttccctcctcccctggtatcttcaccatctagttaaaagaagggggaaaggcctatttgtttgcagatctcaaagtatggaaaaagtttattttctgtacatacatgttttctcttaccttttaataggaacccagaagcaatgaaagcagctactgaagaagtgaaaagaacattagagaatgctggtcaaaaagtcagcttggaaggcaatcctatttgtttgagtcaagcagaactgaatgacctgccagtattaggtgggtatacttgttatgttgagtttcattttctatgtcctactactttaacaataatgaccaacataaattatatacttrccgaattctaggcattaaactaaatatttcatatgagttttctcggttaatcctcacaactgtcctgtgacttgggactgttactatttatttgtaccargtgaggaaactgacacctagaggttaagctgcagccagggtagaatcaaatacatcattatgtggcatcctattctctcaactaccaccctgcactgccacacyatgtttctcatattcctcttaccactaatctgatggttaatggaagcatattagtcattttcataaaataaaggagggaaaagaaccattaagaaaccacagttacctgcatggattgagtgatggatttgaaagtgctttgatttttctttgttctgcttttctatattttatggaactataacaatatgatatttttatttttatttatttatttatttttgacaaagtcttgttctgttgcccaggctggagtgcaatggygcgatcttggcttactgcaacctctgcctcctgggttcaagccattctcctgcctcagcctcccaagtagctaggattacaggtgcacgccaccacccctggctaatttttgtatttttagtagagacggggtttcaccatgttgtccagactggtctcgaactcctgacctcaagtgatcygcccgcctcggcctcccaaagtgctgggattacaggcatgagccaccgcacccggccaacaatatgatatgtttatagtaataaagttttctttttttggttattttctttaaggaggcaagaagcttaggttccatgctggggctgacttgggagactttggacatgtcagtactcttttgggggccttacttttcttatctgtaaaataaaatgctaacattctggaattttatacacaatcatgtgatgagcaccctaaaacatgacagttaaaggatacggctaaaaggtcaggctggacctctcgcgagctctctatatttcagccattttcaggttggttctttttgtccctttatgcctttaccgggcagcggtgatcgccacgcarcatcagatagtatatggataaaaataggttcttgtaaatgttgaactgaagctgcattaaacacctagaaaaaacatatgtatgtgtcagtgctatcagtatattcaatctcagaagtcctcagtatattaaatctcagaagtgataaactttgaataatttctataaaaatgtattactgatttttccagttttattacattactcttctataaaatgatggaattttgtttcccaattatgaccaagatgattatctcttaatcaaaagattattattaactcaggatcagatttaaagatacattcaggccaggcacggtgactcacacctgtaatcaaagcacttttggaggctgagatgggcacattgcttaagcctaggagctcaagagcaacctgggcawcatagcaaaaccctgtctctgcaaacaataaaaagaagaaaattagctgggtatggtggcacatgcctatagtcgcagctactcgagaggttgaggtgggaggatcagttcagcctgggaggttgaggctgcagtgagccaggatcatgccactgcactgcagcatgggcaacagaatgagaccctggctaaaaagaaaaacaaaaataaaaaaattcagacacagttgaatcattgataacagcatagtggtaacagaaagaaagtttgggaaatttttatctgatcagcttcccataccctgttcatctttgtgttatgcactgccaggctgtctgtagttcagactctatatcatatgaccttcaaacacttggtttgttcttctcttccttcctcccttccttctttcattttttatctttttttcttttaaaatgtttagatagtataatcaaggaatcgctgaggctttccagtgcctccctcaacatccggacagctaaggaggatttcactttgcaccttgaggacggttcctacaacatccgaaaagatgacatcatagctctttacccacagttaatgcacttagatccagaaatctacccagaccctttggtaagtgcctgcccattgaaattcaatatccaggtgatagctacctagatctaaataaagaggaaatttacaatggtagaattgmttttatcattgtagtcacaggaattgtctgcttaattgtgttaaatattcatatattttggaaaatttagatagtggtctgaatttttcattttagtcctgatatttgccatcacacagtctttgctagattatatttgcagtcatgataataaacctgccactttttttttcttaaaaagcacctcctcccaaatccaggaaattggaggctaatatattgattattctagtttcttctgggaacccttctctctctagctctgcctgactaaggaactaatcgttcaagcaggataggaggtatcacaaggcttccttagctcattaagctcctgttccttattactttctgattcaatgtggagtatttgctaaatcactaayggggtagaattaaaaagaaaattactctttggagcttccaggtttagaaagagataaatttctttaaaactagcttaaaggcggttttctttgtrtttttattgcagacttttaaatatgataggtatcttgatgaaaacgggaagacaaagactaccttctattgtaatggactcaagttaaagtattactacatgccctttggatcgggagctacaatatgtcctggaagattgttcgctatccacgaaatcaagcaatttttgattctgatgctttcttattttgaattggagcttatagagggccaagctaaatgtccacctttggaccagtcccgggcaggcttgggcattttgccgccattgaatgatattgaatttaaatataaattcaagcatttgtgaatacatggctggaataagaggacactagatgatattacaggactgcagaacaccctcaccacacagtccctttggacaaatgcatttagtggtggtagaaatgattcaccaggtccaatgttgttcaccagtgcttgcttgtgaatcttaacattttggtgacagtttccagatgctatcacagactctgctagtgaaaagaactagtttctaggagcacaataatttgttttcatttgtataagtccatgaatgttcatatagccagggattgaagtttattattttcaaaggaaaacacctttattttattttttttcaaaatgaagatacacattacagccaggtgtggtagcaggcacctgtagtcttagctactcgagaggccaaagaaggaggatggcttgagcccaggagttcaagaccagcctggacagcttagtgagatcccgtctccgaagaaaagatatgtattctaattggcagattgttttttcctaaggaaactgctttatttttataaaactgcctgacaattatgaaaaaatgttcaaattcacgttctagtgaaactgcattatttgttgactagatggtggggttcttcgggtgtgatcatatatcataaaggatatttcaaatgattatgattagttatgtcttttaataaaaaggaaatatttttcaacttcttctatatccaaaattcagggctttaaacatgattatcttgatttcccaaaaacactaaaggtggttttattttcccttcatgttttaacttattgttgctgaaaactctatgtccggctttaactatcttctctatatttttatttcattcacattaatgagaagagttttctcagagattaaaaaaggtagtttttctgtcattgttaaatacacattatcactgaaaaaatgtagcttttatgtgatatgttttaaagttaaaactggatggaaatagccatttggaagctttggttatgaaacatgtggagtgtattaagtgcagcttgacattatgttttatttaaatgctttttatcgctaaatgacttgcagatgaaaaaaactaaggtgactcgagtgtttaaatgctgtgtacaacaatgctttgataaaatattttaagtatgagttatcagctctatgtcaattgatatttctgtgtagtatttatatttaaattatatttacctttttgcttattttacaaatattaagaaaatattctaacatttgataattttgaaatgattcatctttcagaaataaaagtatgaatctatgtgtatttatttatttatttatttatttatttagagaaagagtctcaccctctcgccaaggctggagtgcagtggtgcgatctcggctcactgtaactgccacctcctgagttcaagtgattctcatgcctcagcctaccgagtagctgggactacaggcacgtgycaccatgcctagctaattttcatatccttagtagagacggggtttcaccatgttgggcaggctggtctcaaactcctgacctggggtgatctgcccgcctcggcctcccaaagtgctgtgattacagacacgggccaccacacctggccgaatctatgtgttttaaattttgaattattcagagtgtttaaaacattcacccactgataagctaaacaacaacaattttattcaggattcattcaaaatactcatatattcaaatattgcaaaaatattcaatgtaataatttactcaaaaatctccctcatactacataaaatttattacaagttttcatcttgctatttaatattaccatagatttatcccttaagtaggttatcttttatattaagaaaattaaagtcatttagatgtggttcaagattaacaaacatctattttatagtgaacagtgataaactaaatttccaatgtggtttcctaatagattttatgactttttaaatgcatcccacatttttccatgtctttgttcttgtagagcaagggttggcaactgatggcacatggaccaaagggttcccgcctctgtttttgtatagcctgaaagttgagaatggtttttacgttttttaatggttagataaaaaaatcaaaagaataagaatcttttatgacatgtgagaagtatgtgaaatttggacttccacacccatcagtcaagttttattaggacgcagcatgcccattgtttgcattcttgtctgcgcctgctgttgtgatgccactgtggagctgagcagttgcaacagagaccatgtggccacaattcctgatatatttaaagtctagttctttacagaaaatgtttgccaatccctattgtatagcaatcccaaaggctattttgtactgtaattttattaactttaaagaatgtatacatgcattggtatatgaagtattttgtcttttttgaaaaaagcatgcgaggagaatacatttaaaaagccatggatggccaggcacagtggctcatgcctgtaatctcaacactttgggaggccaaggcaggcagatcacctgaggtcgatagttctagaccagcctgaccaacacggagaaaccccatctctactaaaaatacaaaaaaaaaaaaaaaaaaaaattagccaggcatggtggcacatgcctgtaatcccagctacttgggaggctgaggcaggagaatggcttgaacccaggagatggaggtcgcagtgagccgagatcacgccattgtactccagcctgggcaacaaaagcaaaactctgactcaaaataaataaataaataaataaagctatagatataattttatcttagacaacattaagttagaactttattggagatgaaaccattccatttagaaagatatttttattttcaaaagcacctaaaagacattacaacctattataagatcaaatagacctaggaggagagattttcatggttaaatctattcagattcccatgggccagggccaggtcactactccacatgccatgcaccatcccatcatatcctcaagagtcctttgagatttgtgttactattacctctatattacagaagagaaaggcagaactccagaaaggttaagtcactggctcaaggtcacaatgctgacaggtgaaagagctgggagtattggaatccaggttgctccaactccacagccagcactcttccctttgtggcaagtccaggtgacaggctgtcttgactcaggtcattgaaaagatacgccacagtaaacaaaatccatgatgacacttctgtccctaaatcctcactgtttgggaggatcacttggtcagagggtggggcactgcagctgccaggcctaggaaggtcaggaaggaggctgacgactctagctgagagcccgtgaagagccacagtataatcaaatacaacattatgctgtgctcaccttcaggtaggacagtgtctcttcatctcaccaacaccttggagttaattgtgtaatctcatattgtttctcttaggctccgtgttatacatttttgaggcaatgggcttaaggttttagccttggttttatgagtggattatggaatacagcttctcatcagcatcatctccacactgccttggttgataccaacgcagaggctcgggcctgtgaagtgaggtcaagacagcagcacggatgcttcacagacgattcacagctatttaaagttctctagtctaagccctcattttagttagaaactgatatttggtgaaacagaggtgatttttgtttaaagggttgcatagcaagttataagacaggccccaatctagaaacctcctatckgcacatgaaatgctgtatccactgaactaaactaatgcatatgttaggacctaccttccaaatacaggcataggtttcatagactccacaaagtccatttcttcatcaataaacctacatatgaaaaaaaatgaacaaataaaattaattaattaaaaataaaaatactggctgggtgtggtggctcacacctgtaatcccagcactctgggaggccaaagcatgtggatcacctgaggtcaggagttcgagaccagcctggccaacatggggaaaccccatctctactaaaaatacaaatattagccaggcgtggtggctcatgcctgtgattccagccactccagaggctgaggcaggagaatttcttgaatctgggaggcagaggttgcagtgagccgagattgtgccactcactccaacctgggtgacaaagcaagcccttgtctcaaaaaaaagtaaaaagtaaaaaataaaaatattcataaactttggatgactatatgaaaactccccatttttattgaaaaaaatgtgcacccacaatctttggtagccttaactccattttgaagaaccatttctcattgacagttatccaaccataggtggcaaagttaattagaatatagattcaacgcttaacagttctggagcaagtcctcatggattaaatcaatgacagtttcaagaattataagtacttgtttgagagaattcatgagagaagtgaggggtgacaggaggagggctgatcaccttcccatttgctattttgcagaatttcaatccatgaaaaacagttaaagaatacattgaatacccatgactttcacctagattcatcctaatactttgccacacttgcctttactcagaaagatggcttgaaaagtaatttcatttaaggctttcatatttaatttcctttcaagtttccaatttgaggttttatttctggctcctataattctttggagaagagcaaggaatggggggatcaggagggagctgatggggtattgattatcttcttcgccactatcaccaacaagacatcaaaatggaaccttttttttcttttgattttctggcaagaagcaatgtgaaacaaactccactggaaacagaaattgttattttaaaacacaaaagtatgtgcatgcaggaaaatatgtacaggaaaatacttctcctcacagtttttcttggagtgtgttggtgagaagatggttgggggcagatgaagggacacgggatatcatctcggtgaaacatttggtgctccaggtaacagtgtgccagggccacggggaggtattggagtgagctcaggtgtccctgggagtgctttggccacagacatgtggcaatcaaacagagtcagcagtttctcagaaacttggctgtaagtgcctttacttcatcacttctctggagtgattccagggaatggcagttctccaaggagggcaattgtattttattcaactgcatagcccaccaaagcttccaattgacaccttaaacatagcgggagctcaaagagttgaagacggtgatggaataagtgtgttatttgtgcggaggcgttgggcactttggggtctctgtttttcttcttagcctgggctctagtgagttgcaaacgctggttgctttactagcaggtctttttgattctctctattgatctctcacactattgaaatattgggaaagagctacacacagaattgagaacacagctggctagtgctcaggcccacgctgcgtgacaaggcaggtttactatttgctgaaacaaactggaggtggagaaggcatcagttctgtgggcagctgagcaggttgctgacagggctcagagacacagagaggtgagccccattggcacagtcactagaccggcatggggcaaaggcccaggggggaagcagacacagtcttctttgacccgcaatccagtcatttatgtactgagtctcctatttattttctattctttattaagtgaaatttcagaaatgttcagcctgctgaaggtctaagcctgctgaaggtctaagcctgtttctggttccagtcaggcctttgctttgcagcacaatgaagaaatccattcattgtacagttttctggggctggaggatggctccataatgctggccacctgtttgatttctccttttattataattaggccaagcaacttgtctcataataatgaaagcttatttccaaagaaatagtgtcaggatgtatgacttctttcaattcaaccatgtttaaacagtccccaatgtataagcagtgtgtttcaaagattcactcttgaatagaatatttgggactcagaacacattttattgaagaaattatgttatagatgggacttaggttcccagagcaacaaacaaaagtcagtgtaacccataatatcatgagccactctgttttgaataattttacaatgcaaacgtaaagaaagggagaaaacccactgttgaaatatgaatattttaatttgactaagaaatggttttaatttgactaagaaatggttttaatttatcttgaaaacagacgtcttaaaagaggacgggagataaaacatgaagattctgaaggagtcatttaggaattttcaaaggaggcagtttcacaggaggtgatttagaatcatagagtctccaggttataggtaaaagcgaatcccttattttgtagctgagtaaaacaagaggcagaagactacttatcattttactttaaagcttatccttttatttacctttcattcagctttgccagtaaagggagggaggtggaggggacagggctgacggcaccatacagaggaatttgaggaagtgggaaagagcagtgtattggcctactagggctgccgtagcaaaggaccggggagcaggtggcttcaacagcagacatgcattttctttttttttttttttttttttttttttttttaattattattatactttaagttttagggtacatgtgcacattgtgcaggttagttacatatgtatacatggtgccatgctggtgcgctgcacccactaacgtgtcatctagcattaggtatatctcccaatgctatccctcccccatcccccgaccccaccacagtccccagagtgtgatattccccttcctgtgtccatgtgatctcattgttcaattcccacctatgagtgagaatatgcggtgtttggttttttgttcttgcgatagtttactgagaatgatggtttccaatttcatccatgtccctacaaaggacatgaactcatcattttttatggctgcatagtattccatggtgtatatgtgccacattttcttaatccagtctatcattgttggacatttgggttggttccaagtctttgctattgtgaatagtgccgcagtaaacata

SEQ ID NO: 96039 - DNA, 21652 bp, Homo sapiens
tctgcaaagagctaaatattaaatattttagggtttgtggccacataagggctctgtcaagtatttttctgtattggtttgttttgaaacaactcttaaaaatgtaaaaatttccaggtgcagtggctcacaactgtatcccagcactttggaaagctgaggtgacagggtggcttgagcccaggagtttgagagcagcctgagcagcataacgtgaccccatctctacaaaaactaaaacattagctgggcatggtggcacacatctgtagtctctgccactcgggatgccgaggttggaggattgcttcagcccagaaggtcgaggctgcagtgagctgtgattgcatcatcgcattccagcctgggtgacagagcaagactctgtctcaagaaaaaaaaaaagtaataatctttcttagcttttaggccatacaaaaacagaccacagataggctttggctccagtttgccgaccctgcttttaacacacattttttaatcaaacaaagttaagtttattggctgtttgctataatcgagaccacatattatgtgtatctgtgtagtatttctgcaagaaggtgttagactagatctgttcaattttgttttttgtaagggaattttggaaaggattcagtgatatggggttttgctctgtattggttcctatcacaaagcaagggtaattttatgattgggtctcttaattttctctagaatagagattagtaaactttttctggaaagggccagatagaaaatactttaggctttgcaagttacatatggtttcattcatatattcttctttgaataatattttaaagagtttgttgaactctttaaaaaatgtttaaaccattctaacccaagggttgttaaaacgcaggttaggagttacttcctctgatatgccttcccagattctcaaattcaatgtagattcccctcccatgtattctcctagattttcgtgaatgctagattcatttatatactgttcactacagtgcctggcatatggtggacacgtaatatttgttgaatgcaggaataagagtttaattatttgtggaatcccatcacttaatggtgagagacaatatacaaatgggaaatggccagactatatataacaacagaattctgacccataactgctgcagcaaacagatttggcctgcagagttgtatttttatttatctagaaggtgggaagaatgaagtgaggctaaagctgtaagtggcaaagaagtagaagtcactcaaagtggtcatttggggatctgtgttaagatatgattattactgattggtcttgttttttcttattttgttttttagagacagagtcttgctctgttgcccagactggagaacagtggtgattatagctactgcaacctcaaactcctggactcaagcaatcctcccacttcagcctcccaagtagctgggactacaggcacacacctggctaactttttattttgtgtagagacaggatctccctttgttgcctaggctggtctcaaactcctggctttaagcaatcctcctgccttggccccccaaattgctggaattacaggcatgagccaccacacccagcccttgttttgtcttgattcattatggtcacagagtggttttatctggttgttggtattctgaatttatttttatttaacaggaaaacacaatgatccagctgttagtgccaatccagatcctgaatggcagaggctgctcttcactttgtctataagtagcgggagtggaactgacttctttcactactgcagtcctgactatgcccatatcagatcccttatcagatttgtgctttatataatagcaatcagcttgataggtctttgttcagtgtttggaccatatagtggagctttggtaacactagaactggagacttgtgattaaatctcattaccattaatgttaagtatagccttgtgtgggaatgttacagagaaaaggacttagagacttaccgaatcgaaactttatgtctcgggaactctaaggataaaagtaattttaaaaaaagaaatggaacaattttttctatcttggataaaataacaattgaatattgtattggtcagggttctccagagaaatagaatatatataaagagattaattgaaaggaattcactcacatgattatggaggctggcaagtttaatatatgctgaaccaatgtcctagttggagtccaaaggccagaaagcttctgcagaacaaaggagatccaattatccagtttgaaggccatcaggcaggaagagctaatgttcagttccaaggacatctagcagaactctttcctggctggaggagggtcatcattttgtcctattcagacttccaactgatttgataaagcctacccacattatggagggcaatctgctttactcggtcttcaaatttaaatgttaatttctttccaaaacatcctcacagaaacacctagtggccaaatacttgggcatccattgtctagtcaagttgacacataaaagtaatcattaaagatattgggcttttttttttttttttttcagaattgagttgagcttgactcaacagtcatctcctaggataaattgtacctgtattgataattgttctaaggtgctccaataatatggggatctgttggggctgggggatgatggtctgatctcagtctggttggctactggtacagcagaagaataacatgttgaatttccaataaaaagaagcagcaagcccaattcaataaaaacttcaaagaatatctaataaatagcctttgcgaaaccaagaaaagaaagtagagggcagtaaaagtaaggcatatgacagaactagatttgttggtttatttgctctttcaacacggatttttaaatatggaaacacagacaagtcatgcttgcttttttaaaccaacaaattaaaattgcgaacatggctaatttcaaatcagattaaataaaaaatttctgcatggaaagcatgtaatagcttttgtcttcttccttaccacctggagagctcttccccttcccttctccctctgcccccaccttgtctgcctaactcttactcttgttaaaaccttaggttacaagtttcttcctctgccattccttccaaaatatcaaattcaatttaggccttcctcttatgtattatcctaggttttcatgaatgctagtgtcatttctgtgctgttcactacagtgcttggcacatggtgggcacataaaatttatagaattcaggaacaagaggttaactatggaatcccatcatttaatggtgagggactgaatatataaatggataatgggcagaacacacatgacaataaaactctgacttcgagcaaacagaccagaacaattagaacttggttaatgactaccagctttccaaatatgctccccaaaccagtcatataggatgcttcccttccagttggcctgccttcacgtcttcatgccaacaactttttttttttttgagatggagtctcactctgtcacccaggatgtaatgcagtggagccatcttggctcactgcaacctctgcctcccgggttcaagcaattctcctgcctcagccaccagagtagctgggagtacaggcatgcgccaccacacccagctaatttttttttgtatttttagtagagacggggtttcaccatattggccaggctggtctcgaactcctgaccttgtgatccacctgcctcaggctcccaaagtgctgggattacaggcgtgagccaccatgcctggtctgtcactttacttttaaaatgtacaacttgatattttgatacatgtatatgtcttagtccattttctgttgcttataacagaatatctgaagctgagtaatttgtatataaattattcttacagtattgaatgctgagaagtgcaaggtcaagaggtcacatctggtaatgaccttcttgctggtgggaactctgcagattccccaagccatgtaggacatcatgggacaaggcagcagagaactctgttttataaagctgccagttctactcccatgatcacccattaatccattcattcatgttccagctctcatgcccaatcatctctcaaaggccccacctgtcagcactgccacattggacagtttcaacataagtgtcagaggggacaaacattcattccaaagcctgatacactgtataataactatcacaatcaagctaattaacatagccaccacctttcatatttaccatttttttctattccctttattttcttctctctttttctttctttctttttttttccagacagtcttactctgtcgctcaagttggagtgcagtgacgcaatctcaactcactgcaacctctgcctcccaggttcaagcgattctcctgcctcagcctcccgagtagctgggattacaggcgcgtgctaccatgctcggctaatttttgtattttcagttgagatggggtttcatcatattggccaggctggtcttgaactcctgacctcagttgatccacccatctcagcttcccaaagtgctgggattacaggcgtgagccaccgcacctggccccattttctttcttgtgtgcaagtgtgagaacacaagatctaccctcttagcaaatttcaagcatacattgcgattttcctaactatagtcacattgctgtactttagctctctagaacttacctatctcgcataattgaaactctgtaccctttgaccaacatctccccatttccaccttctcccaggccctggcaaccaccgttctactgtctgctgacatatttcttaacttgctattgcagtcatcacaactatgaccaaaaataataatcacttctgtagctaccccacgaagcacaaagaagttgaaaattatcaatatatttattaatatattatgctgaattcaggcataacactttcttctgaagtactttacattctgaaatccttaaaaaaatctgtccagtgaattctgtgcttgataatagtccatctatgctgtattaaaattaaattgtaacatgatcggttcacctcataatgatctttatttcataaaacgatttgagatgaggtaaaatttgacttcaaaactaacataacaccataaatttccaaaatagttttataaaaaaattaaaaagcccacaacactatagatagataacataccttaatttttattttattttatttatttatttttttatgagacggagttttgctcttgttgcccaggctggagtgcaatcgtgtgatcttggctcactgcaaactctgcctcatggattcaagcgattctcctgcctcagcctcccgagtagctgggattacgggcatgcgccaccacgcccggctaattttgtatttttagtagagacggcgtttcaccaatattggaggggctggtcttgaacccccaacctcaggtgacccgcccgcctcggcttcctaaagtgctgggattacaggactggccactgcgggagctgcggcagctgcggcctctgggtacggggtcagcgggcagtcctgtaatggccacattacaggacaggccatcgcgcctggccacatgccttaattttcaaagtcaaatttgtctttaaaaagaatgaattcctaccctttgggggtatttatttttgcaactaacttccatccttttattaagtaatcaaacatagcccatttgaatgttggaaaagaacggtcagaaatacaagttcttattttgtactttggtaacatgaattttacacttagttgaacatgaagaatcaaaaaagctctggattgttgtaataattgtttagaattttagatgtaccatttgacctttgactttaagatgaatttcagtgtcctcagtaaataaaggcttacccccaaccttaaatagtgacgcacaaaggctattattaccaccactgagtggcttaaataatcctgtcaacagcaatcgcccatttccaaagccatggtgaaacatctctgtgctaatttcttttgttttgtttcctaattttttttttttttggcaggtggtrggaaataatctttgtcttctttggagtaaaccttcaacaccggattttttcttttaattatggatgtaaaccccaatatccccataatttacattgggtctcgaccaattgcctaattataagaggatatatttaggctcttatttcatccacacaaaaacttgtgtaacaggtagttggaaacatctgaggcaccactttgattctgttttggatggtcatgttttttctcctccgtttccccagcatgtctgccaccatcctcatgcactgcttccaagtgcctgggagcctttatgagcgtccctaaacctaaaagaatccagaggcggggctcggatgaaccctcgagataagcaagtgagccgcttctcccctstaaaggatgtttacacgtgggtggcactcgctggaakccagcgctcgggcagccctgggaggacgcgctcagctgcgtggaggtgaccggcggcggcgcgggcagtccggaggggcgggacggggcggggcaaggcgggggccgggccggaggaggcgggctcccgggatccgcggtgtccggcagtagagctcgctgcagatccgggctctgaccatgatttggcgccgcgcggcgctggcggggacgcggctggtttggagcaggagcggctcggcaggctggcttgacagggcggcgggagctgcgggagctgcggcagctgcggcctctgggtacggggtcagcgggcaggagcgccgcggcgtggtgcgcaggccttgcgggggtctggagaaagcggtgggcggaggtgcccctttgccccggcgccgggtgggcgaggcgtactagcgcgtgggctctgagtcataacacgcagaggcgctcgagggatgggcagggaagggtgccctccgcggctgtgctgacttcaggagcctgtgactctcgcgttgaaaatacttcactcatgttcacttaggccatccctctgtgaattgctacataaaatacaagacgccgcaatcaattggaatttctctgaaagagcgaatgattcttagtccaagtgtgtcccaaatactgcagtggacataggaaaaacggaacagttttctggtgtttggttacaattctaatttgaccgggcgtcctgcattcttgtttgctaaacttagccaccctactgcaggaagtgaaggcgatgattcccgctgaatggccagagcttttaggatagaggctgactgatggtgatgccgcctgcggctagaccgaggatagtgctttccttacacttcctcgtttggaatatcagcggcttcgggacctgcagtggaagggaactgcggctgtgctgcccacgcccgcgcggctggtgcctggcggtcctgccggctcgcacttccgcgcctgccactgcgcacttggccggagagtctgtctcgctatctacttgatctgggagcttctatcagttttgcaagattctaggaatctcaagtttaactttccagaccaagctagagacccctcctgaagggctaatcacaggctgttatgtgtttgacagctctttgaggccccgccgtgtttttttctgcgtatccctggggtcaatatagcactttgcctacttagcacacagtaggcgctccataaatgtggcatgactaggtgcttcatctgtgttgaaatgaaatgtttattgtgcacttacttcctccgtgcatgtttctattcatagttcgcgacagtttttaccaaggtcaactagaaattgaagggaaagggtgtcttccagaaacttttatttgggtaatatttcagaatgcacctcctacctcctctcactacccaagaaaacattctcttgtgttctattggagctccttcagtagtaaatgctgtagtagatggtttgggtatgacagtttaagtgctggacctgagatgaaaggacttgctttcttagttgataaaccaaatacagcttgctgatttattccaccaatgctcttccttagggctaggccagtgctgcctaaccttttctggtttaggcttcaggaactcaactttcttttatcttaaagcttcaccctcctctcaggttggctgcagtctccctagctcgctacccttaactccttcctgagttaagcgcacaggacttttttttttgttttaaagtgttccttgctaatactattaggaagcaaggaataatagattgtaaacattgggtaggttataatgttataatgtttaattcctgtctcttactcttctttgttataactgaacaaactgatgtttgctgtagcttcctcactctaggtgwgctgatatcataatcgttcccccttatccgtggtggacacgttccaagaccctcggtggatgcctaaaacctcggatagtactgaaccctatacatgctattttcctatacatacttgcctatgataaagtttaatttataaattaggcagagtaagagattaacaacaataataaaagaacaatcactttaataacaaaatgctcatttcaaggaatcccttgctgaatcttctcataggcccagtgctttttggcataacacattgctgtcagttggaacactttttctgttcttgtctccacaaatttaataccttttctggcttaactaagcacttataccttgtggctgtaacttgcagtttgaggtgtgacatcaaaactgccatgaattttttacttctttacaactgcactgatagaagatccgttcttaccatagaccttagcaacctcagcgtgtgattttttttttcctattaggtggagaactttcaccgtttcacttaaaggaagcactttagggcttctctttgacgtacctgaattgccagcatcactactctagtggtttggagccattattattattattatttaagacggagtttcactcttgttggagccattattaagtaaaataagggttacttgaacacaagcatcaccacactgtgacagtcgatctggtcaccaagacagctgttgactaaagcgtggggagcttatacagagtccatatgctggacaaagggaggattcataccctgggtaggaggaagctagatggctcaagatttcatcatgctacttaaaacttacgaactattttcttctgaaattttccatgtaatgtttttggaccacagctgaccttgrataactgaaaccgtggataaagggggactactgtgtagggcagatgttcattatccaaggataagatgtactggaaaaagctattagagtggattcacttaaaataagactagtatttcaggccaggcgcggtggcttacacctgtaatcccagcactttgggaggccgaggtaggttgatcatatgaggtcaggagttcgagaccagcatggtcaacatggtgaaaccccatctctactaaaaatacaaaaaattagccaggtgtggtggtacatacctgtagtgtcagtgactcgggagtctgaggcaggagaattgtttgaacctgggaagcggagattgcagtgagccaagatcacgccactgcactccaggctcggtgacagagcaagactccatctcaaaaagaagactaatatttcatgctatccagtttaaaaaattctgcttgggactattgcaaaaattaaacaaaacataaaaagtagctttatgtttacatttaagaacatttaaattttaaatgcacccccaatgaatgaatacagtattgatttgaaggcagaatatttgagttttataacataatcacaaggataatagttttttaaatatttgaagtttcaaaaattctcttattctttagatattcgagtaattctcttttgaaacatctattatatgtcataatcctcttgtaagatttgtaattttactctgcagttagtttgcatcatggtgtttgatattgttccaacagtgcggtagggcctggttgaccaagaaagatgagtggatggggaagaaaaggttccagggataaaaagatttgatgatgataaactggttgagtttttttttttagtgataattttcctgacaatgaatgcttccttttacaagctcccaatagctaggttttggataataaatactgagataatgagaggtcctgtattcaggaactaatagtagtaatgttaaacattattgagcatttactatgtggaaggcacttatctgctttctgcgtatgaattcatttaatcttcacaaaatcctttgagacgtgccagtgattattgtttccactttgcagactaggaaatttggagctatggcccattgcggttgagatactgtagcttcctcaaaaatctttgaagattccctgcttcacagtgtgttcatagagttttggcatgttttactaagaaaatagaaactatatttttaaaccaatggtcaggtcatatggcataggatggaatatttgaaatttgccagttataaataagagtgtgtcaagctttaaacacagtaaatatgattttatcaaataattaagggtgttgggaagctagttacataagcacacaggcctttttggttttagtgaaacaaatactttgtatattgacattttgtactgataataagtaaaatttttttctattttgtaagtttggctatatttgtttatgagattgatttttttcaaataaaactcgtgataaattatccttaatgcttaataaactacattgttctcttaaattccttttaggatggagagcaatacatcatcatctttggagaatttagcgacggcgcctgtgaaccagatccaagtgagtgatgtgggagatgattgaaaaactttcctctgtagaaaaagaattgtcccttatatatttaatatgcttattcaatatccaaacttgagakagtttagcaaatgaattaagagattaatatttattttaaaatctgctatgaaaatcatccttgtgactaagaagtcctagatcattttggtaattaaaacgtatgagatttattcttaatgaagtcttcactccctctaagttggataatgaggttggctgctccttttcatcatacccacttgaggtctagtgttgataccagtcaagctgcccttagctagggatcctatttgattttggcctgggaagcagtttaacagttttctttgttagtacagaacctagtgtgcagtagttactccgtaaaccatcctctcagggataggacttcttttcctctttcttttactgagaagcttcgttaattctgccttagaaaatctctcttacatgtatgtttttcttcccttgcaacctacaagacataccattttttctctcttgcttaccactcactactaccacaaacaaaaaaaatgtctgcctttagttgatttggctaaactcctagctgttgactataactgtgagggaattgcttttttatttgtttgttttgttttgttttgaggcagcgtctcgctctgttgcccaggccagagtgcagtggtgcgatctcagctcactgcaacctctgcctcctgggttcaagcaattctcctgcctcagcctccctagtagctgggattacaggcgtccaccaccacacacaacttatttttgtattttagtagagatggggtttcaccatgttggccaggctggtcttgaactcctgatttcaagcaatctacctgcctcggcctcccaaagtgctgggattacaagcatgagccaccgtgcctggcctgaattgcctcttttaaagtaaaaatacaacatcatgggatatacagttaagggcgagcttgagaagtgggaagagagttctagaaaccctaacgctgtcatctttagtttcagctcactttggaatctcttcatcagtgtctaatatatgtcagagccctggaagctcatctctccctacacgatggtgttagtgtgtcttgtaacctgaggcagcatggtggagggaagagcactggctttggtgttgtgacaaggttgagtcaaatcccagtattacgaaccactcagccttagttttgtcctccgtaagatggattcattaatacatctctggtatggcaggccctccctaggatggacttttatactaaatattactagtaaacacaagggaatcataaaaatagaccaacttgcagacagctgggctaaaactcaggacccttctgacacccaagggtgggtataacttctgaagcatgggtcttatactttctggtttttggccttcatcttgaaggtactgcttatgatccaccacaaaagaacagactagacaggctgggcacagtggctcatgtcttaatcccagcactttggaaggccgaggcaggtagattgcttgagcctaggagttcaacaccagcttgggcaacatggcgaaaccctgtctctacaaaaaatatcgaggtgtggtgacacatgtctgtagtcccagacacttggcaggctgaggtgggagaatcacctgagctcaggaggttaaggctgcagtgagctgagatcgcacccttgtactccagcctggacgacagagtaagactgtctcaaacaaaaacaaaacaaaacaaaaaaaaacctagacaaatgtctgggtgctaaatctatccattcaaaatcttttgaaggtcccaggcattcatatgtttagaaacaaaaaacaaaaagaaaaacttcataggctgcgtggatgcatagcagaatctcatagccattgtggtaaaggcctggaaggtagttttcaaaccaggctgatatcatcattatatggagaggttttttaaacatacagttttcaacttctacctcaaactcattgaatcagcatttctggaagtagcttttcctgaattaagagtatgagaataccttatcaagagagtaatgacagcttttgtactataaaggtatataggaaaggatagaagtagaggggtaagccttacattttaagaagaaatcatataccattccttaccattgaaagttatagaatagaaggtaaggagttaactcctgaatacctactgaatatttgaaaagaagtataatgttttggggctgggcgcggtggctcacacctgtaatcccagcactttgggaggctgaggcgggtggatcacctgaggtcaggagtttgagacgagcctggccaacatggtgaaaccccgtctctactaaaaaacaaaaattaactggccgtggtggcaggtgcctataatcctaactactcgggaggctgaggcatgagaatcgcttgaacctgggaggcgcaggttgctgagatcccaccactgcactccagcctgggggacacagtgagactttgtctcaaaaaaaagaaatgtacaatgttttggtttttttgtttgtttgtttgtttgttttgagacagagtccacttactgtgttcctcaggctggagaatcactggaaccacctccctggttcaagtgattctcctgcctcagccttctgagtagctgggattacagggatgtgccaccatgcctggcaacttttgtgtttttagtagagatggagtttcaccattttggccaggctggtctcgaactccttacctcaagtgatctgcctgcttcagcctcccacagtgctgggattacaggtatgagccactgtacccggctgaaaaaggagtataatggagattaaatatctggactgtagagccagatttgcctgggtctaatcccagctcttccacctattagctgagaaccatgaacaaattgttgatcttcctctgcacctcactttcctcaactgtgaagtggggacaataataggacctacctcaggattgtagtgaggtttaaataacacagtgaagataaattgttgagaatagtacctggcacacagaaatggttgctgtatatgaattggctacaattattatttattgttattgctctatgccaggcactttttgttatatcttttttctaataacattgctttgaaatgaaaaatatcctcaatctgcagatgagaaaaaatagatgatgcttagtttgagcccagaatcatgagagaccaaaatccataccctttccattatatcttaatttatttccaaatggtaatgtctagaattaaaatgattttttgtggttttatttcaggaaacaatttctgataattgtgtggtgattttctcaaaaacatcctgttcttactgtacaatggcaaaaaagcttttccatgacatgaatgttaactataaagtggtggaactggacctgcttgaatatggaaaccagttccaagatgctctttacaaaatgactggtgaaagaactgtgagtatatcctctgtggtgctgttcctctttaataggttgtaaactagatcacccagagcctagaaccttgtgttaggaaaatgagccagacattctctgaggatagataaagcagctgcagatctaggaaccagattcttagaataggaaacagcagagttgatttattttatttttattctgtgtgtgtgttttgactggggttgatgagtagtgttattatgagtgcttgtctatggatctttgagttcctcttggagctcttggcaagatgaaagtattcttcctccctttacctgggcaatacaggggttggtcttcaattacttttctaataggagtgctttagtgctccatgtttttagattcttgaaatttggatttttccataatatgcataatcagaaaaatgtacagtgttgccactttcaagtttattgaaagtttatagtgcactctttcccttcagtaaacaaatgtaagaaataactaaatattactgtttatctgctttagtttatttaaagctttagtaatcaggaagaaaggttttagaatcagattgtttggatttgaatcccagtctgtcatgtaccatcattgtgattttgtgcaagttcctgtgcctcattttcctccaaaacagggctaaaaataatacctaccttaaagggtaaagattttaagatttaatttgtgaaagagctttgtggtgccaggctcataaaagtacccagagttcaaatgtctcgttattatgtgaaatgatcttagttctgatactagagtaaagcctaattcttcttttgtttgtccaacaggttccaagaatatttgtcaatggtacttttattggaggtgcaactgacactcataggcttcacaaagaaggaaaattgctcccactagttcatcagtgttatttaaaaaaaagtaagaggaargaatttcagtgatgtttatactaataagtttgctagtacagtgtcagttatttaaagtggtaatgcccgataatgtcttttaaatgtttgaggatgttttaaatacatgcattgtcttcacgaagaagatgtaaaaataatgaacaataaattgcggtggaaacctcttcttcccacttgccaattcttgagaaaaagggatggtattaaaaaaatgaaaggttggagttgtatcaagataagaatgtattttattaggaatttagatatgaattttacaaccaagagctagaaggtaagcatttggaattctttatttcctattcaggagttaactctttatctcacatagtttttaagtggtaaggactgatatttgatttctctttaaaatttaaggcttttgctgatacacttgtgaactaggcaggaatatcttatacgatattgtgaaaagccttcacactttgtacttgtagagtaatagaagtatattaaatttttagcatggaatgaaatttatcttagagaaactaaattactcatttaatgacttaatagttcattaagtcattaatgacttaatagttcatttgtcattaaaactatacctatgggcagaaattaaaaggagaagatttcggcattgtatgaggatgaacttttgaaacagtgtagaaatgtactttagttggcatgggatggtggctcacgcctgtgattctagcacttagagaggccaaggcgcaaggatcacctgagctcaggtgttggagatcagcttggtctacatagcaagacccccatatttacaacaaataaacaaaaattagcctggtgtgatggcacatgcctggagtcctagctactcaggaggctgaggcaggaggatctcttgagcccaggagtttgaggttttatatatatatatatatataaattttgaggttttttatatatatatttttggaaagtagaactctccacctcacaatttaacttgagtacatttcatatatatatacacacacatacacattttatatattaaatgtacttgaattagattgtgaggtggagagttctgctttccagaatttatgtgtattttatttatttatttattttgagacagagtcttgctttgtcgcccaggctagagtgcagtggcgcgatctcggctcactgcaaactccgcctcccgcgttcaagcaattctcctgcctcagcatcctgagtagctgggatcacatgtgcccgccaccgcacctggctaatttttgtattttttagtagagacggggtttcaccatcttggccagactggtctcaaactcctgacctcatgatccacctgcctcggcttcccaaagtgctgggattacaggcatgagccaccgtgcccggccttatgtgtattgtaatacatatatatatataaattctggaaagcagaactctccacctcacaatttaactcaatttccaagagcctttgaacacttaatgtgttcaatactgggaatactattcaaactgatttcaattcagctaaacttagcaaacaagatttatcctataggaagtcttactttacaatgattgaagacgttcagtacttcattaatgaaatcgtctttccagcttcctatcaacaagaatttttaaagtgcctactatacaaagcattttcctagttgatcccacagagtcacttggggcagattaccagatgctgagaagaaaaaacccttcatcagaggtggaggaaaaatggatttcaagagtgcttctggtttttgtcaggatggaccagagaatctggaacagtcctgaagaaaatagctggtggcttccttggccttttgccatcaatgatgcttcttacttggatttaaactgccattaggaaacctcttgatcaagaatttagacaagaatttcattcccatgtgataatttaggttataacactagaatggaacaaagagtagaatgtctttagttctttattttgcattatgtcataagaaagttcttgctatgttgtaaaatcgttgttagattcaggcttttggggattctgaaaacacattttgttagagttgaagtctattacctgagaaaggtaaaattgtgtcataattgttcatcatactaggtattaagggtagagacaagttacttcaaggtatagaaacactgaccagtactcgactgtgaaaaacatctttacctttagcattttttttttgaaacagtctcgctccgttgctcagactggggggcaatggcgcaatctcagctcactgcaacttccacttcctgggtacaagcgattctcaatcctcagcctcctgagagtagctgggactacaggcgagcaccaccacacttcgctaattttttgtatttttagtacagccaggatttcgccacgttggccaggctggtctcaaactcctgagctcaggcgatccgcctgccttggcctcccaaagtgctaggattacaggcatgagccactgcacctggcctgtgaagaaacatcttttatcaatgcttcctagactggtaggacatagggtgagaggcgagtggtggttcgttcttgattatgttcagatcttgaaagaattcaacattagggagagaagccttatcaaaagcctcaaaaactctactgaaggtaatatgatacctgattctcactatggctttatttaaaatagaagaaataaacccttctaatatctgcatcttagtcttctgaattaaactcattgactaataaaagatttttactttggagggtttagcactgcatcaaaaaggaagcagatctctcctatttgttaaacgctaaggaatgaaagaaaataacaataaatctgacctctttttgtcatatggcacattaaatatctttgaaaaaaaccccaaaacaataataacaaaagcttgccgctctaaaacgtttaaaatatcggacacaataataaatttttaaaaatgcaaggctaagcaggttttaaaaagtatagggactctccaagaggaaaacaaaaccaggagcagaatccaaggatatagggaagcactgaagccagcagctcccttactgacagtgccaatcgtggaatgccaacagctttagttttaactgtatgcaaggggctggttacaaagctgggggttaagggagaaagatttagataggagaccacagcataccaccactaaatcttcagttaaaaaaattcgtaatatactttcagagcatagctgatgatttgccaagacagacaagcgttcagatcactaaaggtgtaaccattaggtaggtgacttaacctcccagaacttcaagtttcttataaaatgtaggtaatagtactttcctttaggatttactttttgaggaatggagataatacatgtaaatctttcagagtggtttttaatagacaatacataatggctatcattaatcacaatggttcaggtatgtgtgttttcttgtggacccatcagggttttccaagattcctgcctgtacccagccaagaatttagggggcaggggaagcctctggggtttcgtgttgtcttggatattgatttccatttcttctccctttccataccttacagctggataaaagtaagataatggtgactaagaaaaacttgtaatttttttcctcagtccttatttttacattttttatttacatttttttttttttttttgagacagggtctccctctgtagcccaggatggagaacagtggctctatcatggctcactgcagcctcaaactcctgggctgaagtgatcctcctaccgtagccttctgaatagctagggctacaggcacatgccaccatgctcaactaattctttttagttttttgtaaatatgggggtcttactgtgttgcccagcaagatccccatagttacaactttttagttttgaactcctaggctcaagcagtcctcctcctttggcctcctgaagtgctatgattacaggtgtaagccacaatgcccggccctttattttaagatctgaaatacgagctgtttactggagttcattaatataaaaaactaggccatttttcactttatcattagataatcaatttacattttaattgccaaaatatctgtaattgaaaagctgttgaagaaaaaaagggatcttctgtacctggattttactgtttactgataaaaaattaccatttgaacaacatcttttaaagtcaggttttcttcataaggtttaatattgttaaaatttattaaatctagtatgtataatttgtgatccttcttgtacaagtgttgaaatgagtgctgtaaaatcaaccaaatgttttgaagttttggtgaatatattctgatgtaacttgctttcagttacctacagttcagatcttagaacttttcagaaaatttttatgggaattgagagaaaaatgtctgcaaattggcactgaaacagtgtttttatttgcatagttgactttttgtgtttggatgataacttttgccaaaggcaattttgagtagatcttttcacaaaagaatcctattttaaaactttaaataatttgttttcattaaatctaatcattttgttataattgaattccatgggtaaagaatctttaacttcatatacttttaatacttacataaaactagatacattaaaaggtcaatattaattatcaaaacttaaattttaccttgttcaaatacaagattactaaaggctttagattttttaaggcatattataaccttaacattcgtatttcttgaaagagatagacagacacttgtttaatgtgcatagagtttatttggtacatctatcaatttctacaataactgaccaaaaacagttcacacagtgtccacctgcactccatgtctaaaatgatttatttagtagggtattttgcaaggctagaaaggagagaaaggatttcacagtatcagtgaaaactgttttatcatgaaacaaatgtaatacattaatatattcattcattctctattagaaaacagcaaaattacattgttagttgtattatttacagtgaaaacttggaagacttgacaaagcatcagttagtttatcaacagacctaggaagctccctgtcccctcctttcagggtcctttccttggaaatgaaataaacttaaatcagattttacataactttaagcaccagcttgacaatttaaagttttatttcagttttataaaatactcctgctttgaaaggcaaagtgaatgtaaaaatgtgaatgtaattaaacaagtcactggcctggaaactttttattgcaatagtctttatgttttactactatattcacttcttggaatgaatttgcttgtaggtttgaaacaaaatatttgccttttgtcttgaaaaattcccttaaaaaattaattatttttggaactgtacaactacattttcattcgatgttaaatatgcaacttggtccttggatatcatgttacaaagtccaacctgttggataacttgttatagaaaacaataaaaaaccttaaactatcataaaatattactgatgttaacagtcatgtatgtataacacatcactgtatctagattttcctgttattggatgtttaaattaccaatgtacaatcaggttttaaaatgtaatacttaaatttccattcactatgtaaaattaaaagctctaaaagaccctttgagttctgtatttcagaaacattagaacactattaaggcattatttaaacagaccccaaggaaagtaactagtatgcctgaattacagagcaagtagtattttaaggcagtcaaaaggttcattttttcactttaaggctcttgaatacttaagtttattctatgtagacattattctgtgtaatttaaatattcatcaaatggtcagttattgaaatcaaagcctttatataaagcaaatggacagtttagaactagattataataccccactccccactggtttttataaaagatgattcttatatctcatccctttggaaaatttcattatcagaagctggcaataaaaggaaaaacatataactgaaatacattacagaagttatgcccag

SEQ ID NO: 96040 - DNA, 19920 bp, Homo sapiens
gcaaagttcctttacactgaagtccctatttctaatcgggccataaccaatcatactgaagatggctacatgaatcaagtatgttcaatgttcccttctttcttcaaaaaagccctttaggaaaaaaaaattctatttacttacttccaacacttgctttcttgttttgtcttttatgagacagtgtctcactctgtcgcccaggctggagtgcagtggcgcgatctcggctcactgcaatttccgcctcccaggtccaagtgattctcgtgcctcagcctcccaggtagctgggattacaggcatgtaccaccacgtctggctgatttttgtatttttagtagagatggggttttgccatgtcagccaggctggtcttgaactcacaatctcaggtgattcgctcatctcggcctcccaaagtgctggaattacaggcatgagctaccatgcttggctcccaacacttgctttctattcgtatctactacagccattaaaataaatactttctgatactaataatttatattagggtaactatgcctctttgcaaagttttagtagaattttaagtttcgatattttacatatacttgaatttacaaattgtttgttatactttaaataaattaatagtgttaataattttaaatatcaagaatatgctgggtttgcagagaatggagagtaagctgcctgaaataatttattcaaaggtgctgacccagtggatgtcacagttctatcaaattcaacacatgccctttatatttactttacatggaacaagtatttatataagaaatactttacaatgacccctcttaactacctgaaatgaaatgcacaggtaatacaaccaatctacatatatattttaaaaattaatacactaatacaaataaaatttttaaagacattaatgatagaggtcaggtgtggtggctcaggcctataatcccccgcactttgggaggacgaggtgggcagatcacttgaggttaggagtttgagaccagcctgcaacatgacgaaaccgcgactctactaaaaatacaaaaattagccaagtgtggtggcacacgcctgtaatcccagctactcgggtggctgacgaaggagaatcacttgaaactgggaggtggaagttgcagtgagccaagatcacgccactgcactccagcctgggcaacagagcgagactgtctcaaaaaacaaacaaaaagagagatttatgataaaaatatgcatttcagtatgtaagtctcagacatgattataccagaagatatactaaccagatgctaatacctatacataaagtcatagtgaatgtaacaattacaaatgcccatagactggtatattggtgactcaaatgccatgaacacaatttcattttttgatatggtgaaccattggccaagtttagaacaaagcaaagtacaagcttccctcactgtacactgtagttacatttctagataattcagtgcacgttaaaactgaacaaaatatactttatgttccaacaatgttttaaatttacttaattataaaaaagtgtttcacctacacagatagccaatgaaacactcagaagtcctgcagaacacagagctagtctttgctgtttacaaagactgtcccacacactactggactactacctaccctggccctaaaatgcccttaaaaatcattctgttaactagaaacatcctcacaaacttctagaacacctcgtagaaatcagtactacccctaccactgcccccttgagaaccacagctctaagagtattattcctgactgaaacagctgtgcctcagaaaaaccaaggaatacacaagcataataaagtatttgccaaatcactgctgattgtaaatgctcattgttaatagtttgcatgaattaaaacagataaaggtgtctataattagttctgaaagagacacttaaatttagctttgttttcaagtcaaaagaaattcttaaacaacatgcctatctgctgcacaagaaaactgaaggagaaaaataaggcaggcaaacactgacacttgtggtcattctgagattgcttatttgcaatcaggctaattcttgctttgtgagttcaaggaaagtaaagctggttcataaatcatccactgactttagaggaaaattacaagcttttaacaaacatttgacttctcttcaaaaaggggaaactacctatactaatattaaataaccaaaaacaagccatttgtccaaatcccttatgtaatgaaaaagactgcatctgattataaataaaaacagtcaagagaaataaactccaagcaaacatcatgcaaaattgtctagtcatctcaataaaactaaaattggtctctaaataattgtgtcaagtgacagttttcagagtggtatggtggaaattatacctgatctaaaacattaagatttttgtccaacatgggaaaaaatagctggtatttctggtaagtcctagctgaaattaattccttgaattcagggaccaaccactcataataaagcacaaacaggaaaggagaccaatataagaagaccagattcatgtctcccttctaatgttactcaaggattttgctcattcccattagatgaaaatcatccaccctggttgaagtgctctccccctacctttctcttttaatctttttaccaaggacatattgttgaatgtacatacatagataaacagatgatgtaactccatgagttactatttagtagccacttgaacagcagatttacatctgattcaacatgtaataatcattcaaaaccattaactacatgaatacaaaaataattattcctatacccagtaaaaactgacaattaggaggcattacaattcctgtctttaaattctgactccttgaagtctatactagacatgcccaggaaaatgctaaaaccggcctggacagctctggccatgatgcacatagtaacggccacctattttgccatcacggatgtgttgtaggattaaaaatagacttatgcaagtgacaattacaagccatttataactataaaacttaacaaaatagctgccagtttgctgaatctgaaaaagaaacctgtcacatttactgaattagtttaaccatagaattcagatgttaaaagaaactagactaaaggaagaacttctacaagctctcctgtcataagatttttacagtttctcttgactggaaacatgtaggttgctacaaaaagttactaaaggaacttttatctcacatctgccctgttttcctgaactttacgtaaagttcttaactagcttaacttaaatttaacaaacaggttggccgggcactgtggctcacgtctgtaatcctagcactttgggaggccaaggcaggtggatcacctgaggtcaggagtttgagactggcctgggcaacatagtaaaacctcacttctagtaaaaatacaacaattagccgggtgtggtggcacacgcctgtaatcccaggtactcggcaggctgaagcacgagaatctcttgaacctgggaagcagaggttgcagtgagacaagatcgtgccactgtaccccagcctgggcaatagagcaaaactctgtctccaaaaaaaaaaaaaaacagacagacagaaagaaagaggttgcagctgtacttttaaagtatgaagtaaattccagttaagtacacaggcaccttttgttagtaatatttggaagtttcttgctgtttaaatacttgtcccataacaagcagttcggggcgggggggtcccacaggaaattcagggactcaatccgatactggagggacccactaatgaatacgttacccatataactctcttaataatcaaaatctataataatccagggagacattaaaaaaatccaatcaaaagaactggcaaaagaataataattatttagtcctttcctggagaaaggggtagggaatgtctctaaatcaactttgtatcccctatacttaataagctatgcctaaatgcacatgttggtacacagtagttaatcaatatgtacctgttgaaaaagtgaaaatataaacattcatttattattctattaatgattcctgggtatgctgcgccagtgttcagaaaaaaaaaaaatcccacaatttctctagcagtgccatgtaataaaaagtttaagaacagagaataatgatagtactagatagatttaaaaagaaaacaaaaacacagaggataagaatttagataatcttgcttcaattcccagcttggcctctattcttatcagtatttatctgacatttggactattttacaactccaggcactggttctgcatcttttaagtgggtattacaataataaaattattagaaaagagccatttgcataacagctcaagtaagcttagcacgcaatctgattttcagtaaatactccataaatggtcattgtggctagcttcatagtcaaatcctatgtaaagaatcactgataaataaatactgatctacaaaaacacatctgtacttctggaaaataagttattttaagtaagttcttaagcattactctgttaactagtaaactaattttaaaaacaaaacggtagtgagtgagaattgcagtatgggtggatatagactacaaggaagttgggttttagtcctctccttcaaacttaactaggaaaagtcaaagctcagtctaggctttaggtttcctatttataaaattcttttttttctttaacgatccttctaacatttctaatacagtggggttcttaaaactacaaagcacatttcatcagcaaagctcaaaaatatgtggacaaaattttttttaatatcagagaaaacaaattcatattcatttgaaatagcatatattaatggtggaggcagtgagatgaagaatatgtatataactgttaacctttagcttaagctccaaaactataactttctaggactgaattactgtccctagagtcacagaggaaaaactgataataaaggctttttactacaacaaaaaatttaaaaaaaccttccctactgctctgcagtaagaaaagaaggtgccagccccagaaactaaccatattagaaaaatctcagtgagtgtgtagtgttaataaaatctgcctcatggcaagttattaaatctttctgaaacattagaataagtaaacataattagtaaaatctcattacccccagatcctgtacaagtgtgctatatctattacatcattttactgaattctacgatacatgtaattttaaagggaaggaaaaataaataaaaaataaatgacaacattaaaaagtgatttaaaataaagttttctgccatcaagaacaccaaaaaccacataagagcaaaaaagaagtgggctgtatcacatcatgcattagtaaagtaatccaagacagcttatttatacaaaccccagaaaacgggggggggggggggaattacaaagatacatggtttcaatagaaaccataggtcttaactacatattagtaaaaaatcaagagcaatttgaaagcagagaaaaaaaacttcaagaagagaatgcactgaaggggttaaattacaccaacttacacacaaaagcttatactgcttacaccctacaaaagcatgtaagaaacatgaaaaccaacatctaacacagaaaacacttagaaagcctgtacttaagaataaagttaaaaaaggaagtaagctggaaaaaataaaatcataaccatttcataatcatcacattttcaaattattcactcatcactacacttgcattcaacatatataatttatcacataaaagcaaaatctctaagcttctccctaccttaggtttttagtcaaaatgaatgcaaacaatcacgtgggattcagccaagcagtgacgttaaattctgctctgtcagagagagcatctgtcaagcccacatttaaactgctgcctgcctgtgcagcagctgaggaaccgtggatttcatattatagactaaaaccccattaaaactgctcaaaatccttcctgcagctgccaggcaacaacgaaagaagagaggtaaatcctattcttttccaatacaactgaagcactacattttagctctggctgctttacattgcagctcagtgttattagtagaaatayggatactgagacgagaacacagcactgcattgtccagccaggaaaatagcagatgtaaaaagcttcaatgcatcaactgtcgggaagagtcaacagtgctacaagcagaacgggcaactacagctcttttgtttaacgaaagagagaaaatgaaagaaagggaaaatttcagaagactaggacccatatgaacaaggagggtaactcgaagacaagcagacagatggacactttggatactgtgaaaagcaatcgcaggaggcagactgttgggggatgtgcgcatgttcgatagcatcttttttgctgaagtgatggcgtgccaaaagtattttcagtgggcataatcctcttcacataaatggcctgaccaaggaaggtatgtcaatatcttgtgtatgatagtcatttaaatgtgttacctttttatagccctggaggcactaatacctgataagcaagttcatacagctcactgcccttgaaactatgaaaaggtttcttaatatctgattttaaaatttgtcattgtttagaagacaagctgtcactgctttatgcagctaaatatgtagcttggagtaattctgggtaatagacatcagagggaaaaggcaaataagaagaagatgtgtttaaaggattccttaagaaattaaacttaaaaaaaaatctgtagccctttacaaaaaacacagcaatattctatcaaattaggtcaaactgaatccttatctagtaaattaaatgctctcttaaaaatggctatcaaaagacacaatgcagtgaaatttcattaaatagtagcaaggaaaaccttaagagtttttttttcaaagtccttttaaaacaaaaccttaatatgtaacagcttttagtaacaaaatcttccccaacatctccctaaatgaagataatgaacacaaccaaagagagtatcaacaaattttaaatattaccaagctacaagaagatactaaaaggaaagcattaacataagatcacataaggtagtttgagtttatgcataaccccacaatagagcctcgtgttattatagtgaccatgaatagaactttaaacaaagggacatcaatagtggctttaaaaattaactattttaaatagcttacattttatgtaaaagactgattccaaatgatcaaatttaacgttgtctctgattatcatttcagaagtgaaattcaaaaacataatatggaaatactttgatacaaaaatatccacaaatggcaatacaaggtcaaaaaattaaatataaatgtagctactatgcttccaggctatattaatatgcagtaatgaactaccgccactatatgtgtgtgcagggcacagataaaccaaataaactattttagcaacaatcatagaacagcaactcagggctcaagaacttaaagatatttctaaaattctacaaatctatcaaagatcctgatttttcctcaatttcacaacacaactcagtaattatctaataatcacaaaaggcaaacattttttaaaaatatgtaagtactgcattccaaaatgaagattaaacaagtttaccagactctattacacctcaacatcactctcacccatgaatttttattctaataaagactaataataaatagtactaaaaaatatggttgtaaaaatttcaagtccctcttggtaccttaatctctcaatattgaagtcaccaattaagcagttttataagctatacatctcaaaacaaaagtgtaagtttttctattaaaccatcaccaacagactaaagagatcaacacttttaaaagccaaatgataaaaactgagtgtgtactgaacrgcattttacagtaacattctccccatgaacttcatccacaagctataaatacacattaataatgtgaagatatcaaaaaagaagagataaaccaaagctatttctcttctaaaaatgtaaaagtgcagaactattttgcatactactgaactttcttgttttgctctctctttttaagaattaaaatacaacaggcaataactggagaataattttatcatttaataaaaagcaggcatggttattttaattttatattctttttaacaaaaaaatttataagacctgagaatcttttaataaggaattttttaaaggctagacacatgcacttcatttatcaatgggagatttatagttatatatggatttaatatctcaacagcttaacatctaaaacatacaaataccatgaagtctaaattaagatgcatctctatcacatactgttacaaaatcatattaggaccaaaactatgtatttatgctacattacaatatgcaataatttgctgttttctgtaatactaaaatactttagagacatcttcaggtatattgttcttataaaagcaacataaattatgattattttccatcatttatttactcagtcctttaactcaaacatccattcaaacatctgaccttattgtttactccttcttacaccatcaaatttacactttaaaaaaaatctgtataattggacttcaaccagattccaagtattatcatatcagcagaaaacagataacttatctttgtaacacttagaacagattatcaaataaattttaaaagcaacttttgtttcttttgaatttacatacataacccttatatctactgatatccttatgaagtggagcggagagtcattattatttaccaaatatgtcatttggaaataaaagcttaaaaatagttccctggtctaaaaagaatggccagctatttagaagtacaagaaggaaaacactgagtttctaaatcagaatgctcagctctattattttcagcttagcttacagcagaactatgttttgttggtacagtgaatagccttggttttcattacagtaatgctgagtttaaattcatataaacaaattctaacaaatagcatactagatgatttgcttttaaaattccaaacttaaaaaaattgttcacatctttcaaaatgcttaattttttacattttagaaatattataacttctaaaagtactctgtaatctcagaaactagaaatttcaaacgctggtgcctatatggttggaccttagatatttgttcaaattcccacctacttgctcctcctagtggctgctactataatagcactttcattcatttacrtctaacactttcaatcaatattttcaaagtacttaacgttatgtatgtgaattttactttataactattcaattacatgaggatttccatgtaaattctatttcctagaagtaattaaatttatgccaaggttaaacaaatttaatattaaccatgactctctcattatcacaggctaaatacatacatgtatttatgcatacactgtaatttcaaataaatgctcctgtattaaaactttttaattgatttcttttgcttaaagaagtaattttcataataaaaagttggaaaaattaaaattacatattcatcactccttgtcaaaaagttttctcctgttttaatggaattcaaactatacctctttgcccacctctactccctcgacatattggtccccaaaaactaaaaacaacaacaaaaacactaagaacaaatgtgaacaaatctgtgctatgcactgaaaaccttgttgcaagataacataaccagttcttaatatatgccatcatgaacctcacatattgccatctcataacctttttaaaatatagggctctaactgtgctaatgacaagttctaaaagtttaacaaattatctgcatgtaaatttagaataaagcacaactcaaggatatttaaaaatatattgtgtgaaattcagaattttaaacagttggtttcaaagtagctcttttaattctaacatggagactcaaccaagatatgtaacagtgttctgccaaagccatagataatcaaagacacttacatgctgtattttaaaattaatcttaagtctaagaacaattatatcatgaatacttcatatttacaaagaaaagttaaaatttttgaaagtgttaatcatttattactgtctaaaaatcctacactgaagttactagaccctgaaaattaattttgacaggtgcatcttctcattgactttctcaacacagtaggggccaatggaaacatgccaagcagtgtactgtgactaacagaactctgccataatcaaccttgcaccgtctgtcccacaactgatacatgaccattttacaaaaaaggcctctgactgtgcaccataccaccaatagtatgtcaaatcaattttaattaatgccaataaattttccatctgctcttaaggcgtttttacacaacccttctcagaaatctagtaacatttttctcgaatacattcaacttttaaatctttaacttgggtcaaaagtacaaatgaccagtgtaacaagacaatgaaatgaatccatcacctcatctctttaaaatgctcactgtgctacaaaggtatatttttaaataaattaatcttgttctcagtgatgttatgttgccaaggggaaataaattacaagcttcgttcctgggttatattttcacagcttaagacattcctatttgccctgatcatattagtacccaaagtccctttcaggcagttctgtaaacttttgtgcttcatttttatagaatgactacaagagagacaatgtgactgaattagaaaatgattgccaaagaatagtattaaggagaagaaaacatttttggtcaccaatctctcatataccactactggatatttacaacatgcttcagtggaggagaagacactgctgctttgcaaagatgacctggaatgccaaaaggtctctgttccgcactcatcttattggagtactttctctagtgtttctttttgctatgtttttgtttttcaatcatcatgactggctgccaggcagagctggattcaaagaaaaccctgtgacatacactttccgaggatttcggtcaacaaaaagtgagacaaaccacagctcccttcggaacatttggaaagaaacagtccctcaaaccctgaggcctcaaacagcaactaactctaataacacagacctgtcaccacaaggagttacaggcctggagaatacacttagtgccaatggaagtatttacaatgaaaaaggtactggacatccaaattcttaccatttcaaatatattattaatgagcctgaaaaatgccaagagaaaagtccttttttaatactactaatagcygcagagcctggacaaatagaagctagaagagctattcggcaaacttggggcaatgaaagtctagcacctggtattcaaatcacaagaatatttttgttgggcttaagtattaagctaaatggctaccttcaacgtgcaatactggaagaaagcagacartatcatgatataattcaacaggaatacttagatacgtactataatttgaccattaaaacactaatgggcatgaactgggttgcaacatactgtccacatattccatatgttatgaaaactgacagtgacatgtttgtcaacactgaatatttaatcaataagttactgaagccagatctgcctcccagacataactatttcactggttacctaatgcgaggatatgcacccaatcgaaacaaagatagcaagtggtacatgccaccagacctctacccaagtgagcgttatcctgtcttctgttctggaactggttatgttttttctggagatctggcagaaaagatttttaaagtttctttaggtatccgccgtttgcacttggaagatgtatatgtagggatctgtcttgccaagttgagaattgatcctgtaccccctcccaatgagtttgtgttcaatcactggcgagtctcttattcgagctgtaaatacagccacctaattacctctcatcagttccagcctagtgaactgataaaatactggaaccatttacaacaaaataagcacaatgcctgtgccaacgcagcaaaagaaaaggcaggcaggtatcgccaccgtaaactacattagaaaagacaattttttttcaaatgtgcaatttgtaaatattgctaaaagcatgtatagttagaactgattacatccgtaggacaagttttagttaaaactcatcacataaagaaattcaagaagtatttttttaatttctgaagaagttaattcttaaaactataacattatataacaaaaaaggtttcccaaaacaatctatttaaaaaactgtataaggagattctgtgtattaacaygcaataacaagcatgcataaatcaatggttcaagtcttctgttaggggccaataaaatgtatctgcatatgttttccacataaattttaattcaagaaatgacagtcaaaagatccttcattttagattaagcttttcattttaatatataatttaatgtaaataaaacatcactatcaattttaaggaaactttttaattgtgcaaaggataaattttttgacctattttagggttctaaatgcaataagatttagttgagttattccacaaacacattataaagttcagatgtttcatcaatgcagttctcacgaaagtatttactttttaaaaataactgagatattattttaaatttcttttattaatactttcttttattaatatatgggggaaaattattttgacatgacgtggtaaaatgtgaaaaactaatgtgtctcaggctcaagtttttatagttattaaatgtttcaaaatagacaagttttgtttcctcattgatgttaagaaccaaactcctatttcaatgagttattggattagaccaattactgcactcttaaacagcaccaccatttaatttcatgtatatctaacttcgaatatatctgtaaagataatcgaagcaaaagtaatcacttaaaggcacaaataggatgtactgttgaaaaagataaagagtgcaggtgcagtttcattcaacacatttttaagatgcatgtctgccaaaatgcaacatacgggaagtttatttcctgacagcaggtgtacacatgccaacacttaatcattttatggcmcctatttctttcttggagtgccaagtttgcaaacctgcagtttttaatttggtagatgacaaatattctgaatcaccaattaaaaacctttttgggagggatggggaaaactacaaacgtttgacaaacacaattctaggatgaacaatgtatacaatgcacttttatgaagtttttaaaaataaaggaaaacaaaaaactttactgagtgttataagtattttcacaataattttgtttgactccatcatgaattttaaaatcaagaaataccaacctactaactaaaatagtgtttttattccatacaagtatgtaaatctgtcaatcttaatttagtcagaatgtttcttaattctaataacaatcatttttacctcttattctattattaagggataaatcaccagaagagaattgtaacatttgtgaaacttgaaaacactaaaactgtttaagtgcttatctccatttcaaatcagtagcctaagtgttctactctaaatcaagtgattctgagagctgatctatgtaacacaccccagctcttggatcaagtctgtttttcacttaatttattctatatgactacagaaataccagaattacttaataaaagtcacacataaggggataataccaaatcagatcagcatgtttgacagaagacaaaaggaatccttccctcagtgtagaataatgctgatttatgcttcaaaagttttaaaaacagtgtgtgtgtgtgcatacacaggtgtgtacatagaaagagaactcaagttctatttgtccaaattatgactattttgcaggatctttaaaagatagtaatttccatctggaaaaagttttttaaaaaatgactcatgaaaaacagataacagacacctaaattcttcctatctcaagtttcaatttaaaatctataaaatttataaaatctatgtaaatttctatattcctaacattatcttgaaaaacgatagtaatctgatatcagacactgtgagctctcaaaggcgactggatcaaacagtaaagtgtctttgtactgttgaaaatccttactttaaaataaatattctattaatttacttttgacttttccgcaacaatactcaagtcgttttcttaagcaaaataagctgatagtgtatataaacatctcaccacttgttaactgtgtcttcttcatcccgacactatgtgatttttatatacataaaaatataattttaaatgacagctttgcttttggtcaaagggtacacaaataactaatctttatgttcaaagtgttaataggtacttaagaagatgaaaacaccaaaactttcaatacttagaatacttatttattttgatcaagtatataagtggtgaaattctaattcaaccaaataattgagatttctcctcacacctctttgtatacagcataatcacatataatctgaactgcaattttattaatgtgctatttccagcaaattctacaaaaataataccagtaacagcagtagaaactatttactgattgtacaagcagtatgcttggtactgtgttaaagcactttacatacatgatctcatacaaccctcaggaacaacactaagacaggaaggactcgtgtaagaggttaaatacctaagatcacacagctagtaaagcagcagatttccatttcaaggatcatgttctttttttttttttttttttagacagagtcttgctctgtcgcccaggctggagtgcagtggcccgatctcggctcactgcaagctccgcctcccgggttcacgccattctcctgcctcagcctcccgaatagctgggactacaggtgcctgccaccgcgcccggctgattttttttttttttttttttttgtatttttagtagagatggggtttcaccgtgttagccaggacggtctcgatctcctgacctcgtgattcggcctcccaaagtgctgggattacaggcttgagccaccgcgcccggccgaggatcatgttcttaatcattacactgttctgctattatttcacatatgacagctgatttaaaaaaaaagtctagagctgagcaaaaatggtctgtccctttatattcccattctctgttcttcatcctttgccaggcctccaggcttcataccattttcacacactggaggggcacctgatattaggaacaataaagacaagagaaaagagagtatatctgatcccccaattattttcccttctttccagttgttgtttaatggtgacaagaaccattgcaaaacatacacattactgcttatctcttgcttctttgggccctgaggcacaaatgcaaacagcaggcaggtggcacttagaaattataaaatttgcttctttttaaagaacaactgctaatttttaatagataaaagtagaactgcatttacccatcctactgtttggtcacctaccattttgtcatgagaaggtaaaaccagttcatccagactatttggataaattttctattttttactgtttaactaggaaatttcactatgagattaacatagccttaaaaagtagaaaaaaaattcctattgacagacatttctaaggcatctccaagaatttcaatgtatcatttagacattaatcccagaaggcagatgatgtatattaaatactaaaatgggatagaaaacccactaccaccaaattttacagtaataaaattgtttgctgctcctatgatgattctttaatgctctgtaagacaatgtcctctgtctgctatgccacctaaacaaatccttggcaaatggatccaaggacaacttctcctaaagaggacatgctgaagattttttgtctgttcataatcagtatccatgaccaagcctcaaaaaagcaaaacagttcttgtgtatacaacataatggagttgatgctatgttgcaataaatgccttattactgggaaaagatcagggaaacggtttaggggcctatgttcctagggtcacaccaccatgagggagggccaacacagccccaaaagtaaccacaaaaactgactgcctgggcctgatacaatgcaaaatgttgtctgagcctagaaattaatgaacaaagaaaactagcccaatgtttcacatttgcttaacatttaaaatttgttttaaaaatgtgtttaaaattttattcccttatcagggatctgtttgtcttctgaaaaggttaatgaaaaaaaaataactacaatcttcttcctaacagattcatgcaagagagggaagagaatgactcctatatacttcagagagaaagctaataactgagcaaaaaaaagacaagtaaacttgatttttacaaaagtaaagttttaatcaaaggtcataagcaaaacctctaatttagagtacaattatacctctgtatctgtggggaattggctccaggactctctgcagacaccaaaatccacagatgctcaagtcccttttataaaatggcatactgtttgcatataaaatatgcacatcctcctgcatactttaagtaatctctagattacttatgatacctaatacaatctaaatgctatgtaaatagttgttatgctgtattgtttaagaaaaaaataactcacacaaaagtctatacatgttcagcacaggcgttctgggtttggtttttttgttttttgtttttaatattttcgatcggcagttggttaaatctacggatgtggaacccacggatatgaagtgccaactgtgtctgtatgtctgtaagtcatgtacacttaatatgaactaaaacctaagttatcttctatcatcacctttgccacttctttctcttgctattgcccatatccatttaacccaaagacttacttggatccctactggaatccatctacttttcttcatcttgcccctatttaaaacagcatcactcattttttaactactgcaatacctttatagccagtttcctcatatccacataatctgttgccaatattacagccataatgttactttcaaaacacaaagctaggcatgccatcccactgcttcaatggcttctcaaggtactatataccaaaatccctaaaacccttggccagctacaaggcccataaatgattctcttccttgctaaagctaatccctctacccaatcttttgatcccattcataccttctatctcactgtaaattattctctctccctcgagacttatttaaaagaaaaaaacaaaaaattcctggataaggaatagtgaattacaacttgactcaatgaaacagtctcactcttttcgtttaaagcattttcatttcatttaaaggaaaatgttttacagtatcaaatcaagttttctctatagtgagaaagggtagtagtgacatggagagaaggaattccagagatgtcagcaagtaaggtctacaggccttcatgatggctggatactagagatgagagaggagtaagtgacaaggatgatgcctagaacactggcctgaacactgacagtgccatttactgagaaagaaaacactgtataaagaatctgattcgccaggaacaatgtaataaagaatcaccaagcaatgtatgaaaggattgtcaagtggcacttgagggcctatatattacaaagcatcattaacagtaataatgaattacaattaccactctacacccatatgaaagtatggaaaataactaaaaatataatgtataacataggcttcagattcatttgaaaatacttttcaagcaacatttacatgcaaaatactctgttctcagtactggagatatagtggaaggcaagaaagacatagtttctaccttcaaattcatatatttaaagaaagattatcaaaggaaacaaatgaacaacaagataactagaagaaaaagggtcctgaaaaagttgctgatgaactgagatctgaattatgagaaggaatcagtcttattaagagcaagaggaagaatgttccagacaaacaactggaaggagaaaggctaagaggtaaagaacttgtcaagttgttgaaaaacttagaaaaagccaccgagaagacttgtagccaagacctttcttaatatgtactgcccctttagagcatggaattgtggatagaattcagaagaaacgtaatgggaaaaaaatttacaattttattttcattaatctcttaatgaaattaagactttcttcaggaatgcagataaaccacagtattattattataaatggttacaactttgccaccaacaaaaatcagattttttcataacatattagaataaagatatcccaaaattacatatgctcattagacttctaaaatctggtatttatcaaatttgccactagatcatgttacataatgcattagtaaagaagcacaaatcatgtcataaatgtgtttttaaaaaatatcttgattttactttaaatacaattggttttatcttatgtattttcttttatgccttaaaaatatattcagaaagaggattcataggatttccagtctgccaaatgcaccaatggcacaaaaaaattatgaactacagcaaaagatacttgagattcctaacaactaaacgcaatttatggtgcttgtttgggtcttatttccaacaaacgaattacaaaaagacaattttcaggaaatcgaaactgtaaaatgaactgtgtgttaggattacatcaatattatttattttgttgtatacaatggcactgtggctatgtaaaagatgtccatatgtttaagagaggcaaagtgtgcaggaacaaaatcacagtgtttagattttgcatttaaatactttagaaaaaaaaggaagaggtggaacagataaggagagcctttaaaaatggtaattatacaatctgtgtgatgggaagatggaagatcacgtgctattttctctcattatatttacgttagaaatgttttataattaagtaattaagaaaaccaagaaaaagaaatagaataaggcatacccttttaacagctgcttcacaataaggagcctctctaaaggaaaaagatcacaaaaaagcacaacctgcagagagcaaaccagagaacaagactcctttctctaggcttatgttgccctaggccaggttgcctgacttgatgagtgtgcaatgtaaccagggattttcctcttttctccaccactgtgctcaggaagactgcaagaatccctaaaacttgctatagtattcatattttttgactatgtactctatcttaaggcactcatgcactcatttcaaagaaaaaataaacctaaatccattatgtcagttgtctgggcctagaaaattaagtctttgatcaaactggtacatcttggtattagatacagcaatggtttaggaacaataatcttatagtcttaagttaccaagtaacaatcaagtttaggccttctatttaggtggacctgacaattcagaacacaggatggcaaaaggaagagggaaaaaggatgcagtgcca

SEQ ID NO: 96041 - DNA, 20005 bp, Homo sapiens
atggaaaatggcccttaaatgccaagttaatggattgaaggcttgaaatcaaagcagtaacaggatgaaatcaatctggtgacaggtgtacaaagtggagtgggataagaaagtcaagatgatgaagggagacagctcttgtgattatttcaagtgtgacacagttcatcttagataaagacagaaatgagaacaaagctcaatagaggtgcccccctctgattacactggtcacattacatgtcactgtccctaaagctcatacctgggactcagggtcagcatcatcaccccaatgtagcgccgctgggacccactgattccggaggaggaatctgtgacagagggacaaatgagccccacccagctacatccttccttccytgccctcttctcccagtagaccaccctccaggaagtcccactgaatgcccttcccctatttccaccacattaaaggaacccgtttccccataaggcaggctcactcttcttttccccacgatgcagaaactctcgaagacgatcagaagggatggcaaaggagattccagctgtgaccttcatggtgttcactccaatcacctccccatcctgcagggatacagcccccagttccctagcctaaacaaatagtaggggatgggggcayccgaacaaaagtaccagcaagtgttggggagatctggttggatattgagagatagccaacaaagaactgctcagaaacttgaccaaacatccttgaattaggggaaacctacccttcccacactgacctggggcagggattcttggaaggaaggatgtctcactcaccaggttaaccaggggacctccagagtttccaaactgtaggacaaggagaaaacatgaaagagatctggggattctaagtctgggggcataccaggatgtaggtactttctccaaattctcttctttctcagcccatgaataagtggccacatttttgcagcctaagctctatataggctcatccaccatatatcagttggtgcttgtaccacacagcctctcccccctcccccatcatttgtcatttctctcctatcaggacgcacatcaatagctgcatcagtttgaatgtattccacattggtttgggggagtcccaggtctctggctggacgctgagcagagctaacaatgccggatgtgatcgtgttctgcagtgcaaagggacttcccatggcaacaacaaactccccttgccggacatcagctgagcgtcccagaggcagcgtggggagaggctcctaagggagaatgggtaaaagagacctgtcatctgaagatgcgagcaaataagcagctccaaccagacctggcctaccccagcccccaccttagtctgaatcctcagcgttgcgatgtctgccacgggatccacagctgtgaccacggcctcatacgtgtcgccgcttagcagtctcacacggactctgcgccgatcagccaccacatgggcgttggtgacaatgagcccatcggcagccaccacgaatcctgagccgttcgagatagggacctcgcggcccaagaaagggtgcctgaaatggagggaaagcacagataagaggaggctctgacccctcctacccgcccgccctccagcctgtggcttcagtgcctcccggtctacccccaccattaccggtccaggatctcgatatagaccacsgcaggtgctgtcttctccaccacatctgcgatgaagttgtactgactccggggagaagcgggcggcgggctagggacggcggcgaggacggccggaggaccccgacccccgccccacaacaacaacagcactgcccccccagcgcccagcgccaccgccagccacgcgcgcgaacgggttccagagttctctgaggcctcccgggtcctggtatctggggtcaccgcagtcagttgtgcccggggacccggggtcccagacgtcaggcatgctcggggttcagtgaccccaacagacaaccgggcccagagactgggggtcccataagtcactcgggcccgggggtcagaagttcctgacgtcagcagggcccggaggtcaggggtcaaacggggtctcctcccccagcgaatgccccccaaagcccgccatgcccgaaggctccagcctgcaccccgccccgccctcggcrcagccatcagctccgccttggctgcctcctcgcccgccctactcagaggcggcacccaggacgcgagcaggcggacagtaggacgcggggcacgccggtacctgaagtccttcagaagtgcacgccgggaccaggattccgggaggccgactcctccctgccccacgaatgccgggaattgtggtctccgccggacgcgagttgtgagacggcccaaggggccgcggggtatgctgggaccgctagcccttccggcgcgcctcaggacttcgggtcccctcaccccgggcggatgcccaaagactccgccttcccaagagcccctgcggccgggcgcgaaaatggcggcggcggcgacggccgggcgctcctgaagcagcagttatggagcttccctcagggccggggccggagcggctctttgactcgcaccggtaagagacccggcgggaagagaccgatccccgcgtgctctcggccttcggcgcctgaccacttcgcctctcgcccccaggcttccgggtgactgcttcctactgctcgtgctgctgctctacgcgccagtcgggttctgcctcctcgtcctgcgcctstttctcgggatccacgtcttcctggtcagctgcgcgctgccagacagcgtccttcgcaggttccgacgcgggcgttcggggagtgtcagagctgggtctggcccgaggccacacagtcaccacctcctgtgtccccagattcgtagtgcggaccatgtgtgcggtgctagggctcgtggcccggcaggaggactccggactccgggatcacagtgtcagggtcctcatttccaaccatgtgacacctttcgaccacaacatagtcaatttgcttaccacctgtagcaccgtgagtgagagcgaggccgagagcgccacggggcggttccctggggcccagctgaaggcccccctgtccccactcgcgttccccatggaggatactgagccttacccctaaccccgatcctctacccaacatgtcagttttttttttcattttcctcaatatttttcttcttgctttctcttctcctggttcccagcctctactcaatagtccccccagctttgtgtgctggtctcggggcttcatggagatgaatgggcggggggagttggtggagtcactcaagagattctgtgcttccacgaggcttccccccactcctctgctgctattccctgaggaagaggccaccaatggccgggaggggctcctgcgcttcaggtgggtttagcacaggtatggggcgccagctgggtaggtggtcaagcttgtgggcccttgagtttttacaactttcttcggcccttagaccccatcatctccagttcatttcctttctgtccactttaagttctttctcctgaatcccttcattcttcaattatgtgcttgtagagtttgacagttgcctgttataaggcaggtgtgagctgctgactaggctggctggattcccatcctactttctccttcctcttctagttcctggccattttctatccaagatgyggtacaacctcttaccctgcaagttcagagacccctggtctctgtggtgagtgtgtgttgaacagggaatctctggggcttgaaggggaaatttcccatccctggccctggcttaggcctcatctcatgccctcccctcagacggtgtcagatgcctcctgggtctcagaactgctgtggtcacttttcgtccctttcacggtgtatcaagtaaggtattaactgtcctcacattttggtcgctggggagaggctcacctcaaggtcaaggaattagtggcctctgccctgtccatttgtagatctttatatcaaggttctaccacagaggcaacacaaagtatttacagtatttactattttcccacccaccatgcaaagaggtaccaaagtggggaatggtgacagcctctaccctgggtgcccacaacatagccctggattgtttctttgcaggtggcttcgtcctgttcatcgccaactaggggaagcgaatgaggagtttgcactccgtgtacaacaggtggtcgggtgcacagacagggtggaggcggggtccctgcttaggaggagagggaggaaagcttgagatcttgacacttccagtcttccaattctccctagctggtggccaaggaattgggccagacagggacacggctcactccagctgacaaagcagagcacatgaagcgacaaagacaccccagattgcgcccccagtcaggtatgtggtctctatacattacagcttttggggtttttttttttcggcctactgtgattcctcccctatttctgtgctagttagcctctccttctagttctctacttaccagaatttcttttttctttttttcctttttccacagcccagtcttctttccctccctcccctggtccttctcctgatgtgcaactggcaactctggctcagagagtcaaggaagttttgccccatgtgccattgggtgtcatccagagagacctgggtatgggaaagggtggccccacactgggagatgggcacagggaggaaaagtgggttgtgaaggaagaaagtaagtagggagtggactcccttctcttttctccccagccaagactggctgtgtagacttgactatcactaatctgcttgagggggccgtagctttcatgcctgaagacatcaccaagggaactcagtccctacccacagcctctgcctccaaggtgagacccaggaaatggtcagatccaagtgttggggtgagttgggggcaggctatgtactcccttatccctgacctttcttttttgatcctgagaccctagcatagtgcctctcttgcaaagtaggcattcgatgcgtgtttaatgatgatgactccgcaagccctctgacattgtgatcacctcagtttcccagctctggcccggtgacccctcagccaacagccctaacatttgccaagtcttcctgggcccggcaggagagcctgcaggagcgcaagcaagcactatatgaatacgcaagaaggtgagggggttagaggacaattaataggatgtggcaaattggagaatggaattatggagctactacggcaaagcctgaataatatctctccctatgtcccacaggagattcacagagagacgagcccaggaggctgactgagctcaaaggaacaggatggcacccagagccgcaggacggagactgggggcagccctcacccaactcacaacaggctggatgggtgggtggtaaaaagggaaggatgaggctcccccaatgtcacattaaattcatggttttcattcaaggcatctgttgtctctctcggtctcaaaagccctgtgagtgggttccttattccttggctgcgggggatgggggtgagagtcttctcgtacatttgaagggggtagtcagactgcaactgtctaaaatcacctcctcatgccaagtgatgagtgataaattaaggaagtgtaactgaactgaagacccagcttgggtgatcagcccaggttttggaggaagctgctgcaaaactacaagtcccagcatgcctttcacaagcacactacacatcatctatagagttcacacatgctcagtgtggtagctggagcctgttttccataggttcctgactaggttaaataaggtggagcaaatagccccaccccaaaagcaggcttcaggatttgaagtttgagcccatccctgaggtagagccggaattyacctttgtacttcacacggtcagggttggtggtgactacgtgggtctggagctgactgccgtcctgacacgtcctagagctgcaagcaggtttgaatccaggatccctgtgactctgctgttcctctccccaccccctatattctttatccttttcccttcaggactttcccacaggttactaggtctcacataatttctactgcccttgaggacccctgcctaagtaagatttctactacctgccaacggggtaatagtctcaggtagatttctactacctgactatagggactgtcgactaactctcagtagccctttatcaaaatacctagcactgtttcctggcaggaaatgctgggaagggtgggccccagagcatgatcaactgaaggtagaggttaaggatcagggctgaggtgggaagatggtgtcggtcaccaaatatgaccttactggctgctctgccttctgcaggtcctgccagagagccaccatgacctctcagcctctcaggctagcagaagagtatggcccaagtcctggggagtctgaactggctgtgaacccctttgatgggcttcccttctcttcccgctactatgagctgctgaagcagcgccaagccttgcccatctgggctgctcgctttaccttcttggagcagttggagagtaaccccactggagtggtgctggtgtctggggagcctggttctggcaagagcacccaggtgtggtgggggttgtgggggcaggcagattctgggagtggacaaagggaggacaaagggaggacaaagggaaagtggcctttccctgggcaaggggggactgggctgcgtggggtcatgaggaaggtgaacgaagagagatgggatgggttaggttggccctggaggctggtgaaagaccaggggactccccaaataaggaaagattaaagtggccatagttccctgagcacttctgactgaagtcctacatcttcctcactggctctccttccctacttctatcccagatccctcagtggtgtgcagagtttgcgctggccagagggttccagaaaggacaggttactgttactcagccctaccctcttgcagcccggagcctggctctgcgggttgctgatgagatggacctgaccctgggtcatgaggttggatacagcatcccccaggaggactgcacggggcccaacaccctgctcaggtgggggcctctgcaggccttacccgaatataattccccttattcagtagaaacaaacccattcctctggcatctcaccataccctcccttagcccaactcactcttttttattttatttattttggagaaagggtctcactctgtcacccaggctggagtgcagtggtgcaatcacaactcactgcagcctcaacctcccgggctcaagtgatcctcccacctcagcctcccaagtaactgggaatacaggcgcgcacctccacgcctggctaatttttatattttttgccatgttgcccaggctggtctcaaactcctgggctcaagtgatccacccacctcggtctcccaaagtgtaaggactacaggcatgagccaccgtgcctggccccaactcactctaaattgtgtgtggtgcaatggctaaaataagcccttgaatcccagccaggggcctcagacattcagcctcaccctcatcagaaaaatttcacttcccagctggcgtataccttgtgaacaaagtgttctcagcggggttgtggggtgacagttatgggtccataggctcaggaagtcacagcatatttttctgaccttcaatatcaaaatatacgtcccttggggagaagattccctgagcttgtggggctggtcagtgtccacactgattcctctgcccactaccaatgtcaacaggttctgctgggacaggctgcttctgcaggaggtggcctcgacscgaggcactggagcctggggcgtgctggtactagatgaggctcaggagcggtcggtggcatcagattcactccaggggctactgcaagatgccaggctggaaaaacttycgggggacctcagagtggttgtggttactgacccagcccttgaacctaagctccgagctttctggggcaatcctcctattgtgcatatacccagagagcctggtgagagaccttcccccatctactgggacaccatcccacctgatcgggtggaagctgcctgccaagcagtgcttgaattgtgtcggaaggagcttccaggagatgtgctagtgttcctgcccagtgaggaggtaaaaaacaaaacaaaacaaaaaaaacagcctgcaaaatgagcctgcaaaaggaggtactcatcatcatcttccagtcctgaggaatgggaatgggagcaatgcctcttaggaacagtagagttgcagtatttactctccgttggggtcccagagaaaaacttgaggatttcagggtaaagaggtttaccactcacttttttattccctttaatgcagagatttgtgattcagtgaacccctgaaattataaaaccttcaactttatgagtaatttgcattttctcagagtgaagggccataactttcaacagtctttcaaagggatctgtgaccccaaaaaacgtgagaactgccctaatgccccacccacccttcttctcaggaaatttccctgtgctgtgaatccttgtccagggaggtagagtccttgcttctccaagggcttccaccacgagtactgccccttcacccagactgtggacgagccgttcaggctgtgtatgaggacatggatgcccgaaaggttgtggtcactcactggctggctgacttctccttctccctcccttccatccaacatgtcatcgactcaggactggagctccgaagtgtgagtgagagagagagatagcggtggggtagtaaagacagaaatggcccactctgatctgtcttggccttggttgggggaygggcaacaggtttacaatcctaggatccgagcagaattccaagtgttgaggccaatcagcaagtgtcaggcagaggcaagacgattgcgagcaagagggttcccaccaggtaagagcctttgccctcactgaaataaaaaacccaagagtcaccaacatgcaagccctgagaaatctacagtggtcttctttcccaggtctttttcccctcaggatcctgcctctgcctgtatcctaagtccttcttagaactagaagctccaccattgccacaacccagggtgtgtgaggagaatctgagctccctggtgttactactaaaaaggagacagattgcagagccaggggagtgtcacttcctggaccagcctggtgagcacctctcctgcccaagcactgccatctgaccacccagttctgaaacttcatatcctgtaagccctgtttcctcaccagctccagaagcactgatgcaagccctggaagatttagactatctggcagccctggatgatgatggggacctgtcagatctgggtgtcatactatcagaattccctctggcccctgagctggccaaagccctgctggcctcatgcgagtttgactgtgtggacgagatgctcaccctggctgccatgctcacaggtataaatcgctgctgtaaatccatagctcttgaaaccacttcagcccttcctcttgggttttggtgctcctgaggctagccctttcctctctgctccagttgccacccctcacaatgcctaaagaaccaggcttagtcacccatctccctcttgtctctttagccttttttctctgctggttcttgccctcagcatgcttaaatctctcctaatctgttattgctaaaactcacacacccctcttcctcaaccctatcctccccttcagctatgcagcatgatttctatcctgttctaactggtgtattgctcacccactgcactccagcttcaggtctaccatgccagtgaaacagctttcaactcaccagtgaccttccaggtacctaatccagtggatacttttgaacccttattcatgaccttcttttgacacttgagattgctgaccgctccaccttgaaactgcctcctccctaggcctctgtaacgctgctcctcatggatttcatcctacgtctctggtcatcccctttatcttttccttgagctctttgtcctcttcttatccattgtaaattggtcctcagggttctattcttgcctcttttgtcttctattccctgaactctctgagcaagtttatccacacccatggtttgaagtgctacctttagccttaaaatttccaaaccttgtgccgtgtatctctcacccaataccattcttcgaatctgagagacagagagagagcaagggagagacgcatggggagagggggagagagggagagggaaagagagggagagagagagagcatactccaactcctgatgaacgtttctttttttctttttcttttttttttttttcagacaaagtctcactctgtcacccaggctggagtgcaatggcatgatctcagctcactgcaacctctgtctgcctggttcaagcaattctcatgcctcagcctcccaagtagctgggactacaggcacgcaccaccatgcccagctgattcttgtatttttagtagagacgggtttttgccatgttggccaagctggtctcaaagtcctgacctcaggtgatccatccacctcagcctcccaaactgctgggattacaggcctgagcctcggcacccagcccctgatggacatttctaccagaatagttaacagtacctcagctcagaactgaactcaaatgctctattaaaccactccctcaccaccatcaccacaaaatcttttcctctctctagagtcttagattcagataatactattatctctgctgctctgctaccatcactctagaccagtctttctccaggttatttcacttttatctcctaaatgtaaatatatatataaatatattcatctgtccttctccatattcacttccagtgaatacggtaggtaggatctgccaatggtaggtcctcctcattgctcagctggttttcctcagtagcctcctaactagtaatgtgaactttttcagacacatggactctcttacttaaaaactcttcttcagccaggcgtggtggcttgtgcctgtaatctcagcactttgggaggctgagatgggaggatcacatgaggtcaggagtttgagaccagcctgggcaacataggagagaccctgtctctacaaaaacaaaaaattagccaggtgtggtggcatatgcctgtagtctcagctactgaagagactgaggtaggaggatcatttaagcctgggaggttgaggctgcaacgggccatgatcacgccacttcactccagcctgggcaagagagtgagaccctgtctcaaataaacaaacaacaacaacaaaaaaaaccccacaactcttcctctacagctactctttaccttaaagacagttcctttcctcagtactccagcctctcatgaccttacctatacctacctctccagctttatctcctgccattctgccacgtcatttcattccctccacccataccagatggcttgcagttccccaaatatgctatattattaacttacgtgccatgctgttgccacagtctaaaacatactccctgccccgtctccactcggctaattcctactcaaatttcaaatactagcccaagggtcctcatcgttttctcttacatcactcacatcctcaccacctaaagcctggattaggtatcctcctctttgtttccacagtaccatatacaaacacctatcatgcttatcaagtctgcttacctgttggtctctcccaccagacttgaagctccttgatggcagagactgtatttcatttacttatcctcaatgtttaataaagtgcatagcacctagaagttatctatgtcttttgaataaagttcccaaagggacacttctgccttttcagcattctacctgtactactatcccttcccatttcccaaatggcagattctaccttccactcttctgcctccagctgcccctgggtttacccgtcctccactcagtgcagaagaagctgccctgcgtcgggccctggaacacacggatggtgaccacagttctctgatccaggtgtatgaagcctttatacaaagtgagttctgcatccttttatagaatcccagattttccaaagaggggaaattttatgcagccagctgacagatctctatgctcagaaagaggaggccctttggctaagggttgggttatttcaggggtctcaaggactttagtttagctggtccctttcctctcctaggtggagcagatgaggcttggtgccaggctcgaggtctgaattgggcagcattgtgccaagcccataaacttcggggagaactcctagaactcatgcaacgaattgaacttcccttgtccctaccagcctttggctctgagcagaatcgcagagaccttcagaaagcactggtgtcaggatactttctcaaggttagaggaaagggtgggggtgagggtgatcaaaggagcaaaaggcaaagagaacaaatattggtaagccactttgaaatcagggtccaggtggccattcaaaagattctttagaaccagaaaggacttttcccttgaggatttgaggtacaaggggctatggtaaatgccatgaggtatagtagagaccagacaacacctagaggtaatgctttacttttcatgctctcatcacccttactctttctcaatccccttttatttttttctactgcctgcctcttcccttttatttattccgtcaatatttctgcctttcaataaggtggccagagacacagacgggactggaaattacctwctcctaacccataagcatgtggcccagctctcctcatactgctgctaccgaagccgcagagctcctgccagacccccaccatgggtgctctaccacaatttcaccatatccaaagacaactgcctttccattgtttctgagattcaaccacagatgtgagttccctgacatccctcctatactgcctattcctctccctggggccaaaattatggctggggagttagagagacagaggaagrgatcttagtggttagtaaaaacatgatctgaggagacaggatttgtggaagggctggtgagaagtttaaaagtctgcattataagagaagatgcacttttggagacctaggcaggaggagtccttgaggctaggagtttgaaaccaccctgtagtcccagctacttgggagattgaggtgggaggattacttgagtctaaggctaaggattacgggagtctaaggctacagtgagttatgatcatgccactgaactccagcccaggtaacagagcgagaccctgtctctaaaaagagagagacagagagagagaagatgcagatcatctaattatgactctctctattaggctggtggaattggcccctccatacttcctgagtaacttgcctcccagtgagagcagagaccttctgaaccagctaagggaaggaatggcagattctacagcagggagcaaatcatcctcagcccaggagttcagagatccctgtgtcctgcagtgacctgcctgcctatggaatggagctgggttcatctcatcacattagattatccctcagggtgacaccaaagcacccagacagatttagaagcccaaagtttagggtcaaatgtaaaccctggaacctgagtcccaagaaatggtagactgggaatggaaagaatggggtaaaccacagtctacatagggaaggactctttccttagccttctcttattgattggagagggactgacatgctcctcattctcttaactttgccaaacccattcttgtactccsttgtgatctataaaagatttttctatgatgccaagttttagtttggtcctgcagtgccatatacaacatccataaatcagtgatgatattacagtaaataaccagggccagctcctccaactatatagtctctagcctcttcccatctccaatcaggccttcatgctatgatcgacatagttgtcactagcacagacatgagttgtctggctacagttggtctctagcctggcctctcttccctctgtcacagtgcaccagcctccaggggacaaaggatgggggtgctagaggaatcagacaaattcttccctttcttcctcatacagcttaaatccaattcctttttaaaccttaaggctaatgcaaccatcccctaactagactttctattaacaagcttcccagcagcccagacacacccacaaggggaagtctttctaacaacttcagagacatcatgctttcctttctttcttcctaggttctccttccttcccttccccttttgtgccctcggaatttttttttttttttttttttagacggagtctcgctctgtcacccaggctggagtgcagcggtgcaatctcagctcactgcaacctccacctcccgggttcaagcgatcctcctgcctcagcctcctgagtaactgggactacaggcatgtgccaccatgcctggctaatttttgtatttttagtcaagacagggtttcaccgtgttagccaggatggtctcgatctcctgaccttgtgatcctcccgcctcggcccaaagtgctgggattacaggcgtgagccaccgtgccctgcctgcccttggactattgacttaggtattctccatcatcttgcacattgcaaaggtggttgtcgaatttggtggaaaggtttagtccttagaactctgcttttctcctcaagagttccctccctcagagattctatctgttctcattcattctatctaggtccacctctatgtggatgtcagctgatctccctcaaaggcacttctccaggatttattctctctaggtataacatttagttttgcctatacagttaattttgctccagtcttcccaatttccctttcatcatccacagcaccattgatttcctgatgctgcacatttccagtcttggaattacctttgattcttcttaagcttgtcacttccaaattattttccaaattctcttcaccctaactccactgggcccattaactttgtccactgtttcctcctctcccttctctgtccctatgtgacaccggagccagattttctctttcgttgggtgtgtaagtatccgactcgcctcctgcccgggcgtgttgccggaggatgtggccagcaggctgaacacacatgacaacgtgaggctcaaagtcaggaaggaatccttagcgattattttacagttgagggatgagatgcccggggtggacaaccctctggtttcggtcacaatcagccagcctctcgcgctccagcaccccctctattgcttcgccgtggtcggtgtcttctttccttcacacctttggtacagacccagccggcaccgcgcgcaacgccgctagagcccctcagagccccagctcccgaccacccgccggagaatttcgagtccctcaggaaagcagctcccattggccagcccggccccctccccgcacmtcattggctactgtcctgcaggtcccgccctctcggcgcctcaggttccagcgagggcgtaacggcagtgaagtgaaaaatggcgggaaaggccgcctctgagctggccgtgcatctgcgcaacgctggcttgggagccggccggtggtggaggagccctcgacgacagcctcaaggcctgccgctcctcacgcgcccggctgccactagaccatggacgcaggcagccgcgcgctccaccgctccgggcccggcgctccacgccgatcggacgggcgtcgctcacaccaccgaggcgagcccggacactgaagccactttgttgtcctcggcccagggctgcaggttctgcagcgcgaagagcgacgagttgtgcaggcagagagggtccgggggcagcggcggccgcagcggccgtggcaacgcgtcctgctgcagatgcaggagcagccggcccgcgcggtgccgctcggcctcgcgctcctccgccgtctggcgcctaagggagggagacgcggggtcagcggggcgcccgccgcgtcgcttctcaccaggccctgctcgggaaccccagtccgccctcgcccgcgccgcgcctcaccgccacttggtgcgtcggttctggaaccacgttttgacctgtgcgtcggtcatgcgcaaggccttggccagcgccgccctctccgcagaggccaggtacttctggcgcaggaagcgscgctccaactccagcacctgtgagcgggagaaggacgtgcgcggcttcttccgcttcggaggggtccggttttggtaggggtggcctatgcggcgcgtcscagagaagggcgagagcgcagctaccgggaggaagaaagaccagggcaggatttgcagggtggcccgaggtgccactgagaaggccgcgcggctgtccaggccgcagaactcccgcgccctgtccttacccgggccctaagcatcagccgagccctatagccaagaaaggcccttcccctgggatgcgagggagacgtcccctgtaacttcaccctcccctccccacgcgtggacagtgggactacagaggagggcgcgggcaccgacggcagctccctccccatcacctctcggaggcaggacccagagatttgagttgggggaggatcccctgggaggatctagtgggaggtgtgaaaggggtccttgagttggagcagaaagctaagaaatgaggagacggggtcagagtcgggcgtgacgctggaggggtcagacaacctcacccgtgagccggtccttggcaaagcggcggccgctgtccatccaggggaaggtgagtcccgctaggcctccggcgccgcccaaacccgagggcccaggcactgcaggcgccccmccagcgggcggcggcacaggcagcgggcggtgcgcagggacgcggatcacgccgcctgggcccactccggagctgccgggcagcggggcaagtgagccggcgggaccgtagcccgaggctccgtggtatccacccgagaacgccccattctccccatgaccctggcccccgcgacccaggcctagaccgccccctggggtttcggggccgctcaggatctgatcgatgccgaagctgattggctcgtggtgtgggaggttgtgtggacccagcatccccggctccatcggtctgggccgaggagaaccgccggaggttcggtggttggggaggatgcctcaggcagcgccagaagcccagcggcggcgcgctccggagagtggcctcaggggcccgcggggctggccaaggcagggcgccggggtccccgaaacagcagcatccctgtgcacccggagcagccgcgcccgtgccrgccgctgccgggcgtcagcgcagggacttgcatcccgggggagcacggccagctggggcccctggagcttccttgctggctcttaagcgcaaatagacgctgggctgccggcgccgctgcccaagtcccgggtggagagggttggccagctccggctggggcagtgactgacggatcggcccgggtgggtagtgggggctgggggtagggcaggggcggggcccagcagttaaaggggaagggacgcctgtttgcgccaagcgcagggggaaggctggctggcggagatgtgcggggagggggacagggggccagggtgttaggagccaggctcagcgcgggaggggcccgagcatgggccgctgagtcagcggagatgctcaccgcgcctccatccttgctggcctccgcctttgggcggcctccgcctttgggctgcctccgcctcaccggcttcctccgcaggtgcctcctcccccagcccccactcttcgcctctcgatggatccttctggccaactcccggattcgttgtggtccccgcctaaatgctctcgaagaccaaatctcgttgtggtttcccggctgcgtaagaagcggctggggaacggcgcccggtgagctgcaggcccaggaagagaacaggtgtgggaaggggacggcaggggctaagggcggggaacggccgctttgggctggcgatcgtggtgcgccttctggcctctcctgtaggtccccccagccctgttcatgcgcaccggtaattggtgtcctgtgtttcctaraatttcgattttccaaaatccgtgtaaaacggaccatggctcaacccgggccaaatcaggccggcgggttcttggggctggcacttacccccggaccccaagtgcagggagtcctcaatgcaggactctgcccctccattctgtgcctaggaagtctgttctcacactcttcctcctcaacggcgggagggcgaaatctcgccacgggggacacgtgggacctcactgaggccttggttggatcctggccgccttgtttcccataaacattttaccccacccaaactcaaaaaatggcctggagctgtcagagaagggaggtggggaaagacctaagccgcttggtgaccttgtgacctctggccatgaatccaggagccgggagtgcgtgaactctgcgtccttcccggggatgggacccccgcgggcgggcccctgagccttagacccgcccccgccgccgccctgcccggtgcaggcmgcggtaatcgggttagctgggccggaattacattaccttccccggcccgccccggcccccgggggggccctggcgcctctgagccggtgagactgggctcagagaggggggcgcttctaccatcctgcggtggcggtggcgggtgggcaccaacgagcagctcagcctacctctgacacgtggtggccaaaggaccttaccctgctgtgccagccctctaccctcgtcccgagcccaccccgctgttcagctccatcctgctggttcccgtgtgaaccgaaatgctttgtaagtctactagctggatctccctgggagcactgatcttcaaactgattctccaggatcccctgggaaagactctgccccctmctttctccccagcagatgggctggcagcctggygcctggggcagggtgaaggggtcttttctcccctgggaaccaggaatgatatttgggcatctgggcagaaagataaagaagagaaagaagggtgagctctgtccaccagcccttcagtgttctctgaagccttatatctagaggaggtgaaccataaatgggacagagggcagtgggaggaatagtgggcattaatatgtgtcaacctgccaggcgcggtggctcacgcctgtaataccagcactttgggaggccgaggcgggtggatcacgaggtcaggagattgagaccatcctggctaacacggtgaaacccatctctactaaaaatacaaaaattagctgggcgtggtggcgggtgcctgtagtcccagctacttgggaggctgaggcaggagaatggcatgaacccgggaggtggagcttgcagtgagccgagatcgcgccactgcactccagcctgggcaacacagcaagactctgtctgaaaaaaaaaaaaaagtgtcaacctcccccaccttgaccactctactatccaatttgtccagcccctcctcagccctgctaacagcccgttctgaaagagggtgggggctcctaccaatttagcagatgtattttcatcttgatggagaagacagacattatcacctcccgtctctttacagaaacccatgcacttttctcagcagtagagagggctacaaggaagcatgaacctgtttagtccaaatcttcaggccgggagcagtggctcatgcctgtaatcccaccactttggaatgccaagaggggacggatcacctgatgtcaggagtt

SEQ ID NO: 96042 - DNA, 71371 bp, Homo sapiens
  misc_feature (1)...(71371): n = A,T,C or G
gcgagggcatgggaatgtgatccaagctctgccaaccagctgtaaagtgccaatttggaaataaataccataagataggaggtgccatgcagaattccttttatcaagggtgctgagagacagatattcagctgtcaaaggtggctgtggcacctccaggctaaatagcatcccatgttcagtgtcaggagtgtgggcagagatgccagcccagtagccatagcaatagcatctcccctggcagagtttagtggtataactcgagcatcactcttggctcagttagcctctgagcctgatcctctggccctcctgaagagcctgcaagggacttaaatattcttcaataaactcattttctgtataaattagcttgaatgggttttgtttgcaactgtgacagataaagtggggtgttgtgtatctgtgtggcttccacttttctaactgctttccattttctttctttcccaatccctcaaatacatacattataattgaactataaaacatagggcacagtattaaatgtaataggatgcatagactcatgagtatttacatgcagggcaggtccaccctcagtcttaaaattttctacataataccatcgcttatgatatgctgcaaacttgataaatcctaattagaaaaaggaatatttggcagttggaggtcatttggcaaagtggtctcttcccaggatatagctccctggagcctgatggctaggctaaggtcagtcatatgtggaaccagcaccagcagtagccttgtgttaagatcaggaagctgcatttgcatctgtcagaccacccttggccaactctagcctgtggctctgtctcttcctccttcagaactccaccatgtataaagacagatacatatttggctcttaatgataggcttttctattctgtaatatttgtttcatgtgttcgtttatatctctgactaaacagttaatccctcaggtgcaagacccacattttgtgtttctttttgtatttcactttgaggagagtgtcctgaacactgtaagggtttactaatctttgctgattgatttccttcctagggctgtggaatataaattacatgaccatttgtctcttcaattttcaacatctctgtgtgtgcatgtgtgtacatgtgcacgtatgtataagagagatctgagattcaataaataataaacttgaggaatggagttcagaggcagaagaaccacagaaacaagtcagccttatgtgggtagcctcccctccgtttgttgtgtatcaattggggttaataacaattttttttttttttgagacctgtctcgctctgtcccctaggctgaagtgcagtggcatgatctctgctcactgcaagctccgcctcccgggttcacgccattctccggcctcagcctcctgagtagctgtgactacaggcgcccaccaccatacccggctattttttctgtatttttagtagagatggggtttcaccgtgttagccaggatggtctcgatctcctgatctcatgatccgcccacctcggcctctcaaagtgctgggattacaggcatgagccactgtgcctggcctataacaatactgattccaamcacctcccaggattactgggaactttgtaagagataacatgtacttaaagttccttatgattattatccggttcacatgaaatgggaccacagaggggagtggagaagaggcattaaaactagtgtgtgaagaaagtatcatagctgacccaaccccactggctttggttctacctgcctggagacaatacattttgtagcaccaggctattgaatttccatccgattctaggcagcaggcatcctcctcttcattttccttcacccaccccagccaaatccatcagttccacctctgacttcacaatacctaaacccataaccttcctccctgccccactctcatcttggcttaggtcctagtcttaccttatagcttctgcctctttctgcctttggtctctgacctctttccctccccatccacatggagggcagttatggccctaaaaaagcaaacgcgattgtataatttcctgctttgagaatcttggggccaggtgtggtgcctcatgtctataatcccagcactttgggaagctgagatgggcgatcacttgaggttaggagtttgagaccagcctggccaacatgtcaaaaccctgtctctactaaaaatataaaaattagctggacatggtggtgagtgcctataatttcagctatttgggaggctgaggcaggagaatcgcttgaacccaggaggcggaggtggcagtgagccgagattgtgccactgcaccccagcctgggcgatagagcaagaccctatctaaaaaaaacaaaaaacaaacaacaaacaaacaaagaatctttgttaaatatctaagtctatatatttatggtgtctatatctgaagagggaagcccagttatgaggctgttccagtcaggtgagagataactgggcatatgatctagggtagacagagaaatgggaaaagatttgggaaataatatataaaactataaactctatgtgtgtgtgtattgttacacaacatgtgaacagtagtcatctctaagattcttctatgaattcattcaataaacgtttattgcatgtctgccatgcgtcaggcaccattttaggcactgcaaacttgaaggaatgacagacacagaccctgctgtcttttagcttatcatctattgaggagaggaagaacatagcgaaaataaataggaaatcaactagggccaagtgatagtgacttggggaactatttgagataaactggtcaaggaaagcctgatgaggtagaaggtggggacttgactctggaggtgggggctaagactcgggaccagactctagattagagttccagatttaacacctagaagtcactgcccctttccatggcaatgactcaacaacccgttaccaacctttttctagaaatttctgtataatctgccccttaatttgcatgttaactaaaagtgggtagaaatatgagtgcagagctgcctctgagctgctactctgggcacacggccttatggggtagccctgctctgcaaagaccagtgcctctgctcctgatgtacactgccacttcaatataagctgctgtctaatgccacctgcttgcccttgaatttttttttttttttgaaatggagtctctttctgttgcccaggctggagtgcagtggcgcgatctcggctcactgcaagctccgcctcccgggttcacgccattctcctgcctcagcctcccgagtagctgggactacaggagcccgccaccacgcctaattttttgtattttttttttttttagtagagatggggtttcaccgtgttagctaggatggtctcgatctcctgacctcgtgatccgtccacctcagcctcccaaagtgctgggattacaggtgtgagccaccgcgcccggcatcccttgaattctttactgggtgaagccaaaaatcttcccaggctaagtccaaattttggggcctgcctgccctgcatcatgaggaggtatctgagtggaacgtcaatgaggaggaagaatgagttggagacaggcctggagaagaatattctagatagaaggaaaaggaagagcaaagacccttgggtgagaaagagtttgtatttttgaggaaagcatgctagtgtgaatgccaagcagtattctgtgggaagatctcaggaggtgtctaagggcatggagataagtggtcagatgcacggtctgttttataggtggaattaactgcttgctgatggattgactggctgtgagggtgagtggcaagaaggaatcgaagatgagttagggtggatggcgatgccatttgctgagacaactgggaaagaaaaagatttgggaaaaaaagttgagttcagctttggacatgttaagtgtgatatgctagtcacttcagtggagatgacaaatggcaagctggagaaataagcctgcaactccaggagaggacctcgctgtagatttactatggtgagtcatcagcatgcatatgatataacagtcatggggctaggaagttagtttctcctcagggagtttgaaactgtaactagttcagagaagagggtggagggcagccccgaataccccagcatttaccaatagagcaaacagggactcaggagcctggggagtgaggttagccrgaaaccctcagagtggagcactggtgctcttactgagagaggaaggtgtgtccagatggaggatgtgattaactgtcctcaacatccctgagagaaggagtaagacaagggcagggaagagaagagaatgcaagatttggcaacatgtaggtcattatgatgactatgacaaaagcagtttgagctcaattctgtgtggagtatagggaaggagggttgaggacgtgcatttagaagggtacatagttctcaagaagttttgctgagcacatctgtaatcccagctatttgggacgctgaagtgggaggactgcttgagcccaggagttcaagaccagcctgggcaacatatcgagtccctgctttaaaaaaaaaaaaaaggaagttttgctgagaggctagatggattatgatttttgtttatttttcctgtttatccatatattatttttcaacaatgagtattgattacttatataataattttaaggctgtacacattgcagacagcaccccactgtttgaaaaactcctcctcagtagaacatggcagaccttcatcttccttccctgaaccttttccaaccttaggcttgccattctccaccagtgctaatgtcatgtctcttgaaatctgtattgaagtcagtatttcattcttgccagtttccactgtgtgtttaaatttggagtctggtgtctagcattagctggggttggggcttccactcctctcagcattggtaagcctcctcacccaccccatcccatgtccaagatcacccagttacacacttaccatctacccagttcattcacatcatcagtcccagagctgcagagatgctctttttctacctcctacttctctggctcttagagaggcagcatgggataatggggcaagcgaatagggccttaaagtagagggacaagggttctcttccctatctgccacttattagctatgtgacctcgtgtaagtctcttttctttttgagacagggtctccctctgtcacctaggctggagtacagtggtatgatcatagctcactgcagcctcgaactcctgggctcaagctatccttccaccttagccttctgagcagcagggactacaggcacatgccaccatgtccggctgatttatttatttttatttgggaagatgggggtctcactatgtcgcccaggctggtcatgaactcctggtctcaagcaaccctccaaccttggactcccaaagtgctgggattacaggtgtgagccctggccttgcctcaatttcctcatctgtaaaacggggttagtgaaactcacatcctatcagtggttttgaggatgggccgactcttgtattgcctgctctagtacaatcagcagctaaggcggctcactttccggccgtgctacaataggtaagaactaggatgctttagacgtgtgactgggcagtgggagcccctcacatgatcccgagatgccagacagtgtctctccgcacagggcgtgtgctggtccagaggcccgtttttccagtcgccccacaccccgggtccgcgatcacgctccccccacccatagccgagcctgacgcggcggtggctcatgcgcctttccgtcccagcctttagccacggaccacacgtcccatctcaggcgccccgcccctcccccgccccccgcccccggcgcgcctccccaggctgccggctccggtgtctgagcggccgcgcccgcgagccgtgagcgatgattggctgcgccacggcggcgggcggtccgtgggcgcacacaccctccccgcgcagccaatgggcgtgcgcacgtcwctgatccggaggcccgcgggccggcagcccctcaataagccacattgttgcatgaaactccggcgcaggagtcccgggctgccgctggcaacatcgtgtcacccagctaagaaaatccgcgggcccgagccacgcgcctgtgaatcggagaggtcccactgcccgagtggagccgggctgagattcttctcaagttgagcctcagtgatcctgtggccgaagttagcgccttgacgtgggacaaccggacacgtcgccaggasagaactgaggcgccttctagcagttgtgacgccaaaatcacgtctccggagacccgcgccctccgccagccgggcgcaccctcgccggtagccttctttgtgcgccgtccggactcccagctcccggcccggcagccgagccccagcacaaagcagtcggaccgcgccgcccgcctcccctctcgcgtctccgcctcggtttcccaactctgcgccgtcgggccgcggcaggatgattgcctcgcatctgcttgcctacttcttcacggagctcaaccatgaccaagtgcagaaggtaagtcagcgcgggcggggcggcaggctgggctctggcaaagtggtctggcctccatcagtctcttcctcgaccctgcggggacccgcttcctccctactcsgggcctgggagcggaaaaagtttgggcagccgggacactcctgggcgccaggagccacgtccgctaagcacagccggcgagtgcgcgcgggcggggagccgaggtcgcgctccgccgggcgccctccctccctgagctccggcacgcgctcacgctctctcccccagtccctttttccctgttactggaggggcgggtcaccccgcaggtagtcagggattgctgcgcccacgtgggagggagcccccttctgcagcgcgagttccggcgagagcacgtggagagaatcgtggctgcgggaggctgctccgctgccgcgtggggccgccgggggccgtccgcgctcgcggaccgcgtgtaggagacgagcggttcccttctccttccccgcggccctgcgggggtgggctcgaggagaagctgacccgggaaggagtaggaaaggggcagaggaactccgcccgccgcgccccctccccggaactgtggcgcccggaactgaggctcggcgaggggcgtcccccattaacccccgcccctccaaatcagcctcgggaccgcccagcctcgtgtcctcaggatctgcctytgagtaaggggaggactttggttgttactttctggtttgccctaaaagttactcggagaggccaacgcgccgcgttcctggattacttgagattcttgagatttatgtccttccgaaaacgagcttttttttccttaagcctcgacctgtctgttcccacctggctccgcagctccctatggctgagcgctcaccgcggccgggtcatttacataagaaagagcctcaggccaagccgggaagctctcattccccgcctcggggtatgggggtggggatggggccggggccggggacgggcagggccaggggcgcgctcagaattgagtttctgaaatgcccgggattaggggattggctcctggcccgggcctgggctacgatttgaggtaggggacaagttgggargggattagctggagggaggttgttttaagagctgtgaggcaacggagcgttgctcagttacatacttggaatttcaatatctgatgggaacacatttttgggaaaatgtcttgccattaccgttctgtgcgacaacctgctcatattcccattctggcggtcccgagggcataggaggcatattaatgtagtgatggcgcgtgaacctccaagaaaagcagaagttacccagcctcaagtctggaggagcgagcagaggcggttgatttacttgggttttactgtttgtaaatggctgttattctctaattcctgggatgtggctctgcaccttgattcagtttacttaaaaacgtgcctttgatttgagctggcaggatcttggtaacttctcaacttctaagaactcttggggaaggctatcatctcttggcaagtcctaaaatacacagtggagcgtcattaatctcagggagttctcctttgggtattaccccaggacatttgaatccttgcataaatttactcttcctcaatccagaggagggcaccagggttggaaccccgttggagttataccactctcaatcttggaatgggggtcatctctcttcccccagagtggaacgggaattaaccagggtatctggaaatgagttgtaatctctgtcttgtggtttattaaccatagcaccctgagcctctttggacagcccgtttctctttgtgaaatgcaataataacagtaggcttgtccactttatggagttgcgattattaagcgctgcagtgtgcaactgtcattcctgtaggttttctctacccttgcagccacctgtcagtttgagaagtgtccctgaagacccttgggtgtatttcctctaaactaccaataggggcagaattgaatcaggcctttaactcagtaattgtcagaacctgggatttgactcccagcttaggtgagcgaagctgtttgattccagtggcagttacatagaaagcagagactcagagtatcttggaaccatctttctgagctgccattggaaagaagaattaagagagaagaatgaaaatttagtataactttagagtcttttgaaaagaccttttgatttggacccttctgaaatccccttgtgataagataatcttacatattctgggttgtagtctgaggacgtggaaggcttgggttcacctgcccaacgaggtcacttgtcgtctcctgatggacaagcccagtgttttggggcattagagatgagaatcagggttatttcctcacttttgccaattggaactcaggagcgactgcagagcacctactgtgtacctggcactgttctaagctcttaggtatgtcagcttattaacattcaaatcagccccatgaggtgaagactgattgttattagcatccctgtttaactgaggcccaggggtaacttgcccaaggtctccagcttttctgtacgagctgggaatcgaagccatgcatttggctttagagcaccaygctcttgagcacatacttgcctgtctctggggaatgtgagcgggctcctggcccgggcctctgcccactcctggctgctggtagcacccccacccatcatgaccacagatggaactagctcttctgttggtttgatcagtggcaccagtaccctctggctactccagctgagagtcctggattcattttcatcaactctctaactctgtcaactggtctcttggttactttggaggcctgctaagggtgtccctaaaactctttctggagccagactggatcatttcaggagctctctacagctcttaattgcctcccgcttctaccccccagcttagcctcatcttcctctccatcctttcattcctctgtcctgcctgttcacactaggtccttttgcccttgtcttttttttttttttttttttttgagacacagtttcactctgtcaccaggctggagtgcagtggcgctatctctgcttagtgcaacctctgcctcccaggttcaagcgattctcctgcctcagcctcctgagtagttgggattacaggcrtgcgccaccatgcccagctattttttgtatttttagtagagacagggtttcaccatgttggccaggatggtctcgatctccttaccttgtgatccacctgcctcagcctcccgtagtgttgggattacaggcgtgagccaccgcacgaggcctgcccttgccatttttgtggccctgaactctgcttggcttctttccacttaaccccttccagctcaaatgcagtttactgtcttaattttctttctgcttccttctccccctcctgtgtgccaacattagtgtgtttgaaccttgcatgacatttgtttcattccaccatctgttagagttgatggttttcagtttgggttccttcctcagggcagggagaatcttggctgttaggtttgtcgctgcagttcctggccactggtgaggtgctcagtgagtacaagagtaaaggaggagacctttctggagaaagaagctaaaccagggctgcaggaagtggaggagctgggcagggccagctmgtcttaggyyaaagggatggtatatgggtggacacttggaggggtagttcgcagttatctcttcatccaaagcatgacctgaggccaaagcatgacctgaggccggtcctgaggagggagagagaaagggaggagagtttcctgtccttcagcaatcaagactgtgtgtcctgcctatggagagatrgaagattctttctatttttttttttttttttttgagacggagtctcgctctgtcgcccaggctggagtgcagtggcgsaatctcagctcactgcaaactccrcctcccgggttcacgccattctcctgcctcagcctcccgagtagctgggactacaggcgcctgccaccatgcccgggtatttttttgtatttttagtagagacgaggtttcaccgtgttatccaggatggtctcaatctcctgacctygtgatctgcctgactccgcctcccaaagtggtgggattacaggagtgagccaccgcgcctggctgattctttctattgattgagataagttagtatacaagatgcaggattttgtcatttaagaatggagaatcagggttaaccatagagataaaatgaagtatatactcctttctctgaccattgaccaaattgttttaatacgcatagactggtgacatttgcactggaatcctgtaatagacatagctcwtgtagattccttgttgtatgagcaaggggtgaccttcaatgctgggcttgagaggaatatcttggaagcgaaaagattgaacagagaccccaagagtcaagaaagccaagaattttaatgtttttttaagaacctacagtgagtgcaaggccctctgagtgtgatatgggagacagaaacccagatacttttcagttgtctagagagatatggctgctaggtcaaaagagtgaattaccatgggtggggctggagttagagcctcaaggaaccttggcacattttggacacctaccacgtgccattagtccgcacgtatgrgattagagtatcaagagtaaattgctgattgaaaccttaataatattatttttgtctatgttaattttgattggacaaactgacattgacaggtacaattcactccatttgttcaatatgtaacatcttggtaacctaactctgtccctttctctgctcagaagacaactgatggtagttaggaatactttgtagcttttgttaaccatccgtttgttttatattgccaaacttacatttcagagagagctaagaagcactttttcctctacctttgaatgaattaactcccctgagctcagccaaagtcaatttttttttttttttgtgagacagagtttcgctctgtcaccaggctggagtgcagtggcacaatcttggctcactgcaacctccacctcctgggttcaagtgattctcctacctcagtctcccaagtagctgggactacaggtgcgcaccaccatgcccagctaatttttttttagtagagatggggtttcaccatgttgaccaggatggtctcgatctcttgacctcgtgatctgcccactttggcctcccaaagtgctgggattacaggcgtgagccactgcgcctggccttttttttttttttttttttttgagatggagtctcactctgtcgcccaggctggagtacagtggcgtgatctcagctcactgcaacctcggcctcctgggttcctgccgttcgcctgcctcagcctcccgagtagctgggactacaggcgcccaccaccatgtccggttaatttttttatatctttagtagagatggggtttttcactgtgttagccaggatggtcttatctcctgacctcatgatccacctgcctaggcctcccaaagtactgggattactttggcgtgagccaccgcgccaggcattttttttttttttttaaacatcacttttcaaagttgaacttttccagtactctggggagtttggggcaattggaggtccttttccaaggggggaatcagagcaacacaaaccacagttggcaatgggagtaaggagatctgatgaactgaaagaacttggagccccagaaaactggcttcctttgttcagatacttccggtttaaaagaccacatcttgataagacgttcctcattatcatcgttgagctttgaagtcagcaggtttggtttgttttccaacactgtacgtagtctgtctttgccttttcaaagctgtgggggttatgccgggcgcggtggctcacgcctgtaatcccagcactttgrgaggccaaggcgggcggatcacgaggtcaggatatcaagaccatcctggctaacacggtgaaaccccgtctctactaaaaatacaaaaaaaaaaaaaaaaattagccgggcgtggtggcaggcacctgtagtcccagctacttgggaggctgaggcaggagaatcagttgagcccgggaggtggagcttgcagtgagctgagatcgcaccaatgcactccagcctgggcgacagagcaagactctgtctcaaaaaaaaaaaaaaaaaaaaaaagctgtgggggttgggatgtggcaaattaaatccccatagctcactggacacgtcttcatatcacactctgtggatcacacaccatgcttccttgtgctggagtggctctttctgcttatctttaaagcagttttctcagccttggtgctattgacattttgggacagatacgttttttgtgaggggctatcccagcctatcataaagagcaagaatttccaccttactcaaatttccagagacaaagcctatctttttaaaattcttcatttagagcagtagttttcaagtaggagtgattttataccccagtggactttggcaatgtctggagacatttttggttgtcacaaaggtttgggtgagtgtgtgttactgacatctagtaagcagaggcaggtttgggtgagtgtgtgttactgatatctagtaagcagaggctaggaatgttgctgaatattccaccatgcacaagatagctccccacaacaaaaaattacctggcccaaaatgtctacagtgtcaaatttgagaaactgctttagaagaacatggtccatccctgccacccccttcagttttcaggtgtattgctgatggtcatacagcaagttagtagccctagttgggatcagagccctgagttgtcaacagtgtgccatgtcttgtgaccgtcatggtgggaaatgggcttctacaaaagacgaacttaagatgaggtctacagttcacagcagtctgcagatgcccacagttccttgctggggggcaggtttccagggaacgggagctagttgctgtttctgtattytcaaccagagaaatgtgggcaatacaagtgctccagaaagccagcaagaggagtttagtcagttgcccttggaagatgctcaccctggtgctgctgtagtttccatggaggctgggcatgagccaggcttcccaacaagacaggcatgtgagctggtgtaatggaaattcagaaggcacttgagctggggagcagaggaggtaggccagtgacatccactgagggacagcctgacagttactgggagaggctgtttgatgagctggagtcaggctccctggggttgaactctggctttctgcataacacgcagtgtgagcttgggtcagttactctacctgtctaggcctcagtttcttttccctataaaatgcaaagattgtttggataacactttaattgagtagttgtaagaatgaaagagaaagagggttaacaggtgtcaagctctgagaactgtgcctgacatatagtcaatgctttatgtattaagtattggtacttaacaatggttcaacttgatttttttttgacttcacaatggcacaaaagtgatacgcattcagtagaacctgtactttcagtatttatataaccattatgttttgcactttcagtacagtattcaataaattacatgagatattcaacactttattgtaaaataggctttgtgttcgatggtaggttaggtgtacgaaatgcatttttgacttactaatcgggacataacctcattgtaagtcggagcatctgtacatagggagagacacagtcttagatgtcccactgcaccgtccgcctggacaggagcaaaaagaggccctgctttaccctggataactcccaagagcttcttttagagtaagtggtttcaggtccatttgtgtctctgtgtgacgttggattgaatcagaggacagagaagtcagaaggatggaaagttcctgaagccagggaagaaggatgcgtccaccgtgcttctaaaaccttctctttcctgggcgtaggagatccatccttaagctcttcctctaaattgcttttcttctggtcctctacagaggtggctcccccattcgaggtctctgggatgcctgggacattagtgcacttcaggttgaagcatccttgcgatgtcgcaggagacacagttgtgctgaatgatcacagggttagttccagctccttttccctaacctctgtctccccggtaactaacccagagaagagcagaggcttcagagggcattgtggaggctgcttacttgggatttcatattcttctgctgtggagtttgtcagttaaatacttgctcactcatcctcacatctctcccagacctggctttccacaggggaaatcatttgcartgccctgtgctgaagagtcacaggacccgccatgataggtttggccmcaccgacccctggaatttcacagaagggaatggccattctcacattctttcggcagattgggtgaggttccctgggcatcctgggatttggcagtcagctctttgcccctcatatacagaccctgggctgttgagtgtgttccttcctgctgagcccagggtgccctgggttcttcacgaagcccagggggattctgcatgtgcaacccataccctccatcccacctcttgaacagccgttgccttatccacgtcaggagtcaggagtcttggccctgttcctgtgaacagagaatctcatttyccctaaaatgctgccctcttttaggggtggtcactcattttgtttgcagatggatctctaagcatttcccggacattctttcctgccttggttaaatcttatctcagcgttaaccaggagagtgagtcaggctctgagaaactggctctggaagcccttggggcccacccacctcctgcccactcagccttcctgcctttccaccatttctgccctggatgcttggaggtggtccatgttcttaaaaggcctttttcccaatcccttccttctggcatctccatattgtctgaaggaataaagccagatgaaccatctgacagctttaattagggttaaatgagggcattcgaaactgccacttttccttctttcccatttgagggacttcctcttcctgcttcctgtttcctcccaaacttttctgtctcagtcccctccaygaagtcctgtagcctcttcccatcagctctgtgtgtagtaactcaggccaccctcaagctgccctccaggtaggtcctgttattatctattattcaaatgaagagaccaggcacaaaataggatagtaccttgccccagggcaagccagaatccagacccaggcaatgtgactccagagccagtgcccttaacccccagcacaaagctgctgggacaactatgtttcagtttcacttatgtttcagtttcatggggttatgagtcaggtatcagctgggaagggacctttgggaccatgtagtctaaacaaacccttcattttacagttaaggaaaccagatgttgtgtactaagggaccagcccaagctcacataggataagccccagatctggaacccagtttcttgatccccatcatgtttttttaaaacacagtttgtgcagcatgaactcttatcattttaggtgtcagtttcccaagatcaaaggcaggatttacttagctgtatctagggggatgccctaattgtccaaactgggccgcttttgaaaatggaggaaagcactatcagtagttatgccatgaccacaggtgtaaactgagattgtcttgggtaagcagggaagtgtgggtaccttgcctgtggtgggtgtgatcttggggtggatggggcagactgggacagacccagaggtatttgatccagcaagtggaccgctggcagcagacaggagtggggagttcagaygccactgtggggcaagaggctcagaggcagattctggtccctggcctggggctgtcgaggggtaggcagagtctgacttctagggacctagcatcctaggcagggcagacaggtgkactgggaggaaaccatgctgctgcggggatcccatgcagtgtgggcgccagcctgaagagcaaggcccgacacagagcacctggtcagtcgggagtagccagctcttccccttcaccaagttacttgtcaacttttctctttggtgttcccatagccccttgtgtataactataacaaaggtttcttgagcacctattatatcctagtattgagatagctgctgctatgactgcagagaggccatttatgctgggctatggagggtcagtgggagtttgttagacaaggggaggggacattttgggcagtgaggccaacacatacacatttctaaccatttcaagacaaacactcctcagattcacattgatgtatgtgatttaagtgattgtaaatccatattttattaatgtaaaggaaactgcctactgttctgcccttcctgtcagtttgtaattacttgttaatgtatctgtcttctgccaatagactcagccccttcctggcagaggctggtgtctcctttatcccagtatcctcagtgcccagccctggcacactcaacttggcactcagtcaatatctgttggcaggtgaactgtgccagggtcacatgcatctgggacataatccccctttgctctgctgctccgcagtcagaacagaatgtctgaggacaggaggaccctgggccgggtgtcccaaatgcccatctcctggaccctggacaggtgctgctgcctaaggtctgtctggctgtaacttgatgcagctgagactgagaactggaagaacaggaagccctgtgactcacaaccgctgcaacaggatcctggaggagtggcccgtatgcctccctggtcagctctgcgcttacccgctgcctcgggtttgtgagtctgcagtgtgtcagagctggcattggcctgaggtggcatggctgccctggcgaggacaagttccttgtcccatctgaagaagtggcataggagatctgagtttcggttcatgggctttcagaggacaggagacttacagaatccatgttctgctgtgtgtcttccccccggctcatctttttttcttttatcagaaacatctggccctgccctggcaactttgtagaataaacttgctgctctttgtacagcctcagccttcccaggaggagtctgtgagggcattattattaatgaggtcactgacagcagttgcttggctttcccagggtgggcacacctgtgccctaggttagggcactcggctggtcactggatgctatgggtcttcagggactaggcctgtgatttggggaggcttctccaagtcttggtttccttgtcagagagttgtggtaaaacactggcaaaggaataatgcaaaaatatgaaattcttttgaaattaagttgcaagcatgtgtcagcacagagtcactggaagtctttgtgtggccagatttaaatgatggatctctctttgtttggcctcttttgacctctttaatcttctttggctctttgactgtgtatagtgggtaaacttgggccaagtcagtgcaacctgcctttttttttccagcgtcttttgaattgaagtataatgcacatgggaaactgaaagcagcaggtaaccaccatccagatccagtaacagatcattacctgaaccagccccgtgttctcctacccaccaccaccatcaartgtaatcactgtcctgactaacagcataggtctgtttttgtacttaatataaatagactcatacaggatataaaagatgccatttgtgtctggcatttttcagccagtgttttactgtattttgagattcatctatgtggttgcatgtagtggtaggtggtgcattcttgttgctgtatactatctcttgcaccactctggcttgtttttgtttttaagagacagggtcttgcactgttgcccaggctgagtgcagcagcgtgatcatggctcactacagccttgacctcctggcttcaaatgatcctcctcagccaaagtattaggattactggtgtgagccactgtgcccatcccaccaccctgttttgactgtggttgatttaaagcagacgaaagtagtcataataaggcccctgacttccagaaggtatggtcctttctaagtttctgtcaaaggggccaaataggagtgttgacctaatatatagatgacccgattgtatcttcaggacaagaacatgcatgttaagaaaggtgaagttcaatcagttggtcttctagggtctagaaactaaaaggtaggatttttagctgtggtcatctagggcacctggagagacggttctagataatcaattagaaatatcccaagactggggagacaaagttcagctgtgccacaggcatcctgcatcctttgctttgatgcttctatgcttgtggagtaactttcttatcctatgtgatcacttgaattcagccctctaccaggagggtgtgccctgcagacacaagtgatgaacatttgcttattcatgtattatgtattttctgcttgcttactaaaaggatttagtgatttggttcagctttcagtaaaaagatttctagaacgagagtcatcaaactggcgagatgattactgaaaaacttgacaggccaggtgtggtggctcatgcttgtaatcccagcactttgggaggccaagatggaaggattgcttaaggccaggagtttgagaccagtctggacaacgcagtgagactctgtctctacagaaaaaataaaattaaaaaaatcagctgggtacgagggtgcatacctatagtcttagctacttgggaggctgcagtggaaggatcatgagcccaggagtttaaggctgcagcctaggagtttgaggctgcagtgaaccatgattgcgtcattgcactccagcctgggcagccgagcaagactctgtctctaaagttaaacaaacttgacgaagctccaagcttcctgacagtcaaggcaaaaaggatagttagttctctttgagtcagtcgttttcatcccatcggcctmtaacaggtagcacagtgtgtctgggcagccagacyttctcctgacactaacccttactggggactgaatggctagggaagcattagtgaaagacacagcagctttacctggtgcagtggtctttatagtctttcctgtgagcccttgattaaaagtgatagaactaaacctatgaagcatttcatggggagctaatgtaatgttgtgaaggtgaggagctttctgttcctggaattggtaatttcccagggtcttaggggcttgcccatgcctcctgagccttttcacactgctgtctctaggtaagcatttatctgctaagrtggctgagctccaaaagtatcccctttgattgccagtctctcaggccacttaaatctgtgacacttcccatgggctgccttgtattgtgcccgacattcttattagacaagactcatctctccacgcattctagagacactcattgrtctataatatgagccagcttctttgatataaagtcctagagagcagggctgttgatttcttaaaatttttaagaattgtaataaaatattaatcacaaaatttaccattttaaccattttaagtgtacartttagtggcattaagtgtgttattcacattgctgtgcaactaccaccactattcatttccagaattaawttcttgtaaaattatgtttctgtacactagtgctttgtatttaatagctgttccataaatgccataacatggaagatgctggggttgcaacagtagtcaggattcagggattgaatgatacggatcttacagacttagacattgaaatttaaggtttcgtttcgtctacacttcccttttaaaacccttgagtaccttactcaaggtaggatctgtagtacttcatataaaaactgtcaaaattggaatattgctgtcttctggatgtaaataatttgatcaaggccaggttcccacagggaccagatggggtgggctcaggatccaggcagtggcaccagtctttcagttgcattgggcctgcagaatgagatgggcgcttctgggccagaagggttgacattcatccaggtgatccagattctagtttcaactgtgtgacctgggtcgaggctgctccccgatgggcctggtttctctgagatccctttcttgcagtcacctccaggcctttccttcctgggcttccccatacctggccaggactgtgtatggcccaccctgcacactgcatacttcgaagtggagcctccatgaatgtccccttttgttctctccatttgttgctttgtgacagtgacacaatttcctctccttttttaagtgctggtctggaggaaaatgcaggtacttaaggggatgggtgttaatggcttcccattttgggtattatcttatttcctagagagtatggggttaatttgtctttagggcttcccctgacaccaaccccaattctgtagaggaagtgggcatgtcagactggtatgttatgggaaaaactgaaactgaccaaaattacccaatgaggaagctctgatctaacccttgctgaagaaatatcaactaacagtgctatctctgtctaacacgccctcgcttcctgggctggcagcttggcaggcagacgggaaggtaacccgttcttcagccaggctttgctctggcctgcctccgattccccagcctggaatgccccctcctcctttcctcctctcccagatagagatttaaagagaagcagccttgtccatgcccatcacagaaagagaaggaatagtttggggaaacagcctctgctttgtgactaaggagggttgagaaatgtctgtgattgcctgaaggtgmccctgggtggagagaagctttagaagaaagaaggggtggaaggaaagggggggtgatagagaactcttttgtccccacagttatgctaatgactctgtcatgtggggctattcatcctgttttgtggcaaggaagctggggttcagatgaagagtcctctaatgtcgcacacctgtacgaacgctaccactaggatttgcatactggtgtttctgatgccagagcactcctttcaccaccaccagctacaaatcaagggttgacctgaatgagtctgctttgatagtatccagaaacttacatctcttaamaacaaatgcagagtttgtcttcccaactcccagcaggctggatcaacacaggattacttcacagggtcacacctggcctaatatcttaaccacygactctcaaagattccaggcagaaaagtgatatgcagygttgatcagaacagggccaaccacgatcacgttattggcatattggaaacctcccagaggagaggggaaggtgtttgagccccagccttagaggtgtcatttggttagtctggaatggatccttggaattcttactgttttctttaaaagctcctcatgtgattctgatgtgcagcaagtttggaaactcttatcacaagtgacagaatggagattaggcagaagtatcagaaagcagatttatctttgattgaggaaactctttgaaacaagtagagctgttcaaaaatggaatttagagaaatagcgagcctctcaggcttggaagtattcaaacctaggccacatgactatcaattgggtggagagagacaaactagataaattcgaatactatgtttagtgggattttcgaactagttaccctaagggcctttcctttctrtggatgaatacttttcagctgcagtcccactgctgtgtgtacatctgctatcacctgcttggctttctcctttgactttgggcctggtgctccctcccactgatggcactgtgggtgaaagttggcaagattctgaaaattgcattcatctccttctcaatccaggaaaatcatctttgtatggtggctgcttcttgtttctgacttctgcttcccttggctaccaacacagcagtgcctaccagggctgggtgggctccactggtgtgtttaggaaactgtggcattaagtgattattaattatcccttcctgagtggccctaataagctgagtggacacatcatcatgccctggtgccatctgttctcaagttttgagagttcaaagagctctgatgtgaaagaggggaagtttgggccaagctactggcctggacatttttcactgtttcatatccacagctgtttcatatcttctctcttagtctcctcatgtgatggagaggaaaataaggtcccaggktcatccaagaaaccacagggcaggctgggagtgcccatccacactaagaggggcccacaggacaggcgagggtggctgtcctgacggcctggcagtggggccagacagacctctgtggaatcccatctctgcccctcattacccaagtgatctataaaacggaggtgcagaagttttacgaagacaatggagaacaggtcaggaaagccggaagtgcctgacaggtgagaaatgcttgaggaatgcttagccgctgtaaccatcaccccattactgttttcatctgtcattgaacatgtggaagatggttatctatggggcaaaaggcaacgtggataaagggtgactgtttaactcgattcttcaagggttgaggatgagaagtgtctgactggatttccaacatgtcttgaaacagtttaaacatcgaagataaactaagattggctgtcgtagaatttgcttttttgtgtgcataacctcatgcttctggacatgatgataggaccatttaatgaggtggaacaggctcagctcctcagtgcaggaactcctgtgccctttgcaaacacctgaagccttccatagagggtggaggtggggcgggggcaccaagaagcttctgggcctctcttctctttgggaaagtagtgaggtgagagtgtctttgtcaggtgtcaccctcatgacaatgttcagagacatgtctgctgccccagacctgctcagtcacctctgtgtgcctcactctccactgcgtgctgttcatgtctgcattgggaggtgactggaatagaagatggccttttaatggatatggacagcctgcattccctgcaatgctgtttgacctgtatagaccctgctgtatccaggcaggcagggggcagtcatctagcagagtggacaagagcacagaccagccaaacttctctatcaagccaaacgtggcccctcgtgtctgtgtgacttcccctctctgtagaatagagatgctggcacttcctacctcagagggctgttctaaggatgaaatgaactaatgggagcaaacccggagaataggatctggcacaaagcaggagccacgtgagggcttgccattattacagttgcccatgaggacatctcaggcttttcctggatgtggcctcgcattggcttctggtctgggtagccccagactttgcacattagccctgagatgtgaaagttgtratgtagcattcctgggccagtcagtgtctcattggatctggagtgggaagcctccagggtggtcagagttacccttgaactagggtcactggagatggctagagatttgtctgacacttcactgaaaagaaaggggccttgtctagtgtcaggctgaagctgcaccctttttcctcctggggagcctcaaatgtccttgttggggaggcccaggcctcctcaggagcaccttggttcccagatattgtaggaaccagagatcagagacccagcttgtgggatggagggtggggggctagtgccccacagccctggaggttgtggtagattccaggagttggaaacaagctgggcaatatagcaagaccctgtctcaaaaataacaattaaaagattaaaaaaaaaaaacaacaaaaaacgagtgagagttatctgatgcttctcattctcctggtattaaatctgggaaaagttcatgtgaatttatgtgggaaacaggatcagtgaaagaactagggagagttgcctccgcatgagcacagaggctgcattatcatttacatagagcctctccattgtgccaggcaccgtgccagcctccaggtatgcaaaggtgaacaagcagacattgttctagcctttggtacttatgatttggaccctaataaatatttagttccaaattgtggatagtgttgcgaagggaaaagctcaagttcttagaataacagggaggcctggctgttgtgatctggaggatgagaagaggcctctacagagagaggcctgaaggagtggtagcagatcgtcagggcatgtacctggagggcctgtgtgtgtgagctccaaggcagggatgggcaagttggggaagttggggaactgaaccagggagagaatctacacaaagagtccagaccttaccataagattaggaggtggggccgggtgtggtggctcgctcctttaatcccagcactttgggaggccgaggcaggtggatagcttgagtccaggagtttgagaccagcctagacaacatggtgaaaccctgtctctgctaaaaatacaaaaattagctgggtgtggtggtgcaccgcygtaatcccagctactcgggaggctgaggcactagaattgcttgaacccgggaggcagaggttgcagtgagtcgagattgcgccactctactccagcctgggtgacagggtgagactcagcctcaaaacaacaacaacaacaacaacaacaacaacaacaacaacaaaattagccagacatggtggcacgtgcctgaaagtcccagctgctcaggaggctgaggtgggaggatcacctgaggctggctgagatctcatcactgcactccagcctggacaactggagcgayaccctgtcaaaaaaaaaaaagataaaaagattaggaggtggctagaggcccgatcatgtggggccctgaaaggattttgagctttgttccaatggaaagccctgaaagccggggatcagcggagtctggctgggtgtggaaagtggatggaagaggtaaaagcggaactggggattgtaggcgtccgggaaaaaggtgatggctacctggcctagggtgaggggcaatgggattgctgtgactggccatgtcaggtgctgggggaacaagagatgagggtaatgaaccctggctccagtgatgttgtcacaggccttccgactcaaccattctgaaaagaactctcctctgtcctaataggcctttcctcaggtatgcaccagttctccaaaaattaggtctatttttataattttaattttttggttttttttttttaagacaaagtcctgtcaaatcggttcctactaatggtctttaataataactttctgtacataacagattttgttcttttgaagagctgagtggtgttccatgacgtayacctatgccataatttatttaaccagtggtttctgctcttgtcttcctcctttttcaggttgaccagtatctctaccacatgcgcctctctgatgagaccctcttggagatctctaagcggttccgcaaggagatggagaaagggcttggagccaccactcaccctactgcagcagtgaagatgctgcccacctttgtgaggtccactccagatgggacaggtactgcatctgggggatggctctagctgctgcgttactcaggggtgatttagttggctttgctcagggacccaaataactcaaaagcctcagaaaccaaccctggctaagggaagcatccagggaattgaatggaaggctgtgtgacggatggacaggaagcttgggaaaagctggcagtcctggcagttaagggagggcacctttgtcagccctactgtggcatcactgttggccatttgttttctacctgtgtgctgagaaaggctgcttggctcagtttggcattttatggtcccactgagattgcacgcagtgatggtgatgaactacaacaaacgtacctcacgtggccacaactgtaggccgtgggagccgctctgtggctcacctgtgcatgctctaactgggacgccggacgccgtgtaggcatgtgggagggacagtgtagtgcagattgacctagatttttttcttgagccccatgtaaaaagtactagaaatccaaatagacttggacaaagtatggagcgtcacagtgcatatatatatatttttttgagacagtttcactcttgttgcccaggctggcgtgcaatgatgcgatctcggctcaccgcaacctccgcctcctgggttcaagtgattctcctgcctcaccctctggagtagctgggattacaggcatgtgccaccaagcccggctaattttgtatttttagtagagatggggtttctcatgttggtcaggttggtctcgaactcctgacctcaggtgatccgcccgcttcagcctcccaaagtgctaggattacagstaccgcgcccgctgccacagtgcatattaaggaattaaaggctcagaagtcctgcaatacaaacctattaagctttgtttaatcatcttatttggatacagagtacttttttttgagatggagtctcgctctgtcacccaggctagagcgcagtggcgtgatctccattagccagaatggtctatatcttttgacctcgtacccgcccacctcggcctcccaaagtgctgggattacaggcgtggctaccgcacccagcccagaatccttattttatggtacaccacccagcaagtgatttaatcaggcaggggaaaaaggatcacggtggagattcaagttggaaaggtccagtggattagggctaggtcactgaaggccttgaatgcaagcctaaaacatttaatctctgcagtagcattggggagtaaatgcaaggttttgaggggtgtcttggtaatgttacatcattggcagtataggtagagtggaggrggagcgaggcccagctggtagagcacaagacatggctctggtgggtgggcaaaaagagtattcaagggtggggcccggctgttgagcccagctgcctgggaatggcaacatcccagagaaggggaccgaacaaagttgtgtcagagcttttatttaatcctcrtaataggtgcctccattttagagatgaggtgcttgtgaggcccatgacgggtggtgggtggggggtaggtactcacatctagaggacaggagagagaacccaaggggcagctgccagggcagaggaagaaccaggaggcacagtgtccaagaatctaagggggacgagatctccaggaagctggcaggtcgctggtgaggcatctacaggggcgttgttgggaggggagtaggggcagggcgtgggtcagggcttgttaatgccacgcgcctgtgctgtttccagcacatgtgtgtccttgaggctcatctccctaagtgcctctagggacctggttcgtctgagactgtatcgttcccaaaataagtaagtgtttgctgaagccttgggacccagcctggacccagtgctgagggtatgaccttgcttaggattgtttcctgagtgtgtttcttggcccttcaaagagcccctcgaggtgaggggcctcttatctcttccatgtcctctagattggcatgtttacctaccactccctctgactggaaaccacacccacttctgagatttttatttgacattcagataaatgtacacactccggaaggccagggccttgtctttatttcacccagcactaacactaagtaagtaccctaaatcttttctaaatacatatgggctaaggactcttttgggcacctcaatgtattaactcatttacttttcaaaaacctttatggtaagtacaaattttatccacaatttttagatgaggaatttgaggttcaaatgtcaaacaagttgtccaaaatcmtacagccagtgggaggccgagttaggaatcaagcttgtgtaagccaaagttcaggcatcggtactgcacgtgatgtgttatatgtgttcatgtatgtgttagcctgtgcacttggcgctggagcacactgcaaatgctcaactaaaatttttttggaacggagttgggactgattgtttggactgtattataggcaggtgaattaagtttgttggggagaactaattatggggcaagctttcaaaattctcattgctttcctgaagctggaggctccaagacctcccatgcaccttgaagcttgcactgtttgcagcacatactggaatgtcttactcactgaaacaaaggaagtggcccctggaataatggagaccagattgcaggaaacccacacctaatccctccctccgcatttgcagggggtcyataggttagctcctcacctccatactctctgggactcakcctttgcttttgtaaagtaaagaggttggacctagcagttctagtctgttctgcacatctactagaactattgtgctagtctattcacacaaacacttctgagatcctgtaatgggagataaacccttggtgttcattggatggtgtcttagttcatttttgtgttgctgtaaagtgggacatatgtatatatgacaactcagcaattmcacttccaactatatgccctgaacagactcctgtatgaatccaaggagacatggctgaataatgttcattacagtgttgcttaatcgcacctataatcccagctactcaggaggccgaggcagagagaatcaatcacctgaacctgggagatggaggttgcagtgagccgaagttgcgccactgcactccagcctgggtgacagcatgagactctgtctcaaaaaacaaacaaaaatagataaatttaaaaaaaataaagtggtcagcatcagggctctcaagttttgctttgtcagttgggggtatgagttatggaatatggcagtgaaaataggtgactcctaagttgatacagactatcaaaaatgaaaattctctattgtcagcaccccagtgaagtgctgcgaggaaaggccgaggtgaagttgtgttagcgattccccccatgtggtcgcacacagcctgggtgcctgccgctgctgctgggggtgaagctgcatccctctcccacagaaggctcgaggccttttctccaggggcacctgttcagtgccacctttctcagaacattcgtttctcagcccgttcatggctagtattcttttcaaayctgagaaaccaaaccccagayctagagggagccaatttttaaatccatagctttctaacttttctgggctatatcttcacagcaagaaacacatgcatataaatatttatwtgaaaggaaataaatttggggaccagaatttattcttaaacatgatgaagttgggtttgtcttctattctttaagaaagttgctagtcagaacctgctaaatgtttttcactttgcagtttgaaagccactgccttaaatgatccttggcccagtttgattctagatgagcatttcctttcttgctggcacgaaatatgtagtttcaggacagtgtggggtgagaggtgagaatcagaattataggttcaaatgggtttgaattcaagctgtgtgcttcagagcgatttatgmtgtgatcctctatttcctcatttgtgaaaaggggaaacttcagggggatcggttttctgagaattaagggagaatcagatatgtgactttctcacatgtgttacaaacactcctgcagccacaaaccaccactgcaaaaggcactctcattgccaaatttactaagaaaaggtgtgtaagactcccaggttttaattttggaagattggcatcaagggagcaggtgtgagggttcatccccatcaccaggggccctgcattttggagtgaagaccaggccccagctcttataccagctccaattatctaattgtaatcaaagtcctattagaaaatgtggagaaaccagaaagtttcaggccatttatttgtggtggaggcctccccatcacggcttatgggctcttgtgtgagaaggcagggaatgtcagtagccactgaaccccgtaggggtgaaatgttcaaggtaaatcgtgaagtacctgtgcttcataggttgtgtggcctacacagtgtgaagaaacacagttggcataattaaaagtgcaatagacataaacggtccaggaatgtcttactcaatgactgaatttgrtgtcagccagaatacattraaaatggtctctatttgtcgttttgcttctttcccaaacagttttaagaagttgaaagaattctatagtggtcatctatattttacttggtttgctttatcaaccccccaatccttctatccatcagtccagcttgttataattgatgcattacaaaacataaattgctgagaaagtatagtaaatactaatactgaactctagttactatgtatgctgaagttttagggttcagacgtatacttacatagtaactagagttcaatatttgctgtattttcttgtgatgtaagatctagatgaagtgaaataaatcttaagagtattatctgataaaaaaataaatagaaggccgggcatggtgtctcatgcctgcaatcccagcactttgggaggctgaggcgggcagatcacaaggtcaggagatcgagatcatcctggctaacacggtgaaaccctgtctctactaaaaatacaaaaaattagccaggcgtggtggcaggcggctgaagcaggaagaatggtgtgaacccgggaggcagagcattccagcctgggccacagagcgagactccatctcaaaaaaaaagagtattatctgatgaattgacaaatacacctgtttaatacaacctccatcagaaaagggaatgcttatacactgttggtgggaatgtaaataagtacatcctctatggaaaacagtatggagatttctcaaagaactaaaaatagaactgccattccatccagcaatctcactattgagtatctacccaaaggaaaagaaatcataccaaaaagatgcctgcacttgtatgtttatcacagcaccattcacaatagcaaagatgtggagtcgatgcccatcaatggacagatgattggataaagaaactgtggtatatatacataatagaatactgttcagtcttaaaatagaatgaaataatgtattttgcagcatcatggatggaactggaggctgttattttaagtgaaacagctccaaaacagacaaataccgcacgttttcacttataagtgggagctaaacagtgtgtccacatggacatagaaagtggaatgatagaccatggagacttggaagggtgagggtaggagggtggggggcatgagggtaggagggtggggggtggtgtggatgatgagaaattacttaacggatgtagtgggtgttggatacactaaaagccctcacttcaccattgtgcagtatatccatgtaacaaaattatgtttgcacctcataaatttaaacaactaaaaaaaacctccatcaagatayagaacattaccatcaccccagaaagttaccttgagccccttcccagtcaatccctgtacctgatccccccagaggcaatcacattctactattttccacatatgtgagttttgcctgttccagaacttcacatataaatcgactcacacagtatttgttttttatgcaagtctttttttatttgtcataatgtgggatttatctgtgttgtgtctatcagtgtctcgttccttttggctgctgattccatggtatgattagaatctgatatgaatattgatggacacccgggcagtttccagtttttggctatttgagtaaagctgctatgaacattattgcacaagcccttttgtggacacgtttttagttccttgtataaacaactaggagtggaattactgggtcattcatagaatttggtatatgtttaatttttagaaactgccagacatttcccccaaattgttgaaccatttatactcccactaataatgtatgagagctctgcctgctccatatcctcaatagcatttgttgtctgtatgtccttgtttctttttttcagtggagagttaattaaagaaagcattcatttgcgtttgctaggaaacacaccatcttgacctctctgtaggcagccctaatctgtgccacaaccctgcgtgtgactgtggtaccagccctaacgcagttctgtcaggggccccaccacacacataggggccacacataggggcctggctttcagaggacagttccattttaaaagggaatgcaggggtcgggcacggtggcttacgcctgtaatcctaacactttgggaggccaaggtgggtggatcacttgaggtcaggaccagcctggccaacatgttgaaaccccatctctactaaaaatataaaaaattagccggttgtggtggcatggacctgtaatcccagctactggggggctgagacacgagaatcgcttgaatctgggaggcagaggttgcagtgagctgagatcatgctgctgcactccagcctgggcgacagagtgagactccgaaaaaaaaaaaaagggaatgcaggaagaattgatagcatttaatgagcacccatggtgtctgtactaggccatttacataaatctgttttactctccacaaaaactttacaagagagtcattctcactttaaaaatgaggcaaccaaggctaaaaaaggattgatggctgccaaggtcacctgtgggcagatggtgacagttgggatgtaagcatagatagtcctgactccacggccataagattcacagtttacattggcttgtactgctgaaccaaagtttctaggraaaatcagatgattatctttttaaatggatcctaaatacgagttggctttgtatcattccaataagaagctcaagtacaacccaactgaaaatgtgccagccgcatgttctaacttagaaatgaagtaactgtggtgcctttatcacccttgtcttggcaagatcgtttggttataactatgccttatgagacagagtgagggtaaggcagtgtcagatcgatcatttgactcttcttcacctcggaattgtgaattatgttcacaggtaagtatacctccatcctctagccagacttaaaccctctagagagcagggaaccatgatgctgatggtgacggtgatgatgatgatgataaaaattgtagacatcgttagtgccaggtamtgtgctraacgctgtgtttgagctatctcatcatttcttacagtcatccagtggtaggtacgctgaacttcactttacagaaaaaggcaatagatttggagcaattaggcaacttgcccaaagtcacagtgagcaagtggcagcattgggattggaacttggccagccaaattgctaatgcctgggcttttaagcacaccaccagtggcacattggtgctgtgctgctagcacartgtgtggattcttctcttactaacctaggcctagctgttcagctcattcaacagtcctctccgaggcttggtcctctgtgcagcagcagtgtgctaagctgcctcgtgccctttraagagtgaaagttgtgctggggagataaggcccatgtagacaaaacaattagagatatcgggccatataatgcaagcacatgatgtgataaagggagaccgggctggtgatacgttgcayggaagctggttaaacctgaaggaagcccttatcttggttgctctgcattatattaacaactgtacagcggagacatacatccagagctagcacacagcaagttaattggggkacttacgtagtccaggcgatataaattgaagattgtactgatagatagcctcagtacagcagatggcacttacattgtcaggcgttgtgccaaacgccttacacttccttgcactgaatcttgacaaggtgcgtgtgtgtatgtgtgcrtgtatatgtgtgtgttttcctgtgttcttgttctgggttgtggagggaggtgctgactagaaggaggttatcgttacccttttaaaacagatgatgaaatctgagtgtcagatttctaataaattgcccaaagccacatggctaatgcatgttagagtgggatttgaacccaggtctgcctgcctaaaaagctgaacatgctcaragcttacacaatattgaaacataatcatgttttaaccctttgaagagtggtttcacatctgtggggctaattacacctctctgtgactggcacgtattttgagcttaagaaacacttcctgggtaaaaagagcaccagagtggtgcattccaagaggtgtcctaggagctttagggtgccagtcatgtgttttacgtgttccacacccctcccttcagttggagcagctctgtttttctctattttacgttgtggcatttggcccaccaattttatttggaaataagcattctgttgcttaaaatggtttgaaaacaaatgatgtagaagatcagatcactccattcctagtctgtaccagacaccagcgttaactgtgattcagtgcctttaatgacacggagtattgaatacttctgtatggctgagctcttgaatggtggccggcattgcattgtaatggagtaattggaatcctggggtttaaaaagaggctgccaggtgtggtagtgatcatggcgattccgggtacatggaaaatacrtgccttgagacctgtgtcttgctacattacctgcttaggacttggagatgtatcttttcggtcctyrtttcatttggagtatatgccatacattctcagagcagtccactgttgtgtgctagcaggtgcttgaaaactaaaggaaaaaaacaagatcccctcaacccagagtcaccccatagaggatgattggaatgttcagtgcagttacctggggccactggaaatgatattgtagggcagaaagggcaggtccctttaggggcattaagttataaatatagggctggttcaggaactgaatgtgaaagtatgcgtttgtgactttgacccacctccaagtttacggctgcatgcctcaggcattgagtgacaaggaagagccagaggctctaaggttggatcaaatacagtccagtgttctgatttgcctgagcctctcccagttttggcattgaaagtcccatgtcataggaaacccctccatcctgggcaaactgggatggttggccaccctacatggccctggagctcatgccctcactgctgctcagctcaactgtggcagcagcccttgagctgcttccttgtgctatcccagccctccacagtgccactagagccactagagcccttttggaaacagatctgaccttcttaagaacgaaagaaagtccttggcaatggtatttgctgtgcgtttatagccatgtcacgtgagccctatgttgtagctactctggacatgccattttttggcacccacaaattaatgccaacttatagttataccaaacctctgtcctgccttactggacaccagagcatgccacaaacctccatggccttgacagggagaaagggaacaastaccttgataggatctattaacggaggaataatttactgtgtttcttctttgttgttgttgtcatttgtttgttttttttttgagacagagtctggctctattgcccaggctggggtacagtggygagatctcagttcactgcaacctccacttcctgggttctagtgattctcttgcctcagcctcccaagtaactgggattacagggctacgccaccatgcccggcaaatttttrtattattagtagagacagggtttcaccatgttgaccaggctggtctcaaactccagacctcaagtaatctgcccgccttggcctcccaaagtgctgggawtacaagcatgagccaccacacccagcctgtgtgtttctatatgttcacatacaacatagtccatgtttcacgtaagcatcacaaccgctgggagatgtcagcattatgaatcctgttctacaggtgaggtgacatgctcagagagccctgtgatgtgcccacaccacacaggtagtgaagctgctgagctggaattcaaaatgaggcctgcctacctgtctaaggtccagtgcctaaccactgctctggcatgggcacgtaaccatgcgtgggcgttacgagagggcccgtctcaggattgccgagtcacagtgctaggcctgcctcagattccggacttggaaggaatgcagtcattggctatggtggttgtggcttcctatgtgtgtggaggagggctgcagggaggaggggtgtcagggaatgtgtgttccagaggagtcctgtaagcaaagcaagagaggacctccttcctgggaacaggttcatcagcaatactttattatttgtgttttcccttcagtccatcagaaaatcctgcacaccacccgttcttggtggagctgtggcctctgagtccagctgggctggcctcggatgatgacccaccaggggcagcctcgccacctcggtcccctgtggtcactgattcagcggatcgcgtgtatcctggacttgagagtgctgatgaggcatttcatctttgatatccctttcatccctcatgacagccaccacgttgtgtttcctagaatttggctgagttcccactaccagggaaggctcagagctggagtgtctggaaaagccacccatggccatgaggcaggcaggctaaccccagatgagggcgatgttgctgtagctagcccgcagctgtagctagtggtggggccacctctagtcactgggcaggaaatggaaaattagtgcccctaaggaggaatgctgccgtcactggagccaattccagtgacttttcttggacaggtttctgcaatcccttctgctttcgttggcctggaagagtcaagtgaggctgtgggacagggtctgcctagagcccggagagagagtacctagtacttactgagtgtgtcctgagttcttggtcctgcaccacacttgtgtgtctaatttttcccctcacagcaacccaatgagatgcaatgttcccattttagagatgaagcagctgaggctcagaggctcaggaacttgcctctgctaaatagtggccggggttctggagcaggtgatgtgggctccagagccagtctccgtgtgtcacatcgcctgacacacttctggttgtgtggtctctggtggatgatgtctaccgttttccctcttgggaccctagggactgtgggtggtgttctcagggagctggtcagatgtgacttttctcagggcctaagtgctggaggtgctgagtgcacctgggtgtaaaacaaacattcttgggttattgagtcagagcatctccctgacctctgacccattccgcttcacttcagtgctgttctcccaccaggaaaggggttgagtgttgacaaacatgccaataagtgaaccccccaggaaattgccttgtatccttgtatcctttgagaaggttgtggcagggcagcagaagactggcggtgctgctcgcagttggggcagtcacctgcggatgcgccttgcctgctccgccagcccctgccctgctgcaggttccgcgcctcttcagcactttcattctgtgccacacaatggggcccttccccatagtcggtggtattatcacccaggatctggatgtttcctgtctacactgctgtttcctggagggtaggaactgcaccttcccagtgacacatgacagtcttcacccatctgtgtctgtggctcctttctggagtctcactcatcctctttcctgctcccccacagcttttctgttgcttcagtggcctgactcttgtcgtacatacatgctctggggtcagcattctcttgcattctgataagcctgagatcctttgagggggcacctgcttgccttattcaccaggcctcaatgtgttggwcctcattccactccatcacatgacccctctgrtcttgctgcaggacatggccctyataatatgcaaacattagaaagtaaatttagtactgcaattgcaatatgcaaacataatatgcaaacattagaaagtaaatttaatacygtgcttgcaatttggtgttctgggggtatgaggaacaggatggaggcatgcacccctggcatggggcttgctgaaagcactgaggaggtagtcggctctcaggagggggtgagcacatcgttggatgcgaaaytgtcttatattgttgattgaattataaaagtaatgtatatgcgasagaatactactyagccataaaaaggaacaaattaatggcattcgtagcaacctggatgggattggagaccattattctaagtgaagtaactctggaatggaaaaccaaacatcatatrttctcactcataattgggaactaagctatgaggatgcaaaagcataagaataatacaattgactttggagactcagaggaaaggatgggaagggagtgagggattaaaaaaaaaacagccctgtgagtttccagttttaataaagctctgagaattaaaaaaataataatgtaaaggtgtatagcatgaaattagactatatgtaatgtctgtagrggagtgaatcccactggccgccccttacccacagatattcctggagggacttggagttttaagtctcggttggttcctggaagaattttgcccaaaattaatagtggcccttcctttctctgcagaacacggagagttcctggctctggatcttggagggaccaacttccgtgtgctttgggtgaaagtaacggacaatgggctccagaaggtggagatggagaatcagatctatgccatccctgaggacatcatgcgaggcagtggcacccaggtatgacccttctctcagggcagcccctggtgacaaaaaacttccttggcatgttctttctgtactttctccagccgctcccagcgtgtggataggcagtcacccaagacactcatggatgccagcacagctgtaagggctccctctcagccggagctcaggctgttctggttgtattttatacccaacatgtwctcagtattaaaaggagtgactagagaagaagcatgaaatccaagtaagacgctgttcagtgttgtcacatctcgggcctcagggcttggaagaggtcaagccctctgattcgtggtcggctgttccctctcccacacaaggctccctcctgggaaaggaatttctgaccatgagtagaacacgctggggagatatttttagactcattatttgtctttggggtggccttgaggtaaacctgctttccttgttatcatgctggggttggagaagggaggctgcatccctagggctgtgggcatttgagctttaccgaagttgtcacgtggctccagtataacgtcaggagggacacagagggtagcggcccttccactgccactcctatgcctgcaccaagctgaggtattaaagagattgggtcctgtattcaggcactctagctgtgtgattctgggcaagtgatagacctcagtttattcatctgtaaaaagggatgatagtgtacggattgtggtgtagattagaggagatgatacctgttaagtatttggcatagtgctggtgcataatctagtactcttcgtgtttttttcacaggggtttttgtctgtttatctaattgcttcttgtgctgtcactttctgtggctagtaattgcattgttccctgttgtgggggatgtggttgccttttcttcccrttgcctcgatctcctgccttgggccacatcccccagatgataaatgtttaagaaccaagtaaactagataagacaaaacaaaacaaacaaaataacatctaaagtttggctgtgattatgtaaaagacttgtaacgtgatggtgacttgttaggtggatttttaagttttacaagaacaacaccctccctgttgcttgtatcctgacaacatgcagggsccaggcaccttgcagtccctgcagcgtcatccctagagcctggcaaggacaatgaagtgcgtctctgccaattgagaaaaaaaatccattttaaacattcaagatgtgagtgaagttcttcttgaaaaaagcttaaaattgctcagaccacctagttagagggtatcaagaaaacctactctccatgcaatatataagaaaaacagtatagtccggattaaaaaaaaaaacaactatgagacccaccttgaagagcattaaaactgttgagatattagaaagattttaagtaagtgaaaaatgctatttaaaaatgaaaaggaaagaaagctagaagaaaatataggtatctttgatcctaaggaataggaagactgctgtgtacctaaaagcagcagaaaacacttggaaaaaaggctgaaaggaagttcattgtggctattttagtggtggaattactggtgctatttttcccatattttcccccttttttggtacttggtatcagtattttacttaaaggaaaacaaatggattgtaaatatacactttggttaagaacaaatcttggaatcccaaacttgcaaaggtttttgaagaattgtgaacctgggcaatgggggtccttcggtaaagtctgtcttccggcacattaacttctcctgaagagcagtggattgcaaacctgaatggcagccactttaagattttaaacgtatatctcgtggaaagggaagtgagcagattttcagaccagtaaggaaaaggaaaccattttaacttcataaaatgatgccctttgagcctttttatgacaggaacgtgttagctctttctctgcatcttacccatagatcctcctcaaagagaacgagattgtcttccaattcaaggaagcagaaggtctcctcttcccacttgagaaaagatgtaggttctttgaacccagccctagccagtggaacttcttgcagcaatggaactgtctcctatcttccctgtgcaatatgataggcactgaccctgtggcatcgagcccttgaagtgtggctggtgtgacggaggaactgaatttttaaggtcttttttcttttcttttcttttttttttttttttttgagacagtctcactctgtcacccaagcgtgacacccaagagtgcggtggcaccatcccggctctctgcaatttctgccccccaggttcaagcgattctccttcctcagcctcccgagtagctgggactacaggtgtgcaccaccaggcccggctaattttttgaatttttagtagagacagctaattttttgaatcaccatgttggctttgagcttctgacctcaagtgatctgcccgtcttcgcctcccgaagtgctgggattacaggcaggagccactgcgccggcctgttttaaaaattctaattaattgacatagccacagatggccagtggctactatattgggcagggcagtatttaatgcttcttcacggtctatttttctctaccttcctatgttaggagcgcaactggaaagaaagcagtgatcagagctgggggaggagaaaccattttgcttttcccccttctaacccccacctccagtctttgatgattggccttatctctttgcacaacttctgcatctccctttttttttttttttttttttgggataaaaactatttgtactaaagatcattttgactagagtgccaggaagaaggtgctgggaatttgtttaatatacgtatcatataattcatctctagtcaccttcccgacagaacagaatttgctgaatatatccctattttcatgttaaaatacttgaactctgttcaagggagttggctcacctgcactggtgatccccatggcaagagagccttgtcctccccagcctttgctcttgaaaatgttttggtttggaggtcgaaggttcagcctcagctgttgttaactttgcatgggatcagacagagggacagacagaatggatgtgggaagtttagttagatctggccatcttccagattggggtggccttgtcttcctgggtccctcctgctgaccataccctaggcatcaggagatccaacaggtctgtcagtttccctctcccaacctctcagttcctttataaatgtaagaactttctgtggtttggcatagtggttctcaacctactgctccaggatcacctggagggcggaaggcttgctaacagatggctgggccccacccccagagtttctgctatagtcggtctgtgggggcgggcctagaccctagaatgtacatttctaacatgttcccaggttaagggagtgaggttgctgttccaggagcacactttgaaaagccatggtttagtcgaatcttcttgcaccttcctggataggaaaaggatagttgacctcttatccaccttggcttttagattttgccacgtagtcaacctggcccttggaatctgcccagcctctttggcctctgcttactttttacacctgaatgcctctagtctcagccttcacctaaagggtcagcagcttctctttgagcgtgtagggtggggcaagaaggacgccaggggattgtgggctttggggctgattgaaagcctggcttattatgaatacagcttttttaaggcttaggagctctgggtcctgcacagtgagtgcgtgcggtcacggttgtgaggctgctcacccacaaaatgtgatttatttctcagcgctcttcatggacttactggatgttctgtttagaaagttagaaaacaaagataacttctttgaattgccctcaggagattagttttctagaatggagaaaaaaatataaaaattacttgtttttgttaagttggttcatagaatgccaacagagaatgctgtccctgcaaaccaccccccaccccatcaccagagacagggatactaaaatacttcttggcagcaagatgggctggcctttggtatgatcgtcaactgggcttccatgtcaatgggtttctgacagggccaccaaagaatgttctgttccccgggcatgaagtgactttctgattaatgttggccatgatttcccctacctcacagggttatcttgacagcagtttagaaaaatggcttaagtagaggacaatatttagtgggcaaaaactaatgttaagcctttatgtattgactcatgtastccttttcataactccatgaggacaggtccagttataattccctttttgtaggtgagcaaatgaagatatcagaggagatatgggttttgcacacattcagctagttacgtgctgagcctgaagtgcatgcccttaatctctaygctgttcgacctctctgctcaccacccygtgtcatgtatccttagctgtttgaccacattgccgaatgcctggctaacttcatggataagctacawatcaaagacaagaagcycccactgggttttaccttctcgttcccctgccaccagactaaactagacgaggtaagatgggctcctcagacacttgttgcttcactcttggggctgggagggctgagagggacttctgagccacctgctgtggtggtggtggtagcactggaggattgtggagatgaagttctgcctttctgggtgactgtgtatgtcgatgggggggctggtgaagaaatctggggggttgggagtgccctttatcaccctctctcccacacacattgcacagtatccttatcccctccacagaaacaggaatgagaaatcaggaactccccagtctaaagtgttatgataaagacccttggaagaaagatacttggagagttaatgatgtaaggacacaagtacagtcatgtattgcataacaatggggatatgttctgagaaatgctttattaggtgatttcacttatgtataaacatcatagagtgcacttacacaaacctagatggtatagactactacacacctaggctgtatgggacagcctgttaactcctaggccacaaatctgtatagcatgttactgtactgaatgctataggcaattgtaacacagtgatatctgtgtatctaactaggcaataggaacttttcagctctattataatcttgttaccaccgcagtatacacaatctgtcactgactgaaacattgttatgcggcacatgactgtgtcttatagtgccagttgtcctgagtttctttttcctaggctagccaggaagtaacacacaaattcaatcatgactttaccccagtggcagaggtctctgctaatgacggaggtttgaggggtgtggtgtgagtttcagttttagtgggaaatcaatattcacttcttggtccctttccagagtttcctggtctcatggaccaagggattcaagtccagtggagtggaaggcagagacgttgtggctctgatccggaaggccatccagaggagaggggtgagtggggtggcaggagcttggggtctgtgggcttttctgggtccaccctgaagactccctgagtgtccttgactcatcattgtttgcttacgtggagcttaaggagagttctcttttccctgacacatgtactcaataattttgtatgcgatctgctgctttgggggtttttagattatcaaatggataaataatcttagccttggcacaagaaaagctctttagttcttaacctgaagaagacttgaatgtgatttccaagtaagaaagttggaatgatgttgacatgggagtggaatggctcagagagagaatgaattaaaagtcttatcacaggaggagttatggggagggaggggggagagagagagaaggaggaggaggaggaggaggagtgatatatagctggtgttaggaaagtcgccctctgtgatgatgaaggtcagagccctcccatttgtctccacaggactttgatatcgacattgtggctgtggtgaatgacacagttgggaccatgatgacctgtggttatgatgaccacaactgtgagattggtctcattgtgggtgagtgaacaccgtgcatgaagggcccgtgctggccaagggatgggggtgtgggctggaaagggagaaggggcccatgggctgggtgttcctttgtagttcatattagaagataatggtccagtcactttggagagccgagcagggactcatggagttgggggtggcagaagattagaccatgtattgtgatgcccccagagtctgcagtgagaaatcccagccatcctggccgggcagtctcgggacagtagtataagagggaagaggggtgggaaggggccggagcaggcntgtgcatagccgtcccttgttttggyaggcacgggcagcaacgcctgctacatggaagagatgcgccacatcgacatggtggaaggcgaygaggggcggatgtgtatcaatatggagtggggggccttcggggacgatggctcgctcaacgacattcgcactgagtttgaccaggagattgacatgggctcactgaacccgggaaagcaactgtgagtaggcccttcctgtgcgagtgggcttggcgggggcctggagctgagtctggggctggtcggggccagggggttgtttctttacagtcttacatccccaaagcttgccaaggtggccactggtcataggaatgtctgtgactataaattgctgagaggatctaaaacagagagcaagcggatataccagattatagctaataatgtgtttccttcacaggagtcattttggaaggttctattctgagtgtaagtgggtggccctgctctttctttccaccttctatttgtaaattgtccatgggaactgtgagccacctaaggaaagttgtgttgaggtggccaagattggggtctctgaaagctcctttcatagctccaactccatcaccacccagaggacaggctgacagctggctgctcattgctgctccctggggtcccagggcctcctgctgcagctgcaggcagacccatggcccctggagacattggctgaggagcttccttggcctccttcacttggaccttggcccaactatgtcctgggrtggattggaggaggggcgtctagcattttggatcctgaatattgtrttctccagcctggcctgcctttgtttttagttgcttttatctcttacaaaaccttatttcaccctcacaaacatttgccaaatgtgcgtgtgaaagatcttgaaacagggattgcttcaaggtctgaagcagttgcaaaatattttgagcaatacagatcatctctggtcttgtgactgttgtagaaaagcttttcgtgcagatctctacttggacaggaaaattgaaccctataaatcaagtcagtggtgggtaacccaggagagtccttgctttcgtttttttttttttttttttgagacagagtctctctctgttgcccaggctggtgtgcaatggcgcaatcttggctcaccgcaatctctgcctcccgggttcaagcgattctcctacctcagcttcctgagtagctgggattacaggcgcctgccaccacgcccagctaatttttgtatttttattagagacagggtttcaccatgctggccagactggtctcgaactcccgacctcaggcggtccgccctcctcggcctcccaaagtgctgggattacaggcgtgagccaccgcgcccggcctgagagtccttgctttgtcaaagcatggtttatttatctaagtcacaagcttgtttcacatgttgaaatgagtcctttacttgaaatttctgaggatcatactggttgtgtctgccatggctgatgagaggtttatgagctgaaaagtcactcagtgcctgcctccatgaatgaggcacacccaagtcattccgaggaactaaaggccctttcaaatgtcaaaagacaaatttgccagccagaccatgacagcacacccccggcttatcctttgacacccaccaaattgtcatccatggtagccctgaagtcactacagacaatttttgtcccctctaatatatttccaagtaagtatcttccaaatgttgactggaacaaagtgtttttaaaaactagaataaaaacttagcaacacggagttccttactgttgaagccaggctcccatccacgctggtttccttctcctgaagctctgcctgtgtgggtgcactaacatttaaaatgcgcgctgtcatcttcacaattttgccagctctcagttagccctgatgctgctgtactyggccttgggtcttgagcaggctgcttcctggaggcctgggtttcctctcggaaaggtaaccttggaatcccttccacatctcagtcctgggcctcctcctygctggggctcatcctagttagtggcagcaggcccatgtgcctcctctaagacacaggttctttctcaaacacccagaaatgggccttttgtcaaaaagaattatcaccagggcttggtttcctctcagttctagtcagaaagaccaattatgaaagaaaacagtgccacctagtgttaaaattaaatcaccggaccgcactgctggtttgggggccgtcccctgcctttctaaaacatcttgtcacctgcctgcttagaagcctgtttcactcccagacccctgagacctgtcatttagagctcggagcccagtgcagattcctctatcccaacctgcctttataatgttgccccatcatcccctgccccaggtggttttcacaccattttctctggagcccatgaacggcttgcaggggtggacagtatgagctgatgagtttctaggcctgtgctacatatctaatcagatcgccttttttctcttgtaaataaatattgggctatgtaagatattaattttaaaaatgatttcctggctagagaagaattttaaagattaccaccctaygcataactttacctaaaatacaggctgttccagaatgttccatactccctgtgtgtttcatttggctgcttaagtttcatttattcttctccataggtcaaggcccatcagcctgcagggacaacccaagccagcccctctgagccgtcacctctccacgtatcttactcctgggccgtgctgcacacattaacccttagttgtgaagttgcacgtgtgcgcatcttgcttcaacagggaagctatgagtacatgggcagtggggactttatgtttttggtttgtgtcttccggcaggtttgagaagatgatcagtgggatgtacatgggggagctggtgaggcttatcctggtgaagatggycaaggaggagctgctctttgrggggaagctcagcccagagcttctcaacaccrgtcgctttgagaccaaagacatctcagacattgaagggtgagcttctggccagccccctctatttgctggatcaccacacgagttgacgggtagttggggaatgaggagggggctgtaccttttgactcttcaagtatagactscaagagggtctcacrtgacrtggaccatggcgggcctgtggcttcacttcacttaccagtctccactcttgtcgatttcgattgtgattgctaccagtgactcatggtactgggaacggtggttggcctccatatgcagggacttgggctgttgcactgggtttaaagctggaggaccccagagggcccccgaaagacttagctgcatctgcctccttttccttctcctgaagctctgacatctgattccctattggcaattctcaaaaaggactctgtcatgacccctgcttcataatagaaagctaggtctttgaattggccagagatatagctacccaattaattctaataagcagagctggggcctgcattttcacagcccagcargggcaagagtgaggatggcttgatttttgttgttgttaacaatatcccaagagtcaggcgggcctcgtttactgttcttgagatttccacttgtagattgaagaagtcctggtgtttcagggaccagatggtggagaggaggtgtctttggagccaaatggagcagtggaacagtgccaatgactttgttttaaggggaaactcttgaaggaatggggcctacttgttgctataccccaaggtgatgcaagtaccccaaggtgatgcaagatttagttcccttgagaagggtgctaaggttatagcactagccccttaccaaccatctttagacacaagctaaagcagtgccaagtccatggtgaaatgcaatagactcctactgctttagagagagaaaccaggtgggcatcaccgcagggttcacatgttgagagtggctgacagcagagacactgtctgtctcccctaacacaagcagatgtaacacaaactctcacacacacaacttggtggtaaagcaccaagaacagggccttgtttttacatagcacatgcataagaaatacttgtgtttctcaactccgtgtgtctctgtgtgtgtgtgtgtgtgtgtgtgtgcgcacgcacatgcgtgtgcgtgtgtgtgtggtgtctgggagaggagcctcagggtggctgtgctatattttgcacccccttyctcctcctcctgcccctgcacaggtggactaagcaatgaagagggattctgtccccactgggtggtgaatttgctggaactaaagggcttycttgccaccccccgacacacacactggccacagtgggtcagacacaggcccacatgctrtctttctgtttcccagggagaaggatggcatccggaaggcccgtgaggtcctgatgcggttgggcctggacccgactcaggaggactgcgtggccactcaccggatctgccagatcgtgtccacacgctccgccagcctgtgckcagccaccctggccgccgtgctgcagcgcatcaaggagaacaaaggcgaggagcggctgcgctctactattggggtcgacggttccgtctacaagaaacacccccagtgagtcagtgtgcagggcctggagatgcggagttcctggagtacctggggctgagtgactcctcatgccagctccattttgcatttcaggggtggtgtggagggaccatagagctgagggtcttggtggaatgaaagttcccacctgggcaagggggaatgggaggaagtcatatctggtgtgggtggaggtgatttctgaaggctactgatgactcgggctctccgcagagctcctctggctgctggacactctctttgccaccctcttgtatgcgttattgttcctgtctttactcttagaattcttggtgattcctgcaggtgctatgtcctctgccagggaccaccccagcccagtgagggttaccagcttctctggctgaccttggyattaaattgatcctgccctgtccacattttgatccctcaggtcataggtaccagaatattcacatgtcagctgagacctggaagatgtctctttattgtgcctacttatttccccatcattttcacctaataagaatgccaggtcaatgtgcctttgttttcttaacttgtcggtgcaggaggcctcagccctgagattccctcttcctacccagtgttgcaaaaactcgagtgtgcacgtgaatcacatggggatcttgctaagaggcagattctgatcagaaggtctggggtgagtctgagatcccgcatctctaacagcccccagtaggctgcagcctactcctgcacttggagtaggaaggccctggagaccatggctccaagtggccactacccagagagttcctggctgaacacgttgtctttagctgtgcagacacctttgggatcattggcagaaactggcaaaagagaggctaaagtccagaagagcatctctagcttttaattttgggtctttcccagacagcagctagtgaaatgagtgatagaacaagacagataggtggcatcagaaccacctaataccacagggctgctccakcaaagaggctgatggtaccatgttgggcaagggagcagtggccagggggccttcttcagtgaggaagaggaggtcttgtgtggctgcatgtaggggacagtggcttattaaaaggtcttttcctttcattggcgggggtgaaccaatcctgggtggtcatagttgatatggttcttgtagtggttcctaacttgggasagtggagagaggatgtttagggcagcacccactcctgcaggtgccttttggcatttggattaaggcggtgggcaactgtctaactatttgcaccattgaccctaaccatggacacctgtcncttacccgccctggggaactgcagttttgccaagcgtctacataagaccgtgcggcggctggtgcccggctgcgatgtccgcttcctccgctccgaggatggcagtggcaaaggtgcagccatggtgacagcagtggcttaccggctggccgatcaacaccgtgcccgccagaagacattagagcatctgcagctgagccatgaccagctgctggaggtcaagaggaggatgaaggtagaaatggagcraggtctgagcaaggagactcatgccagtgcccccgtcaagatgctgcccacctacgtgtgtgctaccccggacggcacaggtacacggcagggttgccacctggctcacatggtgggcctttgtcctggtgttgataccctgggagggatcccttagcattagcattggacatttgaaccagaacacgtttcttcagccgtattactagggagttctagtctttgataaactcaaacaaggtgctcctctgcaaacagtagtaatggtcaacacttattgaatgcttactgtgtgtcaaagcactttatgtgtatgagctcatttaatctttgttaactgttaaaaaatattagcagttaattttatgtattcacctatgtttgacagaaaactgaggcgcagagaagttaagacacctgcctaaattcacacaactagaaaatgtcggagctgggattcaaacccaggaattcaggttctagaatctgctcttgcaatcaccacattggtctgagtcagggttggcaaactatggcccatgggcwgaatctggcccaccacctgtttttgtacataaggttttattwcacagccatgcccatgcgtctgcacgttgcttatggttgttttgcactgtcttggcaaagttgagtggtggcagcaaagactgcatgacccacagggcctaaaacgtttgctgtctgggcctttacagaaaaagatttctgacccctgctgtaagtcttgtaacctcagaaatggtggtcttattccaattcagagaagacagtcgatgagcaggccagtgtagcacagttgttacaggttccagagacagactgggatttggtccctgctctaccctgtcctggtcgtatggccccgggcaagtgatttaactatcagccagatcccaatcatccttaagagaggaatgcagtgtctccctcacagggctgcctaagggttgaacgaggactgtgtgtgaagcatgtggcacactgtaattgtccaacaagggagggttttctcagtttaaaagatttcccttcagcttccttcagggagctggactcttctgttccttctgtattctagaatgtaatataaagtggcatttgatggarcaggaatggtgtatttggatcgttttaagtgtactgtctccacattccccatgttctgccccaacttatcacttccctgggcttattttccagagaaaggggacttcttggccttggaccttggaggaacaaatttccgggtcctgctggtccrtgttcggaatgggaagtggggtggagtggagatgcacaacaagatctacgccatcccgcaggaggtcatgcacggcaccggggacgaggtgagcagggcggcgccttcaggagggggcccctggtggacgtcacctcttgccttcgaggacagtgctttctctgctcatctgtgaccctggggagggctagctggacccagggctgcagcctggtcttgactcaggtttgtgcctgagcctgcatttcttctgggtggaaagaaacattgatgttgtgcgcaggccctactgggggcagcctgccctgcccagggcccctccctcagtgtcctaacttctccctgcagctctttgaccacattgtccagtgcatcgcggacttcctcgagtacatgggcatgaagggcgtgtccctgcctctgggttttaccttctccttcccctgccagcagaacagcctggacgaggtaayagcaccttcctggagggctctcctgtgggctttattgactctaaacaaaaccagccaggtatggagcaggggagaaagttgagctaagactaaggaaaggagggcgtgagttaccagtagtggggaggggctccttgatgggaatgagtaagttgaggctggtggaggttaagtaggttagctcagctgtgacagcctttgggacaacgatgatgatgctactcaatgttaacaactgccgggtgtggtgactcatacctgtaatctcagcactttgggaggctgaggcaggaggattacttgaggccaggatttcaagactagcctaggcaacataggaagaccccatctctattgaacttatatatatatatatagcatttttaagcacttactgtgtgccaggtactatgttaggtttcttacctgcattatctcgtttaaccctcacagcaaccatataagagatatgtttgaatacccattctacagaaaggaagataagccccacagaggtgctgggtgtcttgctccaggtcataatagcttgggactggccaagccaagatttggattctgggttcctgatgcctgagcctgtgctgtcagttatgctgtggggctcctgaggcccttgttatgggctcagggcattttcatgccatatcctgttgtttggatgccctggctcttctctggtctcatcttgcttctcactcctcttcaggttaccttgggtgaatgaagtaggtgcatgaggatctggcactcccagatgttctggacatgagtgccccgagaagtggaggagaactgagtaggcagtgctggatctgctgatgactggtagccctaagcattaggtatctggagactgtttttaagcagttgtgtctctgwctcagtcatgtaggagygcacgtgcacgctgccggtgtgtggtatgttgcacatgccactgctaggtataaaaggcatggctcctacctttagatgcttacaaacaagctgggctgatgaagcaagctcagaaaaggaagagctgctgtttggaatgtggccctcgtgggatggatactgaagyccccaggacaggtagtgagacagatgttaatccgagtgcatacctgggggatgtcaggaggacttggaacaagtcagaagaatgagttgatgggaaagaaaggtgagcaggctgcccattgtggagagggtcatgtaggtgggagcaagtgacagaaagagctgggccagcgcagaagagcctaccctagtgacaaggaaagagcagcatttcccacagggtccctgcaacagtggccctcaccttggcttcactgagttttgtagatgcctccttctcctccttatctgagagaattccccatgtgcactagtataattaaggttttaggaagttctgcaataaaaactcagcttagtctggcatttctcaacacctattaacattcatgtagtgttaaccagactagcgttgctttatgcctcatgtggacaaattcttatgtactatttaatggaccattacttattataacaaagatattagaaacaaacttgctgaatagtgagatagtagttaaataaattatgacccacttattagctagtatcagccactagttatttgtaataaattttaatcacatgaaaaattactggtgrtatgactaaaaagttttaaaactacttttctttagaaatggtaatctctttataaaaaaacataaaatacaattaatgggatgataaaagcataaccctccagtgtatatscttcttctagacttcctaccaaaatattttcaagtagatactatcttaacttttcatgccaacaggttatatatttatttatatatttgccagggaaaccagaatgtgtgttaactgtttctgtctgaattgtgagattccaggccattggattaggttttattctgtgttccaggtttctctgaggagcacgtgttaggtctagagccgtaaaaattaagagcaaataaagcagaagtcatttcttcctgtgggctctggcaagaycctcctgtgatggggaaatcccaccagtgcagaggcccctggggttagagrccccagggctctgtggcccccagctgtgtttcccagctgttgggcctccacttgcctcatcagtaaggatcacctgaaattatgttatttgaacatcccgtaaacacaaacttgcgtcaaacatgtgaagctaacttgtagagagctgggtggagatcagcacacactggtcagccagctctctgagggtatgtgctttgtttttctgaatctcctggggtctgaacacagtgtgacacctccaggttgatgtgaatgaaatgccaagctgatgggcatgaatccctgagcaaggcctggagaaatcatgcaagtgggtgggttatgagcacacagctcatttatggaagccgagctcttgggtaaggagtctgaagccctgaggcttgtttcctggtgggctgtggcagcagagagggcatcagggaataaaacccaaagcatttctcccaggttcaaagccrtcaagcatctgctcccagaggaccacattgaaggcaaggggccactgaggatgctgaggaggagcctggagttgttttcctcactgaaagayatggggtggtggtgaagcctagctgtcacccagctgtgggcaaagcacttgttcgccagatgctggagtttgaaaattaggagacatacactgacccttctgatgtaaaggatagggacagagcaaactgctttgcccagtgagcgaaccaagcacataggaagaagttgcacagcagggtcagctgcgtggtgcttatgagcccattcactggggtcggagggcctcggagtgcatcctgcttctctcttccaagctgtaggccttgagcaagtcactccagagcctcagtttcttataaagtggccataaacatgatagatgttccacaagggtgctgtgagggttaaataatgtaatgcatgatctatgcttagcccagtacctgctacacagtaggtgctcaataaatccaagtaagtaccttaggaacagtttaatttgcgggtgagatgattggtgactctgggggatccgtctgacctgtgaggttgagagctagaagcacagctggacccccagaactgacctgggagctcttccctgatgtcctttccatgcttgtgtgtgatttttagagcatcctcctcaagtggacaaaaggcttcaaggcatctggctgcgagggcgaggacgtggtgaccctgctgaaggaagcgatccaccggcgagaggtaggagacacatggcacgaggtctgatgtgtcagctcctcaatgattggcctggtctgtgtgttcagaaagtgaaggcaacagtaagtgtggctgcatgggttgggaggaagattaactcaagygtcgttcagcagtttagtgtgcactgtgtgtcaagcaatgctctcagcactggcggttcaggagtgaccacaacaaagctttgttctataaagtccatgacctagtggcaggtgctgttaagagctgtgaaacacacacacacacacacacacacacacacacacacacacagtaaaggaataaaagaatggccactccataagcaaarcagccaygagggctgctggttgcacatttttatggttatttcttgattatatgctaaacaaggggtgtattattcatgccttccctttttagaccatatagagtttaaaaaaaaaaaagaaagaaaaggagtgaagtggggtgaggagagcagatggagcaagtgtgctggaaaggggcactgttaaatagcacaacttgggagggtctcaccaaagaggtgacatttaagcacagacctgaatggaatgagagggtcagccatggtgtatgatatatattttatatacctgtaaatctcccatgcaattgtctgaaaggagaatattggggttcacctgtgaactgggcatctgcttcttccctctcaggagtttgacctggatgtggttgctgtggtgaacgacacagtcggaactatgatgacctgtggctttgaagaccctcactgtgaagttggcctcattgttggtaaggacccagactgtcctttccacatggggatgcacagccttgggtgtgnaggggttggtgctgagtgaggccctggtatcctgtgattggcaggcacgggcagcaatgcctgctacatggaggagatgcgcaaygtggaactggtggaaggagaagaggggcggatgtgtgtgaacatggaatggggggccttcggggacaatggatgcctagatgacttccgcacagaatttgatgtggctgtggatgagctttcactcaacccsggcaagcagaggtaggcacccaactggggccctgttaagtgtatcccaggactggatggcaacaagtgatcagagcttccacaatggcatctcccaggacgccggttctcgtgagatgttaataaaggaggttttcttggaaagggtttcttgtcgaatgcacctggaaagttctgagttagtaaatgtaagaagcatctcccacccaaaagcctaggagaacaggtgggagaatactagaccctaggtctggcactctaaggagaaacaagtagaaagttgaagcacctgctgctgacaggctgaagagcatctcttgggtgatgcagacaggagcaaatcctctccctcctccatcttccagcgccgagcaccacctactgtcagaattgagcaaggggccagccccagtgtcacaaggtcctgtgcatggtaggggagcggggtctgagctaagagacaatagcttaagatctaacacacttctcattaagatgttgtctgtagtgtttcctaactagattaatcaaacaccctagtcctgcagaataygctttgcaaaacatgtgtctagaatagaagttacagactaaaatgcctctaggggccaggcaggcaacattaatgaaggaagcaggctgggtcaagataagatggggtggtgatgggctattggttgaaactagggacctcgtttttttttcaaggcaggattcaggaccaaaagaccctcaagccactgcataataacgtttagttccagtggccaggawgggggccctacagctggcagtagttacttgagtaatgatggttaggtccaagagaatgtatactgaatgcctagtgaggttaaagatkaagactcagcattctcccctgctccgagaagtccagtggggttatggtgtgttccttctcgagttgcttcttgaaatttygaaataagccttggaaaggaaatgagttcctttccctgtgggttcctttccaaggcttatttccccaggagccccacgggcctcgggcactgtggtcagtgttgctgarggttgtgaattagcatgcaaagacaccagggatcctgcccaagtgaatcaagtagcaattcctttcccatcaggggagtctgcctgtctgccactgctgatgcactgggggtgactaagctggcctgtcctgtctcaacacatccctccaccttcctacttaacctccatgaatgttacttgcattgcaggttcgagaaaatgatcagtggaatgtacctgggtgagattgtccgtaacattctcatcgatttcaccaagcgtggactrctcttccgaggccgcatctcagagcrgctcaagacaaggggcatctttgaaaccaagttcttgtctcagattgagaggtgagagcttagggctcagggtagcaggggggccatgtccttttttytcactggcagacaaactgaaggatttccataactcagggcatgactcatacaaaagtcagtttagtggcaaacacatkcatgtctatagtgtttactaaaagcacattatgggcagttgtcattttaagggcaaacagagcattctyatgmaagtttgtgctaagcctggcctgaggtcatgcaaagtgatattgttgggttttagaccatgtatcaaaggtagaaagatacctgctcatagcatgtaaattgaaacgcacagaggaagataacctattaaagcatccacacttggcttgaaagcccttcctaactgctggctgcagtaatcaggcagccaggattgagtaaaggttggaacgtcaggcaatgcagacacatgccacacagtggctcattagagcaaagcctccctcctacagtcaaatggtggaaaatctccaaattagaacagtgaatttcagagccctttaaaaattaatgctgtgccatyactctcagggcagagaagaacaggaactagacaactgatgtgagtagacccctcgggcatctgcaccagtgaatagaaagatatattctagcttataggtctgttatgttcagcgaggtgattccaggcttctaaaatagctttctttatataggagggtttattttctttctataactttatttacacttccttcgtaaatagcatataaatacagttcagaccacccagagcagcagagcagaaataaagcacgagtctaatgctgcttggttagttcctgccctrcaaacccatgaacagcagcgagaaaatggacatgaaagagctttgtaactgaccactgtgataaacagtgaatttgctttgttttgagtatctactttgtagtagtaatggtctatctggagtagggagagtagaatgaggagctgtttgtattcctgtcaccgtcaggaagagtcaatgcagtgcagtaggttgagcagtggtctgaatttaggaatgggaaccacctcgaggggccagctcctggagagctagacccccacagagcctcccctgtaaggactcaggccctggtgtggtaggctaccagccttcttggtgcatgactgaacacttgctgtctccctcccaccccagtgactgcctggccctgctgcaagtccgagccatcctgcaacacttagggcttgagagcacctgtgacgacagcatcattgttaaggaggtgtgcactgtggtggcccggcgggcagcccagctctgtggcgcaggcatggccgctgtggtggacargatacgagaaaaccgtgggctggacgctctcaaagtgacagtgggtgtggatgggaccctctacaagctacatcctcagtgagtgcctgatcccagcccyccctgcctaccttctttctgtctttgttctttcccttttctttctctctttcctttgttactttatagtgaattatcagccattccaaatagtgtatataatacatggattatagtttaaagattcataatcagaagtaggcctgtgtttcaccccccaccgtgggaagccccctccgagcccctccacaactgtgtcatcattctcccatgccaggggtaagtgttgtgctgaatcagtcccttgcttttcttttccacccccatatatgtaggtatgcatccatattgtttagttttacttatttttgaacttgccacaaatagaatcacatggtatctcttctgtggctggcttttctcacacagtgtttgttttgagacgcatccgcattgaagtatacagttggtagttcattaattttcagagctgtatagcgtacctttgagtatgttgttttttctatcgttgaggtgatatttaggttacttytagattttgaccattacaaacagtgctactgtgaacattctggcaaatgtaatgctagaactctggagcaagattttttttcaacattctagagcaggggttgacaggcaacagccacaggctgttattgtacatatagtttcatgaggattgggagggggcagaagcccagccaccaaccctgggacatggcatcctcagctttgtagatggggagggtgtcctgaccctgctgtattggggcagatcacaactctctctttctctggtccatataggaaggatctgtgatcactgtgatatcctagcagtgactctgtaagtctgcttcttttgcctccgatgacattttggagcacatgtggctctgatatgaggctatgcgccaggaaaatagaaaatcacattcatgagtcctggtcctggtctccccctccagagttgtgctcctctgttaggcacacttgtggcttccatggttgttgaacttctcttttactgactattagttttaagaacacagtttgccaggatctcagacgtttgtcccagaattgaatcctagctctcctaatggctgatatgatgtggaaattgggcatagtactagtgtctccaagccacggttttctggtacttaataatatatagtaaatgtttaatacattatagctgtcatccttctcctcttcttaattatttctgtgtttccagcatcgcttcttagctttcatttctaagtgcaaatacaaaccaatcatgactaagatggtttttcctgtgtcttcctcccaccttttccagctttgccaaagtcatgcatgagacagtgaaggacctggctccgaaatgtgatgtgtctttcctgcagtcagaggatggcagcgggaagggggcggcgctcatcactgctgtggcctgccgcatccgtgaggctggacagcgatagaacccctgaaatcggaagggacttcctctttctctccttcttccctgttttaaattataagatgtcatccccttgtgtcagagacagaccccttggcttttgcttggcagagaggaccccactggactgggttttgtctctgcatctcattgtagagcttggtggctgagcttggccctattaagataaatagagttccaaataaggatttgttcacatgcatcataaccattcccattggttctcctaaaacrtgaaaatkatctcccttagtaatcccccttgccaaattccatgtccctgtataattctacaggatggggacactaatgaagatacggttgcttcaccttggagcctgaacatgacatttctaagtggggtgcatcccccagcactgatgttgttactgattctcctgtcagagatctgggaggtctccactgaggatgtgagcctgattatcctataggcagacgtggggagggtggaggggtgacagtggaggaaaatccatggatatccacgcagcagcccctctttaacctcatmtacaagcatttgccctgtggattccagcatttgccattcctggaatcaaggaatcctgagtctgggcaatgaaaccaaagccaggagttgacgcatcctgcagttgggccagctgtygcatctcagcggggcgcacatgttatccacaagcaatggacctttggggaagggggagtttttagtttgttttacaaatttttcctgcaaaagtggaatcactgtattttcattttaatttatatttgaaattttatttagttcttgagtagatctgcttcttcatcttgacatgtaatgaatggtcagttgtacgtaatgtatttatatgttaatttgttatgtatatagatgtgcaagtcttgtcagaattggcctcagtgtagttaaagggcagaaggggaagatactgactagtcatagaaatacctcattcgcctgtgggaagagaagggaagcctcttcagggtgagtgaatggcaaagcggttgcttctggctcctccttcccctgtggtcttggaagtgtgtggaaggcagggacagagatggaggccgagccaatagactgaagagaccacagcaattggctcctccatctagagattttcttggcagtattccatgggatgttaagcaaaggaaaccaaaggaatcgtttcaaatggactcatggcttagaaatctttattcttagggcagtcagtagtattctaaagctttctgacaagataaaggaagtcaccaaaatttctttttttaaattgtatctaatcctcaacaacaaaccaaaacagaacaattaaacagccaaataaaacctcagggacaacatttttggtgtatttgagccctcccagcaagtttcaycttgggtttgtattttaaatgttttacaagaattgtccatgtgcttccctaggctgagctggcattggtctgctgacctgtttttgtgtttttcttttttttatacacaacatttatttcaaactattgggagggatgagagtggcttaaaaacttccatccctacttttcaagagtgcagttgattctgaatctgaaagcccgcctctgtcctaaaatacaaacaagcacagacattaaacctggatactatatgataaagagggatgtaactattgaattggatacaaggatcagaatggaaagaaactcacgatgaaattgaacctggtttttgtatatttatcaaacttgtgctgagaatagtgtctgattatacgacttttaagcaaagttgggtgtaattaggtgaaaacagcccaggtcctcccgggagcacagaggggctaggggctggtccttctcgtttgctctagtcttgctttgctgtctggtgtagctcctctgctgctcccatctgcactaattgacccaaaacgtgggtatttcctgctacacaaaagccaaaaggtttcatgtagattttagttcactaaagggtgcccacaaaatagagattaattttaacttaaattttaagcttgaagattaggtactatctgtgaagttacacttttttttttttttttaaaggtagagatgtgtgtgtgtgtaggtattaaagatgtgttgttggtttccaaaaaggaacmctggaaaataaattttgaatgtttatgttctcagaatcaggttgacagtcccttgctgacatggctttgctttgtgtaaatacagtggatctcaatcttcggggtgtgatgaatagcgaatcatctcaaatccttgagcactcagtctagtgaagatgttgtcattatgtacaatacataactagtttaattaactatgtgatgttaactattattaataaattttaacattttccaaaataatcaaatgtgattcatgagtgtttttaagagagtagtcatcttccggtcgtatcagtacttcctggccagcccgatgagtaatttatgggtgtcttgattttgagtgtgtgtgtttgagaggcatgtggcttttccagaaactcagtcccagtggaattagaaggcagcttttcctggactgccttggaccccttagatttcaagccactgaagagctatggctagtcctgcggtctactgtttaaatagcttggctgaaattagcaccaccctgagggcctctggctggtcttggttggcaaatgtgattcatattcaggatatatagctctcgtgaacatccaaaaagcacttgcctctgtcctctccctaccaagcttttccttctccccagtaagcagaacacaggtctggggagtaaattcatcaaaagtccctagtgatacccattaacattcacatggccctgtttgacaataaccgagggaagaagatgaccatggctaagaggataatggagatagccaatgggtgagggaaagtttaaaattagaccctattttttctgatatcaaactggtgagattatgggagcattctcctacactgttggtggaagtatgattggtatagcccttatgtggggaaaacaggcaatatgcctcacagcaggttttgtgtaattttctagaaatttgtgctaaggaaatacatatagttgaggactaagatttaactttaaggatattgactatcatatggcttataatagctaaagagagaaaccgtctctatataatagacccactcaccctttatcagggtacagtcaggaaaacaatccattccagtcattgtaaacattttaatactgtgacttggttgcatagggtgacggcaatgctgagaagccaagcagtacagagaagcaacccagggattagcaacatcaagaaaagtagcttcaatcccactggctggatccgagtcccaaagctggggtaagggggcaagtactgggactgtggaatggggtgggagatgaagaaattctctgccttcctcccgcccactcattttctgcagtgtttccattggttgaacctagcaggaagtgtgttggcacagggagcctgggaaatggagcctcctgtgatatggcgcaattaggaaagtaaccggcatgcgacttataaaaccactatgtggttttatagaatattattgagcagggttattactaaatattctccatttagtaatatagaaaacattgccagtatgctgcttcatgccaaagaatatttcagaacagtgtattgtgatcctgtttttgttaaaaaaaatacttgttaaaaattacgatatatgacataagagttgtaatgggtttccctgagtgcctcctctgccttgctgaattctggtagaggcctcagccccctttctcagcagctctccctcaaatgactcacccctctgggagtctgcatgctgcagttcagcttggtggtgttcaccagccttagccaggctgctactcagtgcagttttggtgccacctaccctccctaggccactgctgcccccacttcacagcctcagggaagatctgcactcccatttcccactgggggctcaaagtggacatagacacattctccacagaccataatactggcaaaacattcagaagatactttgtgagatggtttggctctctctccctacccatatctcatgtcacatatctcataattcacagtgttggaggaggggtctggtgaggggggaggtgattgaatcatggggacggacttcccccttgctgttctcatgatacagttcttaggagatctggttgtttgaaactatatagcacctcccccttctctctcttcctcttgttggccatgtgaagatgtgcatgcttccacttaccttctgccatgattgtaagtttcctgaggcctccccagccatgcttcctgtgcatcttgcagaacgattagtcaattaaacctcttttctyataaattacccaatctcaggcagttctttgtagcaatggaaggatggataaacacactttttttagtgtataatttaacgcaggtatttgcactagaatgccctccaagccctggattccccatgctcatggcttcgcttgggctgcctccctgcccaactcccacctgctctgtgggattcctcaccacaggagaaagccatgtcctttaatgggactcagaaaacgatattccaaaataatggtgctttgacatgctgaataaagaggcaacctcaaggtctttatatactcctgccccaccctcaaccccctgtttctcccaaagcaaaggataaggcttttctctgatattccctgatctgtgtaaagactgaaccccctcctcacaaggagaacacaactgccttctgtcctttccctgaaatctcttaaggaccggacccacctagaagaacacaattgtcctctatcctctctctgaaattttattatctgttgcagaaaggaagactgaggaatgcaaccacagctggatggattttttcacaagataatgtttgtggattccagcatttcattcaaattccaaagagaatcatttacaagttaatttctgtctacctggcacattcattctctctaataaacatttctgccccttgaaaaagtcatcacatttcccctatctctccttcccctatgaagaagggtttataagcatctggacttcactacattattgggtaatcattctgtgattcttccatgttatgtatgttaaaataaatttgtacacaaaataaaactgcaataggagaacaatcctattaatctgccttttgtcagttcatcttcagaaaaccttcagagggtggagggggaaggtttctctctttgcttctgcagatttgaggctgtgagcaggataaaccacatctagtctgctcttctggaaaccacagtcaagggaatctaggacctgacaaactggcaaaaagggtaagaatttctcaccagtcagattcccaggtgtctgtctatggaatccaatagagcagatggtaaaaatcactgtctctgtttcctttccaaattcaggttagtgggggagaaaagcatttgtacagacttgccttaggtttagtgaccatggtatatttttatcatgggggctgcattttttgcacccatttaaaaaatgccccatgttattgtaaatctagaaagttacctttgggactttccataaagaaggcttattggtttgagtcacttatgggataaataaatcagccgtatttaaacaactgttttgccagtttgtcaagtcctgggttcccatgactgtcttcttagtacccatgaaaagacacaaaagaaatatagcctcagagacttatttgacaagaataaaagaaaaactttgttttaaacctaatattaggtttaaaatattaggtttaaaacaaagttaatatccttcaaatgctcacactgtctgctttggattttataagcaatgcactctagcctgtggtctagtggttagaattcagtgttttcagtgctctagtccaggttcaattcctggtcagggaaccagttctttggaaataaaagtcctttgactcagtagggggaaaaaaaagcatttatgagagtttaaattacttatcttgaatttacatttctatgactcttgacttttggaggtatccagtcatttgtaatcctttcttccctcatgaacagcatcaggtttcctgcttctattttccatccattgggtcacatgtgttgttgggtctttgatgcaggtgaccagctgagaggttgggaccctagagaatatgtccagatggaggtgtgagttgcaccccatttgcaactggtgaaactttccttttttttaagttgtcgttgggagtagtctggatcttggaaatgttgcagcttttcactcccgttttggagaccttggttaaaggcataaagggcttcatggttttagtctcatatgtgttaatttgtttccgttttgagtcatttgaagttatgcctttggtttaaaactttggtttgtgtttagagtgtgatggcaactccccacctccccctccccgccgccgccgccccatttattttactttctgggcaggacagccaaagccatgagcaagcatggtgcctctcccaggcaaaaaggggagatactgctcccacagccacggctgccacaactaccaccactcctcagctccagggaaggtcggttgctcatagggcagaaagtttgccgctcgtatatttaaaaggatttttgttgagacctatatggtatggtcagaagtcagcttaattaaaagctgatattcaggtatttctgtaaaagttatcttttaggtcctatttctcctgtgggaacttcttagtcaactaggcctctttttctgggacccctggtaactagaacttcattggcattctgggaaannnnnnnnnnnnnnnnnnnngggctatgggaacaccaaagagaaaagttgacaagtaacttggtgaaggggaagagctggctactcccgactgaccaggtgctctgtgtcgggccttgctcttcaggctggcgcccacactgcatgggatccccgcagcagcatggtttcctcccagtccacctgtctgccctgcctaggatgctaggtccctagaagtcagactctgcctacccctcgacagccccaggccagggaccagaatctgcctctgagcctcttgccccacagtggcatctgaactccccactcctgtctgctgccagcggtccacttgctggatcaaatacctctggacatttttgcctgagtctactggttagacaggtttaggctgtctctgtagatgtattaaagtcataaaacttgcttctgtgatatttttgatacttgcttgatttgttggtaagctaaagctgtaagggctggcttctggactcccccaaaaccatacacacatcttgctgcaagcttatatctttggttttcagcagctgtattctggggtctggataggtggccatggtgagtacttgagatatgtgcgtgcgcagcacagggcagagccaagcccaatatgaccacatcttccttggctcagctctacctcctggccatgctgggagacactggattctccaggcattgtcttcacagctccatcctctgtcttgggctcagcactcgctatataaatccaggacacagataggccccacccttcataactgctctgggtaccacattggtatttgggacctaggatgactggggctgaggggcacattgaggagagtacctgtgtccagtatcttaaagatcttggttaagatgagattggctaatacaggttttgctttttcaaaagaaaaaataacataaatggctaacttttacatgagcaattcaaatataattgttaagaatgagcaaattaggtaagtgtaaatgggataaatgcttttataagcttgccatcatttcagaactctttttggtaacttaaaatcttaaagtcaagtcatgttcgattaagtagtagataatcataaaatatctcactcatttctcagtaagttaaaatacagaaatattaattattaaacataaatatgtttatacattttgacatattattgtacatggtatagaaaagctaaacatatctggatctgttaataaacaacagaaaaaaaatggagagaacatatatttctcaagcccctggcttcaagcactcctcctgcctcagcctcccaaaatgatgggattacaagtgtgagccaccatgtctggccaggaacatatatttctaaaaaatacaaaatgtttttcatccacaaatacttatacaaaacaattcaaaataacttacttcctaagttttcaatagaaattatagctaccaagagttaaaa

SEQ ID NO: 96043 - DNA, 19013 bp, Homo sapiens
caatactgtcccatcagcaggaaaatagccatttggttcctatgttttttttaaggcacctattctgcttgtaattaaaatagtacttaaatagtaagggtaatttaagtccggaagttaactggaaccattctctaagggtactttagcacgagtcataatagcaggatatagagctcaaaccagcacacttcctccattatggagggaaatacaacagttgcctaaatgcaactgttacatagtctctcccaagatccatttttcagggagccacacaggtcacacaagtcttggaagtcaaaaggaaatcataagtgcaggactagagtcacatgggtaagcatgactaaccccaatcacttagttcctctggttccatggctgggggtcacacctgcaaccatgggaggcatgtttaacaagatgctgggacccaggaaccaaggagggaaaacagtaggggtggcgccctcactgtcttccccttcccctcctctggagtgcgttctgaagcactgggactcctttgactctgagatttggaagaaaaaacagctcattttcttttgcacaagagcatggccttcttactagacctttgcaagcattgcacaatggactcagctctttcagcagtcatatcagacaggcccaaagggaatgattccccaaaactagagaaacaaactcccaggaacccctcaaatgaaacttccagatgccctggcccttcctccctccctttcacattgtcagcttctccaattctaccacccaaacccccagacttttctatggtatttttccttccttcattcatgatttaaaatggctcctatctcttcttctataatgttcctccaaactgggagaagttaatttcctcaaaccttaaaatgcttggcttagggttgagctcggggaacagaacccagaagcctgacatgctgtcaaaagggtaaaaatttttatttttatttttatttatttattttttttgagacagagtctcgctctgttgtccaggctggaatgcagtggtgcaatctcaactcactgcagcctctgcctccctggttcaagtgattctcctgcctcagcctcctgagtagctgggactacaggcacgtgccaccacaacccagcttgctccatcaacactgaatattagtgattgagttgttgccactactggcactcagaaaattatccagctgtggtggtgtgcacctgtagtcccagctactccagaggctgaagtaggaggatctcttgagctcaggaggaggtcaaggctgcagtgagccaagaccatgccactgcactacagcctgggtgacagagcaagaccctgtcccccaccccccccccaaaaaaaacaaacaacaacaacaaagaaatatattgaaataactggtatcttcaatacaatgttgaataagagtggacatcattggttcccaatcttagggcaaaactttctgatttcatcattaagtatattagctgtaggtgttttgtgtatgccctttaaaaattattttattttttgtagagaagggtcttgctatgttgcccacactggtcttgaactcctaggctcaagcaatccgcccatcttgtcctcccaaagtctgggattataggcatgagctactgctcctggcctatggatgccctttatcagtttcaggaattcccttctattcctaattggctgagaggtttattttcctttcatgaataggtattaaattttgtcaaatgctttttctgcatctattgagatggtgatatgggttttgtcttatagcctgttagtatagtaaattatattgattgattttaaaatattaagccaaccttgtattcctgggatgaaactaacttggtcatggtgcattattgtttgtatttactactgtattcattttgctaaattttaaaaggatttttgaaaaaaataaagaggattttgtgtctagatccatgaaggatatgtgtgtagtttcttttcttgtaacatctttgtgtcatttggtatctggtaatgctagcttcaagatgagttggtaagtgacctctcctcttctatatactagaaacatttgtccagaattgatgttgtttcttccttaagtgtccaatgaagccatgtagacctggagttttctttgtggaaatatttttttttatcaagaattcaatatctgggctagacgagatggctcacacttgtaattccagcactttgggagggtgaggcaggaagaatacttgaacccaggagtttgaaaccagcctgagcaatatagcgagaccctgtctctacaaaaatatttttacaaaattagccaggtgtattgaggtgcacctgtagtcccagctacttgggaggcttgggcagaaggatcgcttgagcccaggacgttgaggctgcagtgagctatgattgcaccattgaactcagaagacaaagcaagaccctgtcttaagaaaaaaaaaaaattcaggttgttgtttttttttatttttttagacggggcctggctctgtcgcccaggctggagtgcagtggtatgatcttggctcactggaacctctgcctcctgggttcaaacgtttctccttgcctcagccttccaagtaactgattataggcacacaccaccacacccagctaatttttggatttttagtggagatggggtctcagcatgttgaccaggctggtctccaattcctgacctcaagtgatctgcctgcctcggcctcccaaagtgctgggattacaggcatgagccactgcgcccggctgtctcatttttccttactcattttccaaacacattccttactcattttccaaacataaactttggtagtttgtgtttttcaaggaaattgtccatttcatctaacttactaaatgtattcacataaaggttttaataatctaccctattgtcatttaaaatgtcatttaatgtcatttaatgacatttaaatatcacttaaaatgataaatttgtataatttgtagtggtgtctcttctgctctttctggtgtggttaatctgtgtattctctcttttattcctgatcagtctagccagaggtttatcaactttagcgatgtgtttatagaactacttctggttttactgacttttgctgatgtttttgttttatatttcatttattttggcttttttttttctttgagatggagtcttgctctgtttcccaggctggcgtgcagaggagtgatcttggctcactgcagcttctgcctcccgggttcaaacgattctcccacatcagcctattttggctattatttttattatttcctttcttctgctaattttggttttacttgactcttccttttgtggtttcttaaagtacaagcctcggccggtgcagtggctcacacctgtaatcccagcactttgggaggctgaggcgagaggatcccttgaagccaggagttcaagaccagcctggcaaacatggtgagaccccttctctactaaaaatacaaaaattagccgggcatggtggtgcatgcctgtaattccaactactcaggaaactgggacatgagaattgattgaacccaggaggctgaggttgcagggagctgagattgcaccactgctctccagcctgtgtgacagagtgagactgtgtctcaaaaaaaaaaaaaaaaaaaagtaaatgcttacattattgatttgaaatatttcttcttttgtaatatgtcaaagtggtgctataaatttccctcatagcactactgtggctgcatctcagaaaatttgatatgtcctgtttttactttcattcagttcaaaatatgatctaattttccttgtgattacatatttgacccatgggttatttaatttctaaatatgtggggattttccagatatcattccattattattttctatttttcctttttcttctatttgttaacttatttacttattttcagttccctctcaggctctaaattctgttattcttttcttttctttttttctttctttcttttttttttttttgaggtagagtctttctctgtcacccaggctggagtgcagtggtgcgatcttggctcactgcaacctccgcctcccaggtttaagcaattctcctgcctcagcctcctgagtagctgggattacaggcacacaccacaatgctcggctaatttttttgtatttttagtagagatggggtttcaccatattggacaggctggtcttgaacttctgacctcaagtgatctgcccaccttggcctcccaaagtgctgggattaaaggtgtgagccaccgcacccagcctgtgttattattttctagtttaattccatcgtgttcagagatgtactttgtatgattggaatcctttcaaatttatttatttatttatttatttatttttaatatggagtctcactctgttgcccaagctagagtgcaatggcctgatctcggcttactgcactctccaccaaccaggtttaagtgattctcctgcctcagcctcctgagtagctgagattacaggggcacgccaccacgcctagctaatttttgtatttttagtggagacggggtttcactgtgttggccaggctggtctcaaactcctgacctcagttaatccacatgccttggcctcccaaagtgctgggattacaggcgtgaaccaccgctcccagcctcttttacatttattaagacttgttttatgcctccaaatatggtatatcttggtggatgggcacttgaaaagaatgcatatcctgctgttgttggatattctattcatgttgtttatgtggaattggttcatagcattgagtcttgtatacctttacggagtttccgtaaattatgactgataactgttctacaactattgagaatggtgtgttgaaatctccaattataattttgtatttatctacttgttctttagttccattattgtttttcatgtattttgatgatctatgcttaggtgcatatatatttagaattatatcttctttattaattgacctctttgtcattatggtatgtccctctttgtctttggtagttgttgttgttgttgctgttttgagacagggtctcaatctgcagcttcgacctcccaggcgtagatgattctcccacctctgcctcccaagtaactgggaccacaggtgcatgctaccacaatttgataatttttaaaattttgttgtagcgataagatctccctgtgttgcccaggctagtctcaaactcctggacttaagcaatcctcccttctcaggctcccaaagtgctaacattacaggtgtgggctagtatgtcacccactgtgtgggccagtattctttgttttgcartctactttgtctgatattcacttagccattccaacttcttaaaatttagttttgtcagtgtatgtcttttcccatctttttgctcttaaactatctctgcttttatatttgaatagctttctggtatttaccatatagtttggttttgcttttttatccattctaacaatcactgccttttacttgtgagcatttacatcatttatatttatgtaattattgatatgattgggtttaaatcaattttgctattggtttttcatttgttccatctgtctattggtcttttttttcttttgtatttggagacagatttgccctctgtcacccagggtggagtgcagtagagctatcacagctcactgccgctgggcactggtccatttttctatctttttttttttcttttgagacagggcctccctatgttgcccaggctgggttcaaactcctgggctcaagtgatcctcctgccttgatctctcaaagtgttggcattacaggcgttaagtcaccagagccagtcagttttttttcacttaggtacagaattcaatgccaacagttcttttctttcaacactttaaccatgtcactccatggggacgctgtcttgagcctttggtaagcctcattctccaggaccacacggcaggcgcgacagccctaggtccaccccaccccgtaagcgctccctccgggaggagacagaaacccaggacagctccggggcaaggccgaggaaggagggacgacggggcagggaggcccgaagagtccccgccttttgggatagtcgccacccttggaccccctcacccttggggacgttgaggagtgttaaaatctccaagacgcgagtcaccggtacgaagccacagccatttcgctgcttgctcggtgcaagtgcagaaggtcctagtagccgagcgtggagtcgagctcgtgggcggcgtcgggcaccttcggccgcgccctcagctgcacccgccggtgggcggggcccgagcccgtctctaaagccacgaggccgcccgctccgagcctggtgcttccgaccgctgcgcgcggctcctgggctgtcacagtctcccgttgccgccgtcatgtcccggcagctgtcgcgggcccggccagccacggtgctgggcgccatggagatggggcgccgcatggacgcgcccaccagcgccgcagtcacgcgcgccttcctggagcgcggccacaccgagatagacacggccttcgtgtacagcgagggccagtccgagaccatccttggcggcctggggctccggctgggcggcagcgactgcagaggtaacagtggcccctgatcctccccctgcacggtgcagagctgagcctgtccacagccgtgtaccgccccgctctccctggccccggggcagcacccaaagttttgtcccccccaccgcccccacccctgttcacctcgcagccttgggaacaccaggctccttaggcacgtctagctccggacaacttttctctcgtcttctcttctgttcgtctctcttctcttccgggaggtagccagcaccctcactgacgcctggatgacttggtcttgcctggaatgacttggctagcccctctctggagcacaaaaaacactgggatctggcattgtgcagctcctgtccccacctgtgccctccaggtgcccttgacgggcctgatctgcagaaattctgttcttaccgcctggcactccctggcacagtccaaaatcagagtttggacccagcacactatctgcttcctcctttgcacatgccagcctgctcggggccccggactttgctctgagtaccttgtggtactcacaagggcacctcacaagggtggcagtgcccggaagccttggcagctccctcagggggatgagggattggggtggtacagagtctcactgccctctctgtgggaggctctgtcggaggctattggagagaaatggacactaacccactccaggaagctccagttctagagatggctggggagcccagagtgaccccttcctgggagggaccccgtgaagaaagaatggataggagtttgccaggaagagtacaaggggcaagggcgtcagggcagtgggcatgggtgtggaaaggcaaatgtgttttggcaatgccgcgggtgctggaggaggcaggtgtggccggaggggaggatgtgtgtataggggcaggaggagccgccctcagtctgatgcsatttgcagtgcttaggccgatgcctggcaggcacatagtgagggctgggaaatgttagctgtttgtttgttcttagtattagcaccatttgcctccttccactgagtgtctgagtggagtcttatttctcctctgattcaccacatggtagatccagaacgaacctggcctgtgcgtgcatcccagtgccacgctctttctagatcacccggctgccactcagtgagagctctaaccatatttctgattttttttttttttttgagacagggtcttgcttttttgcccaggctggagtggagtggtgcgatakggctcattgcagctttgacctctcagggctcaagccatcctcccacctcagtctcctgagtagctgggactactacagtagcaccacacccggctaattttttgtattattcattgaaactggagtctcactttgttgcccaggctggtcttaaacccctgagctcaagtgatcctcctgctctggcytcccaaagtgctgagattacaggtgtgagccaccacagatctgtaccctctgcctggcccttatttctgatttttttttctttccttttttaatccttctttgtcttctgtctgagtccaaggttggctggcgaaagtcctcagatctgayctgaagttaaattcaattgagaagcagaggggtggtggtggaatggaaaaattccatatgaatagttcctcaaacctgctctttgctaggcctcaagggctccagtgactgccctcctgccagcctaggtgactttctaagtgtgaaaagtgggaagaggactctccactcacctgttagtccagttcactaggaactaagattctttttttttgttgtttgttttgtttgtttgtttgttttttgagaagtctcactctgtgagacattgtgctgtggcacaatctcggctcactgcaacctccgcctcccgggttcaagcaattctcctgcctcagactccggactagctggggactacaggcgggctccactatgcccagctaatttttgtgtttttattagagatggggtttcaccatgttggtccagctggtcttgaactcctgaccttctgatttgcctgcctcagtctcccaaagtgctgggattacaggcatgagccacggcgcctggccctgaatttcatttctctttcctctcagtgaaaattgataccaaggccattccactgtttgggaactccctgaagcctgacagtctccggttccagctggagacgtcactgaagcggctgcagtgtccccgagtggacctcttctacctgcatatgccagaccacagcacyccggkggaagagacactgcgtgcctgccaccagctgcaccaggaggtgaggggacccctgagctctgggaggtggtccactgctgctctccttatcctgatcctaatggtgagagcagaggcaccagggctgttccagggtggagcagggaacagcccaactcccaggggccccaccctggcctccctttcctggtctgggctgcactatgttctgactggagcctcacctgagcagggcaagttcgtggagcttggcctctccaactatgcagcctgggaagtggccgagatctgtaccctctgcaagagcaacggctggatcctgcccactgtgtaccaggtgagagccagggctgcagaggccaaggtctccagaactcctgctcatcctgggctgtctttgcccctctgactgccccctgtgccctctgcatagcagccactcccctgctgaaagcctgcagatggctcctaggtaccctcaggatgccattcaagctcctcaggctggccactgggcatctgcttccttcctgcctatctgtgcaccttggacccttccttccctaccttcccctgcactcagcctggaacaagcccttcccccaccaccgccccttccgtgagagaatggttcaggtctcacatacgtgtctcttcctctggaagcctttctagatgggcccagaagaccctgagacctcaggtccttgtttacctcctcatgattcattgcacaaatatttgcacacctgcttggtgccaggcactggtcacagaactttctagtctattatgattgcctcatgactygattataactgtttatacttgaccttattataaaaccttgagggaagggaccctgtccttttggcttaagaatctaaatctgacaaccagcccatagttggtgctcatgaaagttggcagaatgaatgaattttccatgggcataagcttctttcaccagcaccagttagaataagtatacgcccagacggttaaagtcctagaattgttaaggtctgaaataagggttctggaagggtaattttgaagtctcttcttttgacacatccaccctctcccccggggcccctctccttacagggcatgtacaatgccatcacccggcaggtggaaacggagctcttcccctgcctcaggcactttggactgaggttctatgccttcaaccctctggctggtacgtggagcattcctggccctgwctcagcctattcccgacmcacagatgcccagcccaggacctgggaagmaaggagggtttgacaaactttgacctctsaggtcaaagacgtaaaggctgcatcttcagccctcctgggtccctgcccctcccctagaccagagccctgagggatgtggcagcttctggggcactctaggccccggggctgattgctgctttccctcagggggcctgctgaccggcaagtacaagtatgaggacaagraygggaaacagccygtgggccgcttctttgggaatacctgggcagagatgtacaggaatcggtaagctgtgggtgcttggtgtggatggctggggtggggtcagctttatgtggaatgaagtcctgggctgctcctggggtaaggcctttcctcgctgctgcacctactcccctgmatttcttcrggaattyccaarccctccatcggttttcttgttgtcttgggacctccagkaggaaaggagwctccctggacctcggggtcttgaagtcgttgctctttcctgagcaatcacctgctaggaaggaaagaaggagctctggagggaggtccaggaggcctggggctgagtcctgacccatcttagcggcctttgtgtccctaaggaaaataagagcaggctgatgagtcctcaggaataaagatttgttgaggtctctgctgaggggcccagcatcctgagtggttctcttgcccagcaaagtgggagacccatggctagagagaacacctgcccctcagggctgcagggtgtggggtgggacagtggccctggttggctctttggttgtggctcccaatgtggccctgacacctgtgccaccgtccccccttcccagctactggaaggagcaccactttgagggcattgccctggtggagaaggccctgcaggccgcgtatggcgccagcgcccccagcatgacctcggccaccctccggtggatgtaccaccactcacagctgcaggtaaccagtgaccctgtgcgctcagcttcttcccttccaggggaaccagcaatatctttagatgaaggctgaaacatttgtttatcgattcctctgaaatttctctttctttcaactctcacaaacattcttcccactggtctttttctatgtttttttttkggggggacagagtctcactctgtcacccaggctggagtgcagtggcatgatctcgggtcactgcaacttctgcctcttgggccgaagcaactctcttgtctcagcctccccagtagctgggattacaggcgtgcgccaccatgcccagctaattgtttgtatttgtagtagagacagggtttcaccatgttgcccaggctggtctcaaattcctgaactcagacaattcgccctcctcagcctctgaaagtgctgggattataggcgtgagcccctgcgctcggccttctcattggtctttgatggtatctgagtgccaggctttgtaatgagagcttcattgcagggatttcattattccttcagctttatgaaatgactatcccagtgttattgaygaggaaactgagtttcacccagctatgaaaggggmagacattttaacacaggttyaactgtaaagcccactagtctcatccttttggtgggagctggagtttccctctctcagtgcctcatgtcttcctcacttatatccaactccagccttagatgttgcaatagtgtctggcatatatacagtaggtgctcaataaatgggagctaagtgctctacataatttttcacacccataaccatgttgaaaatagaaaagaggattgaatctcagagaggtttaataacttagccgcgtttacacagctgctggggggcagaactgggctgtgaatgtaggtctgtctggaagcgtcgtgtggcagtaggggaagggatacaggttttgcgtcacatgggtacagctatycaaggcaccttaagttctttctggacatatgggatacaagagatcccaaatctcagcagggaggtggctgggacggctgtgagtrgagtcgctgtgcagcagaagagggttgaagtctggccgtctcccttgcagggtgcccayggggacgcggtcatcctgggcatgtccagcctggagcagctggagcagaacttggcagcggcagaggaagggcccctggagccggctgtcgtggaygcctttaatcaagcctggcatttggttrcycacgaatgtcccaactacttccgctaggcccatcgtttytcaggctgyccaaggctyttytgtaacatcttttgttactcacattttctttaatttagaactgcctcagtaaattyttagggatggaagtatttggacaaaaacctaatagaagagtcaccaccaaatgaagaataaaactcccagggtgctgtgtgttagtctgtttgcgttgctataaaagaatacctgagactgggtcatttataaagaaaagaggtttatttggctcaccactctgcagtctgtacaagggggtgtggtgccggcatctgctcttggtgagggcctcaggaagcttacagtcatggcagagggggaagcggcgccagcgtgtcacatggtgagagagggagcaagagacagacaggggaggaaattccaggctcttttaaacaaccagatcctgtgtgaactcatagagctggaactcactcattactrtacagatggcaccaagccattcatgtgggatttgcccccataccctaacccctcccaccaggctcacctctaacattggggatcacattgcaacatgagatttggaggggacaaaataccctgatgatatcattgtaccagtaccacccccccgcaaatgtcatgttcttctcacattgcaaagtacagtcatcccttcccaatagtcacccaaagtcttaacttgtttcagcatcaactcaatcataaggccaaagtctcatctgggactcaaggcaagtttcatccacctatgaacctgtataatcaaacaagtcatttgcttccacgatacagtggtggtacccgtactgggtaagattcccattgcaaaaggggaatcagccaaaagaaaggggcaacaggcccacgcaagtctgaaacccagtagggcaggcgtgaaaatgtaaagctccaaaataatctttgactccatatcccacatcctgggcacactggtgcaaggggtgggcttccagggccttgggcaaaattcaattgcttaaaatgacaaaatccccaagatgataagaaaattcaacataatctttgtccaaatcccaactggcttttttatttatttttatttttttaattttttgatatagagtctcgctctgcctcccaggctagagtgcagtggtgcaatctcggctcactgcaacctccacctcctgggttcaagtgattctcctgccacagcttcctgagtagctgggattacaggtgtgagccacccacctggttaatttttgtatttttgtagagactgggttttgccatgttgtccaggctggtcttgaactcctgacctcagttgatgtgccccacttggtgcctcgaatgctgggattacaggcatgagccaccacacccagccagcttttttttgagaacacagaagttggaaaactggttctaaaattcatagcaaattcagggcacccaggatacccaaaacatgcttgaaaaagaacacagttggaggactcccactttctgatttcagaacttactacaaaactacatagccgggcatggtggtaggcgcctgtaatcccagctactcgggaggctgaggcagggagaattgcttgaatctgggagatgaaggttgcagtgagccgagatcaggccactgcactccagcctgggtgacagagtgagattccattctccgaacaaaacaaaacaaaaaacaaacagaaaaaacaactacaatgctaaagacagtgtggtcctagcataaggctagacataaatcaatggactagaatttagagtccagcagtaaaccctttcatggtattgtcaattaattttaaagagcgtcaagacaattcaacaaggaaaataaccatctttaggccgggcgcggtggctcatacctgtaatcccagcactttgggaggccgaggcaggcggatcatgaggtcaggagatcgcgaccatcctggctaacacagtgaaaccccgtctctactgaaaatacaaaaaattagctgggcgtggtggcgggtgcctgtagtcccagctactcgggaggctgaggcgggagaatggtgtgaacccaggaggtggagcttgcagtgagccaagatcacgccactgcactccagcctgggcgacagagcaagactctgtctcaaaaaagaaaagaaaagaaaagaaacgaaaagaaccatcttcaacaacatctggatatttgcaagtaagagaatgaagttggaccccttcctcataccatacataagaaaataaacacaaagtgagtcatagacctaaatgtataggctaaaagtataaaaacttttagaagaaaatacagggccaggatggtggcacactcctgtaatcccacctactgtggtggctgaggcaccggaatcacttgaacccaggaggcagaggttgcagcgagccaaaattgtgccactccactccagcccgggtgacagagcaagactctgtctgtctcaaagaaagaaaaagaaaatatagagataagtcttgtggccttggattggggaattgttcctcagaagcacaaacaacaaaagaaaaattaaattggacatcatcaaagtttagaactcttttactttaaagactccataaagaaagtgaaatgacaacccacagaatgggagaaaatacttgcaaatcatttacccgatgatgttctgtctagaccaggggtgtccaatcttttggtttccctgggccacactggaagaagaagaattgtcttgggccgcacataaaatacactcacactaacgatggctgatgaacttaaaaaaaaaaatcacaagaaaatctcataatgttttgggaaagtttatgaatttgtgttgggccacacattcaaagccatctttgggctgcatgcggcctgcgggtcgtgggttggacaagcttgaattatataaagaactcttatcattcaacaataacaatatcaataatgcaattgaaaaatgaacaaaggatccaaatagaactttctctagcaaagatatacagatggtcagtagacagatgagaaagcgctcaacatcattacccatgagggaaataaaaataaaaaccacaatgtgtttccactacttcacacccactaggatgggagtagtaagacagacagacgatagaagtgccgtagagaaactggaatcttcatatgctgatggtgggaatgtaaaatggtacaaccactttggaaaatagtttggcagttcctcagaggattaaacataaaattaccataggattcagcagttccacttgtgggtatatagccaagagaagtgaaaacatatctccccacaaaaaacttgggcatgagttttcacaatatcattactcataatagccaataagtaaaaacaacccaaatgtccatcaatgaatgaaaggataaacaaaatgtggtatattcatacaacagactattattcggctgttaaaaaaaataataaaaaagtagctcacgcctgtaatctcagtactttgggaggccaaggcaggaggattaattgaagacaggagttccagaccagtctggacatagaagtgagaccttgtctctagtaaacataaaaagaaaattagctgggttctgtggcacacacctgtagtcccagctactcaggaagccgaggtgggaggattgcttgagcccaggtattcaaggctggagtgagctatgattatgcatcactgcactccagcctgggtgacagagcaaaccatgtttctaaatacataaataagtaaataaaatgaagtaatgaaacacctacaaggtaaatgcaccttgaagacttgtaaaattaaagacgccaattgcaaaaggtttcatattgcatgatttgatctgtatgaaatgtccagaataggcaaatctgtttgagagagagaaagtagatgagtgcttgcctaggaccgggaggaggtttgcgaggaaatagagattcactgctaataagtacagggtttcttttgggtgcacttatgaggatgctctgaaattgattgtgatggttgtacacctctgaatacatgaaacagcattaaatcatcactttaagtcaactgtatagtgtctgaattatgtctcaatacagtagtttttttgtttttgtttttgtttttgttgtttttttcttttttgagatggagtctcactctgtggcccaggctggagtgcagtggcgcgatcttggctcattgcaacctccgcctcctgggttcaaccaattatcttgcctcagcctcccaagtaggtgggactacaggcgtgtgccaccacatctggctaattttttatgtattttttagtagagatgcggtttcatcatgttagccagatggtctcaatcccctgacctcatgatctgtctgcccttggcctcccaaagtgctgggattacaggtgtgagccactgcgcctggccaatacagttgtttttaaaaaacaaaacaggccggtcatggtggttcattcatgcctgaaatgccagaactttgggaggcccaggcaaggggaatctcttgaacccaggagtttgagaccccttccccataccacacacaaaaaaactaactcaaatgaatcacccacctaaatgtataaggtaaaactgtaaaactcttagaagaaaatactggagtaagtatgactttggattaggcagtggtttcttagatattgacaccaaaagcacacgtggcaaaagaaaaagtaaaatcaacaccatcaaagtttagaatgttcgtgcttcagagaactatcaagaaagtgaaaagacaagccacagaatgggatagtattttgcaaatcacatatctgttaagaaacttgtagctgcaatagatacaggactcttacaacttaattaaagaaaagacccacctaggtgcagtggctcatgcctgtaatcccagcactttgggaggctgaggtgggaggatcccttgaggccaggagttcgagaccagcctggccaacatggcgagacgctgtctctactaaaaatacaaatattagccaggtgtggtggcacatgcctgtaattccagctattcgagagctgaggcacgagaattgcttgaacctgggacaccgagattgcagtgagccgagatcgcaccactgcactccagcctgtacaacagagcgagactttgtctcaaaaaaaaaagtaaatgcttacattattgatttgagatatttcttcttttatagtatgtcaaagtggtgctataaatttccctcttagcactactgtggctgcatctcagaaaatttgacatgtcatgtttttactttaattcagttcaaattatgatctaattttccttgagattacatctttgatccatgggttatttaatttccaaatacgtggggattttccagacatcactccgttattattttctatttttcctttttcttctatttatttatttacctatttacttattttcagttccctctcaggctctaagttctgttattattttctagtttaattccattgtgttcagagatgtactttgtattatttaaatcctttcaaatttatttgtttatttttttcttttcttttttttgagacggagtctcactctgttgcccaggctgtagtgcagtggtgcaacctcggctcactgcagcctccacctgctggggtcaagggattctcctgcctcagcctcctgagtaactgggattataggcatgagccaccacgcccggctaatttttgtacttttagtagagatggggtttcaccatgttggccaggctgatctagagaacccctaacctcaggtgatctgcctgcctcaacctccaaaagtgtttggattacaggagtgagccaccacacctggcctgttaatttatttttgttatttttttttaagacggaatctcactctgttgtccaggctggaatgcagtggcatgatctcagctcactgcaacctctgtctcccaggttgaagtgattatcctgcctcagcctctcgagtagctgagattacaggtgcatgccaacatgcctgtctaatttttatatttttagtagagacgggttcttaccatgttgaccaggctgatctggaacgcctgacctcaagtgatctgcctgcctcagcatctcaaagtgctgggattacagacatgagccaccatgcccggcctcttttgcatttattaagacttgttttatgcctccaaatatagtatatcttggtggatgtgcacttggatgcatattctgctgttgttggatattccattcatgttgtttatatggacttggttaatagcattgttcaagtcttttttttttttttttttgagatggagtcttgctctgtcacctagtctggactgcagtggcgcaatctcggctcactgcaacctctgcctcctgggttcaagcaattctttgcttcagcctcccgagtagctgggattacaggtgcccgccacca

SEQ ID NO: 96044 - DNA, 19931 bp, Homo sapiens
actgcactccagcctgggcgacagagcaagactctgtctcaaaaaagaaaagaaaagaaaagaaacgaaaagaaccatcttcaacaacatctggatatttgcaagtaagagaatgaagttggaccccttcctcataccatacataagaaaataaacacaaagtgagtcatagacctaaatgtataggctaaaagtataaaaacttttagaagaaaatacagggccaggatggtggcacactcctgtaatcccacctactgtggtggctgaggcaccggaatcacttgaacccaggaggcagaggttgcagcgagccaaaattgtgccactccactccagcccgggtgacagagcaagactctgtctgtctcaaagaaagaaaaagaaaatatagagataagtcttgtggccttggattggggaattgttcctcagaagcacaaacaacaaaagaaaaattaaattggacatcatcaaagtttagaactcttttactttaaagactccataaagaaagtgaaatgacaacccacagaatgggagaaaatacttgcaaatcatttacccgatgatgttctgtctagaccaggggtgtccaatcttttggtttccctgggccacactggaagaagaagaattgtcttgggccgcacataaaatacactcacactaacgatggctgatgaacttaaaaaaaaaaatcacaagaaaatctcataatgttttgggaaagtttatgaatttgtgttgggccacacattcaaagccatctttgggctgcatgcggcctgcgggtcgtgggttggacaagcttgaattatataaagaactcttatcattcaacaataacaatatcaataatgcaattgaaaaatgaacaaaggatccaaatagaactttctctagcaaagatatacagatggtcagtagacagatgagaaagcgctcaacatcattacccatgagggaaataaaaataaaaaccacaatgtgtttccactacttcacacccactaggatgggagtagtaagacagacagacgatagaagtgccgtagagaaactggaatcttcatatgctgatggtgggaatgtaaaatggtacaaccactttggaaaatagtttggcagttcctcagaggattaaacataaaattaccataggattcagcagttccacttgtgggtatatagccaagagaagtgaaaacatatctccccacaaaaaacttgggcatgagttttcacaatatcattactcataatagccaataagtaaaaacaacccaaatgtccatcaatgaatgaaaggataaacaaaatgtggtatattcatacaacagactattattcggctgttaaaaaaaataataaaaaagtagctcacgcctgtaatctcagtactttgggaggccaaggcaggaggattaattgaagacaggagttccagaccagtctggacatagaagtgagaccttgtctctagtaaacataaaaagaaaattagctgggttctgtggcacacacctgtagtcccagctactcaggaagccgaggtgggaggattgcttgagcccaggtattcaaggctggagtgagctatgattatgcatcactgcactccagcctgggtgacagagcaaaccatgtttctaaatacataaataagtaaataaaatgaagtaatgaaacacctacaaggtaaatgcaccttgaagacttgtaaaattaaagacgccaattgcaaaaggtttcatattgcatgatttgatctgtatgaaatgtccagaataggcaaatctgtttgagagagagaaagtagatgagtgcttgcctaggaccgggaggaggtttgcgaggaaatagagattcactgctaataagtacagggtttcttttgggtgcacttatgaggatgctctgaaattgattgtgatggttgtacacctctgaatacatgaaacagcattaaatcatcactttaagtcaactgtatagtgtctgaattatgtctcaatacagtagtttttttgtttttgtttttgtttttgttgtttttttcttttttgagatggagtctcactctgtggcccaggctggagtgcagtggcgcgatcttggctcattgcaacctccgcctcctgggttcaaccaattatcttgcctcagcctcccaagtaggtgggactacaggcgtgtgccaccacatctggctaattttttatgtattttttagtagagatgcggtttcatcatgttagccagatggtctcaatcccctgacctcatgatctgtctgcccttggcctcccaaagtgctgggattacaggtgtgagccactgcgcctggccaatacagttgtttttaaaaaacaaaacaggccggtcatggtggttcattcatgcctgaaatgccagaactttgggaggcccaggcaaggggaatctcttgaacccaggagtttgagaccccttccccataccacacacaaaaaaactaactcaaatgaatcacccacctaaatgtataaggtaaaactgtaaaactcttagaagaaaatactggagtaagtatgactttggattaggcagtggtttcttagatattgacaccaaaagcacacgtggcaaaagaaaaagtaaaatcaacaccatcaaagtttagaatgttcgtgcttcagagaactatcaagaaagtgaaaagacaagccacagaatgggatagtattttgcaaatcacatatctgttaagaaacttgtagctgcaatagatacaggactcttacaacttaattaaagaaaagacccacctaggtgcagtggctcatgcctgtaatcccagcactttgggaggctgaggtgggaggatcccttgaggccaggagttcgagaccagcctggccaacatggcgagacgctgtctctactaaaaatacaaatattagccaggtgtggtggcacatgcctgtaattccagctattcgagagctgaggcacgagaattgcttgaacctgggacaccgagattgcagtgagccgagatcgcaccactgcactccagcctgtacaacagagcgagactttgtctcaaaaaaaaaagtaaatgcttacattattgatttgagatatttcttcttttatagtatgtcaaagtggtgctataaatttccctcttagcactactgtggctgcatctcagaaaatttgacatgtcatgtttttactttaattcagttcaaattatgatctaattttccttgagattacatctttgatccatgggttatttaatttccaaatacgtggggattttccagacatcactccgttattattttctatttttcctttttcttctatttatttatttacctatttacttattttcagttccctctcaggctctaagttctgttattattttctagtttaattccattgtgttcagagatgtactttgtattatttaaatcctttcaaatttatttgtttatttttttcttttcttttttttgagacggagtctcactctgttgcccaggctgtagtgcagtggtgcaacctcggctcactgcagcctccacctgctggggtcaagggattctcctgcctcagcctcctgagtaactgggattataggcatgagccaccacgcccggctaatttttgtacttttagtagagatggggtttcaccatgttggccaggctgatctagagaacccctaacctcaggtgatctgcctgcctcaacctccaaaagtgtttggattacaggagtgagccaccacacctggcctgttaatttatttttgttatttttttttaagacggaatctcactctgttgtccaggctggaatgcagtggcatgatctcagctcactgcaacctctgtctcccaggttgaagtgattatcctgcctcagcctctcgagtagctgagattacaggtgcatgccaacatgcctgtctaatttttatatttttagtagagacgggttcttaccatgttgaccaggctgatctggaacgcctgacctcaagtgatctgcctgcctcagcatctcaaagtgctgggattacagacatgagccaccatgcccggcctcttttgcatttattaagacttgttttatgcctccaaatatagtatatcttggtggatgtgcacttggatgcatattctgctgttgttggatattccattcatgttgtttatatggacttggttaatagcattgttcaagtcttttttttttttttttttgagatggagtcttgctctgtcacctagtctggactgcagtggcgcaatctcggctcactgcaacctctgcctcctgggttcaagcaattctttgcttcagcctcccgagtagctgggattacaggtgcccgccaccacgcctggctaattttttgcatttttagtagagacggggtttcaccatcttggccaggctgatcttgaactcctgacctcgtgatccacccgcctcagcctcccaaagtgctgggattacaggcgtgagccacggcgcctgggctgttcaagtcttctatacctttaccgagtttctgtaaattatgactgacaactgttctacaactgttgagagtggtgtgttgaaacctccaactataattttgtatttgtctatttcttcttaagttctattattgtttttcatgtatttgatgctctatttttatttgcatatacattgacgattatattttctttgttaattgacctctgtcattatgataggtccctctttgtctttggtagtttttcttgttgttgtttttgttgttgatttgagacagggtctcaatctgctgcccaggttggagtgtagtggtataatcacagctcactgcagccttgacctcctaggctcaggtgatcctcccacctcaacctcctgagtaactgggaccacaggcacatactaccacattttgataatctttttaaaactttttgtagagataacatctctctgtgttgcccaggctggtctcaaactcctgggctcaatcctcccttttcagcctcccaaagtgctgagattacaggtgtcaaccactatacgggccagtattttttgttttgaaacctactttgtctgatattgatgtagccattccaactttttaaaatttagttttgtcaaggtatgtcttttcccacctttttactttttttttttgagatggaatttcgctcttgttgcctcggctggagtgcaatggtgcgatcttggctcactgcaacctccgcctccaaggttccagcgattctcctgcctcagcctcccaagtagctgggattacgggcatgtgccaccccacctggctaattttgtatttttagtagagatggggtttctccatgttagtcaggcttggtctccaactcttgacctcaggtgatccacccccctcggcctcccaaagtgctgggattacaggcatgaaccactccgcctggcgcatctttttacttttaacttatctctgtttatatatttcaatagctttctaatatttactatatacttgtgttttgcttttttatccattctaacaatctctgccttttacttgtaagcattttttcatttatatttaatgtaattattgatatggttgggtttaaattaatcttgctattggtttttcatttgttctatctgtctattggtctttttttttttttttttttttttgtatttagagacagatttgccctctgtcacccagggcggagtgcagtggagctatcacagcacactgcagctgggcgttggtccatttttctatcttcttcttctttttttttttcttttgagacagggcctctctatgttgcccaggctggattcaaactcctgggctcaggcgatcgtcctgccttgatctcccaaagtgttgggattacaggcgtaaaccaccacagtcagtcagtttgtttgtttgtttcacttaggtacagaattcaatgccaacagttcttttctttcaagactttaaccatgtcactccacggggacgctgttttgagcctttggtaagcctcatcctccaggaccacacggcaggcaggcaggacagcccttacttaggtccaccacacccgttaagctccctcctggaggagacagagacctgggacagctccggggcgggcgaggccgagggatgggggacgacggggcagggaggagtcccagacctttgggatcttcgccacccttggaccccctcacccttgcggacttgaggagtgttaaaatctccaagacgcgagtcaccggtacgaagccacagccatttcgctgcttgctcggtgcaagtgcagacggtcctcgtggttgagagcggagtccagcgcgtgggcggcgttgggcacctttggccgcgccctccgctccaccaccggtgggcgcggcccgagccagtccctaaagccacgaggccgcccgctccgagcctggtgcttccgaccgctgcgcgcggctcctgggctgtcacagtctcccgttgccgccgtcatgtcccggcagctgtcgcgggcccggccagccacggtgctgggcgccatggagatggggcgccgcatggacgcgcccaccagcgccgcagtcacgcgcgccttcctggagcgcggccacaccgagatagacacggccttcctgtacagcgacggccagtccgagaccatccttggcggcctggggctccgaatgggcagcagcgactgcagaggtaacagtggcccctgatcctccctctgcacggtgcagagctgagcctgtcaccagccgtgcgctgccccgctctccctggccccgggcagcacccacggcttcgtcccccaccccatccctgtccacaccgcaactctgggaaccgccagttcctcaggcacatctagctctggacaactggatggtgctttgtccggactccttttctgtcgtcttctcttccgggaggtagcccagcaccctcactgacgcctggatgacttggtcttgcctggaatgacttggctagcccctctctggagcacgaaaaacattggaatctagcattgtgcagctcctgtccccacctgtgcccttcaggtgcccttgacgggcctgatctgcagaaattctgttcttatcgcctggcacagtccaaaatcagagtttggacccagcacactatctgcttcctcctacgctcatgccagactgctcgggtccctggactttgctctggtaactcaccagggtgacaatgcctgggagccttggcagctccctcagtgagatggggaattgggtgtggtacagggtctcgctgccctctctgtgggatgctctgtctgaggctattggagagaaatggacactaacccactccaggaatctccaattctagcgatggctggggagccgagtgagcccttcttgggagggaccccgtgaagaaagataggataggagtttgccaggaagagtacaaggggcaagggcgtcagggcagtgggcatgggtgtggaaaggcaaatgcgacttggcaatgccgccggtgctgggggaagcaggtgtagcccgaggggaagatgtgtgtaaaggggcaggaggagccrccctcagtctgatgccatttgcagtgcttaggccgatgcctggcaggcacatagtgagggctgggaaatgttagctgtttctttgttcttaatattagcaccatttgcctccttccactctgagtgtctgagtggagtcttgtccatttctcctctgattcaccacatggtacatcccaaacaaaagaggcctgtgcgtgcatttcagtgccacactctttctagatcacctggctgccactcggtgagagctctgatcttatttccggtctttttttttttttttttttgatacagggtcttgctcttttacccaggctggagtgcaatcatggctcattgcagctttggcctctcagggctcaagcgatcctcccacctcagcctccttagtagctgggactactacaggcctgtgccaccacacctggctaattttttgtattattcatcgaaaccagagtctcactttgttgcccaggctggtctcaaactcatgggctcaagtgatcctcctgccctggcctcccaaagtgctgagattacaggtgtgagccaccacagatctgcaccctctgcctggcccttatttctgattttttttttgtttacttttttaatccttgtcttctgtctttgagtccaaggttggctggtgaaagtcctcagatctcagatctgaagttaagttcacattgagaagcagaggggtggtggtggaatggaaaaattccaaatgaataattcatcaaacctgctccctcccaggtctcaagggctctagtgactgccctcttgccagcctaagtgactttctaagtgtgaaaagtgggaagaggactctccactcacctgttattccagcccactaggatctaggattttttatttttakttttatttygaaatagggtctcattctgtcatccgggctggagtacagtggcataatatttgctcactatagccttgatctcctaggctcatgtgatcctctcaactcagcctccccagtagctgagattacaggcatgtaccaccatgcctggccaaattttgtgttttttgtagagayggggtttcaccattttgcccaggctggtctcaaatccctgggctcaagagatccaccctcctgggcctctctcagtgctcggcttatgggggtgagccactgtgcctaatctccaactaagattttttttttttgcgggggggacagagtcttgttctggcacacaggctggagtgtagtgaaagatctcggctcactgcaacctctgcctcctgggttcaagcgattcttgtgcctcagcctctccagtagctgggattacaagtttgagccactgaacccagcctccaactaggattcttaatacggggcagggagaagagtgttaagcttacttcttcttttttttttttttgacagtcttgctctgtcacccaggcttcactgcaatggcacgatctgggctcactgcaacctctacctcccaggttcatgcaattctttttttttttctttttttttgagacagagtctcgctttgttgcccaggctggagtgcagtggcgcgatctcggctcactgcaagctccgcctcccgggttcatgccattctcctgccttagcctcctgagtagctgggactacaggcgcccaccaccatgcccggctaattttttgtatttttagtagagacgggatttcaccgtgttagccaggatggtctcgaactcctgatcttgtgatctgcctgcctcagcctcccaaagtgccgggattacaggtgtgagccactgcacccggctggttcatgcaattcttgtgcctagcctcccaagtagcagagataacaggcgtgtacaaccacccccagctaatttttgtatttttagtacagatggggttttaccatgttggccagcttggtctcaaattcctgacctcaggtcatttacccacctcggcctcccaaagtgctgggattataggcgtgagccaccacatccagccctgaattttcatttctctttcctctcagtgaaaattgctaccaaggccaatccatggattgggaactccctgaagcctgacagtgtccgatcccagctggagacgtcactgaagcggctgcagtgtccctgagtggacctcttctatctacatgcacctgaccacagcgccccggtggaagagacactgcgtgcctgccaccagctgcaccaggaggtgaggggacccctgagctctgggaggtggtccactgctgctctccttatcctgatcctaatggtgagagcagaggcaccagggcagttccagggtggagcagggaacagcccaactcccaggggccccaccctgacctccctttcctggtctgggctgcactatgttctgactggagcctcacccgagcagggcaagttcgtggagcttggcctctccaactatgccgcctgggaagtggccgagatctgtaccctctgcaagagcaacggctggatcctgcccactgtgtaccaggtgagrgccrgggctgcagaggccaaggtctccagaactcctgctcatcctgggctgtctttgcccctctgactgcccccatgccctctgcatagcagccactcccctgctgaaagcctgcagatggctcccaggtaccctcaggatgccattcaagctcctcaggctggccactgggcatctgcttccttcctgcctatctgtgcaccttggacccttccttccctaccttcccctgcactcagcctggaacaagcccttcccccaccacygccccttctgtgagagaatggttcaggtctcacatacgtgtctcttcctctggaagcctttctagatgggcccagaagaccctgagacctcaggtccttgtttacctcctcatgattcattgcacaaatatttgcacacctgcttggtgccaggcactggtcacagaactttctagtctattatgattgcctcatgactcgattataactgtttatgcttgaccttactacaaaatatttgagggaagggaccttgtccttttagcttttgaatctaaatctgacaaccagcccacagttggtgctcatgaaagttggcagaatgaatgaattttcctagggcataagcccctttcaccagcaccagtaagaataagtatatgcccagatggttaaaatcctagaattgttaaggtctgaaataagggttctatgagggtaaatttaggtcccttcttttgacacatccaccctctccccggggcccttctccttacagggcatgtacagcgccaccacccggcaggtggaaacggagctcttcccctrcctcaggcactttggactgaggttctatgcctacaaccctctggctggtacgtggagcattcctggccctgactcagcctattcccgacccacagatgcccagcccaggacctgggaagaagggagggtttgacaagaggctgggctgcatccttcagccctcctgggtccctgcccctcccctagaccagagccctgagggatgtggcagcttctggggcactctgggcctsggggctgattgctgcyttccckcagggggcctgctgaccggcaagtacaagtatgaggacaaggacgggaaacagcccgtgggccgcttctttgggactcagtgggcagagatctacaggaatcagttagttgggggtgcttgatgtggatggctggggtggggtcagctttatgtggaatgaagtcctgggctgctcctggggtaaggcctttcctcgctgtctgcacctactcccctgcattccttcaggaattcccaagccctctgtgggttttcttgttgtcttgggacctccaggaggaaaggagactccctggacctcggkgtcttgaagtcgtagctctttcctgagcaatcacccgctacaaaggaaagaaagagccctggaaggaggtccaggaggcctggggctgagtcctgacctgtctcagtggccttcatgtccgtaggggaaatgagagcaggctgctgagttctcaggaataaagattcgttgaggtctctgctgaggggcccagcatcctgggtggttctgatgcccagaaaagtgagagacctatgactagagaggacacccgcccctcagggctgcarggtgtggggtggggcagtggccttggatggctctttggttgtggcttccagtgtgaccctgatggtactgacccctgtgccaccatccccactgaacagcttctggaaggagcaccacttcgagggcattgccctggtggagaaggccctgcaggccrcgtatggcgccagcgctcccagcatgacctcggccgccctccggtggatgtaccaccactcacagctgcaggtaaccagcgaccctgggtgctcagcttcttcccttccaggggaaccagcattcattaccttcaggtgaagcccaaagcatttgttttctcgattcctctgaaatttctttcttccaactctcataaacactcttcccactggtctttttttttttttttttttttttttttgagacagagtctcgctctgttatgccagctggagtgcagtggcatgatctcggctcactgcaacttctgcctcccagactcaagcaattctcctcccccagcctcctgagtagctgggattacaggcacgcaccactatgaccaactaattgtttgtatttatagtagagatggggtttcgccaagctgcctatgctggtcttgaactcctgagctcagacaattcgccctcctcagcctctgaaagtgctgggattacaggcgtgagcccctgcgctcggccttcccattggtctttgatggtatctgagtgccaggctttgtaatgagggcttcactgcagggatttcattattccttcagctttatgaaatgactatcccagtgttattgatgaggaaactgagtttcacccagctatgaaaggggaagacattttaacayaggttcaactgtaaagcccactagcctcatccttttggtgggagctggagtttccctctctcagtgcctcatgtcttcctcacttatatccaactccagccttagatgttgcaatagtgtctggcatatatacagtaggtgctcaataaatgggagctaagtgctctacataatttttcacacccataaccatgttgaaaatagaaaagaggattgaatctcagagaggtttaataacttagccgcgtttacacagctgctggggggcagaactgggctgtgaatgtaggtctgtctggaagcgtcgtgtggcagtaggggaagggatacaggttttgcgtcacatgggtacagctatccaaggcaccttaagttctttctggacatatgggatacaagagatcccaaatctcagcagggaggtggctgggacagctgtgagtggagtcgctgtgcagcagaagagggttgaagtctggccgtctcccttgcagggtgcccayggggacgcggtcatcctgggcatgtccagcctggagcagctggagcagaacttggcagcggcagaggaagggcccctggagccggctgtcgtggacgcctttaatcaagcctggcatttgkttgcccacgaatgtcccaactacttcatctaagctcattgtggctcaggctgcccaaggcttttctgtcaactcttttgctctctcccgctttgtctaatttagaactgcctcactaaattcttagggatggaagtatttggaaaaaaacctaacagtagagtcaccacctaaggaagaataaaatctcccagggtgctgtgtgttagtctgtttgcgttgctataaaagaatacctgagactgggtcatgtataaagaaaagaggtttctttggctcacagttctgcagtctgtacaagagggtgtggtgccggcatctgctcttggtgagggcctcaggaagcttagaatcatggcagaaggggaaacggagccagcgtgtcacatggtgagagagggagcaagagacagacaggggaggaaattcacacactgatggtggggatgtaaaatggtacaaccagtttggaaaacagtttggcagtttctcaaaggattaaacataaaattaccataggattcagcagttccacttgtgggtatgtagccaagagaaatgaaaacatatctccccacaaaaaaacttgggtatgagatttcacattatcattgctcataatagccartaagtaaaaacaacccaaatgtccaagaatgaataaatggataaacaaaatatggtatatttatacaacagactattattcggccattaaaaaaaaaaaagagtggctgacacctgtaatctcagcactttgagaggccaaggcagtaggactgattgaagacaggagttccagaccagtctgggaaacaaagcgagaccctgtctccactaaacataaaaacaaaattactggggccccatggcacacacctgtagtcccagctgctcgggaagctgagatgggcggattgcttgagcccaggtattcaagtctggagtgagctatgactgtgccactgcactccagcctgggcgacagagcaaaccctgtttccaaacaaacaaacaaacaaacaaatacacagacagaagtagttaaacatctacaaggtaagtgcatcttgaagacgtgttaagttaaagaagccaattacaaaaggtttcacgttgtatgatttcgtttatatgaaatgtccagaataggcaaatctgtttgagagagagaaagtagatgagtacttgcctaggactgggaggaggattgcgaggaaatggagattcactgctaatgagtacagggtttcttttgggggcgcttatgaagatgctctgaaattgattgtgatggttgtacaactctgaatacatgaaacagcattaaacatcactttaagtaagtcaactgtatagtgtctgaattatgtctcaatactgttgtttttaaaaaacaaaacaggccaggcacggtgtctcattcctgaaatcccagaactctgagaggcctaggcaaggggattgcttgaatccaggagttcaagagcagcctgggcaacatggtgaaatcccatcttgacaaaatatacaaaaattagctgggtggtggcaaacccactgtttgggtagaactcagtgggggaagcctcatctgttccccggtgtctgaggcgtgatttagcagctgtaggctagggtcacctgaagacattcacttatcagctgctgtcattaactggcacacatgtggcctctgcatgtggcttccaagggagcacatctcaagcaatctaggcagaagccatgtggccttttatgtcccagcctcaggagtccatagcatcactcttgtgtcctgggaggggagtcaaagatacctgtacaaagagcatttgagagcatggggtggttatcttaggaaaataaactgtaacactgggagcaacggtcctgagtggtcaagtcgagatgagccccaggagctgctgagactcttgagtatccccatcagggatgcattctctgctatgccacatcccacctattagaatcttctggatactatatctcaaagatagttgatgtccacttgaattcagccatttcatatcttttttctcttctttttttcccactccacctcctccctcagccattttatatctaaagagcttcttcaagagacagttcccaaacagcaccttaaatatatatacaattcgtatttgttaatttaaaaacaaatgagaaggaacaaaaagacctaaaggagcagagctggatctggagagcgtctaatatatatttattcatcctcaaactaaggaaactgctctgtgctgtataaaagactggagaagggccaggcgcagtggctcacgcctgtaatcccagcactttgggaggccgaggcgggcggattatggggtcaggagatcaagaccatcctagttaacatggtgaaaccccgtctctactaaaaatacaaaaaattagccgggcatggtggtgggcgcctgtagttccagctacccgggaggctgacgcgggagaatggcgtaaatccgggaggtggagcttgcagtgagctgagatcatgccactgcactccagcctgggcgacagagcaagactccatctcaaaaaagaaaaaaaaaaaaaaaaaagactggagaaggaggtgacatagattttgcacatgggaattcatgaggaggggagttcctgaaacttcaggctgccatgggctgccctacttgcttcatttctgacctgcttgttcccagtgactgggttggttggcatcaccagtgtctcaaattgggccattctgaatacatttcagaagcaacaggaaggtaagagtgccaggctccacaattgtttatgaacaagtacatttctgctgcatggatttttaatttaataaggctgtttttaccatggcttttttttttttttttttttttgagatggagtctagctctgttgcccaggctggagtgcagtggtgcaatcttggctcactgcaacctctgcctcccgggttcaagcaattctctgcctcagcctcccgagtagctgggactacaggcgcctgccaccacacctggctcattttttatatttttagtagagacggggtttcaccatcttggccagcctggtcttgaactcctgacctcgtgatccacccgcctcggcctcccaaagtgctgggattgcaggcgtgagccaccgtccttaccatggcatttgtaagtgtatgtccactgcagaaacaaatttctattctcaatgttgagctttattaactgaatttgaaatagcattcacaacagttagatgctttctctctcacaaaatggatttccaaaagctttactctgattccaagagttggatggaagacagtttatatatacaagctggaagccaccacacccagtctatttcttaaaatttggacaatttattaaagtgatatgtgcccatggttaaaagctgtcactttccaagtctcattcctcagaggcaacttctagaaattcttgcagctttctttttctctagcagttactgctgcactatgtctaaagtatacacttggctgggggtggtggttcacacctataatcccaacactttgggagacaaaggtgaatcgcttgagcccaggagtttgagaccagcctgggcaggtcagtgagactgtctctacaaaaaaattttaaaaactagccaggcatggtgtcataggcctgtagttccagccttaggaggccaagataggaggattgcttgagcttaggagtttggcctggatattaaagcaagaccrccatctcttattaaaaaaaaagctacacactttatcgctattccttaatatatcaaatttagatgtcgtgtgtgggctgctggaaagttcctgatcttagatttaccaaatccacacctgcaaggttaatatttgtgcacaatgtgatttattacttctttttgttttctccccctgggaggaaggcagaaacaagccaagctccatggaagtggtgccagtgctagttttgttgaaatggccaaggacttaggcagcagtgtccaacatttgggttcaccttgtgtgcactgctgtgatttacagccttatttggatgataaggatgatcagaaaccccaagggtttctaataatccttgccatgttcaggaaccaccgtcctaagcggaggttttctcaagcttttcacactgcagggcccaggctacagccctggagcatcgagacctgctgggtttcatcccatctgttctttacagtgtgcaaagctggccaggccccttactacctttatacttggcatttagcacatggggctggcatggggcatttcccttcctcactgagcaggtgagggcaggtggctcagccaaggccgcagagccaggattggagatcaggacttgtcatgggtccttgtgtcccccagggcacacaggtgtggtgctgtaggtgctgaggggtcctaaggtggcgggtgtttaacacctggtgaggttaaatgctagggttttttcttcgaaatggggtctcactctgttgttcaggatggagtgcaggggctcgatcaccactccctgtagcctctacctcccagactcaagtgatcttcctgcctcagcctccagagcagctgagactagaggcgcacatcactacgcccggctaattttttttttttttttttgtagagacaggaggtctccctacgttatcttggctgacttctaacttccggcatcaagcaatcctcccttcttggcctcccaaagggcttggattacaggtgtggccatcacgcctggccaaatgcaaggattctcgcccactgcctcccctctagccacccaagaacacggatgaggggcccagaaacatgcatgcattctgatgctcaaaaatgtaagatgtctacttagaagccattagcccctcagtgcttcagggacctgggtgcaggcaaccgccctgagatgacccctagtactgacccccgtgcaataccctcccccaacccagcttctggaacaagcaccacttcaaggccatggccctggtggagcaggtcctgcagattgtgtatatagcaccagtgcccctggcatggccttgactgtcctgcgatggaccactcgcaagctgcaggtaacccagctgtctctagatgctcagctgcttctctcaaattctgtgggggtggggagactggggaagctgcgagggctatgcagtcatttggtcactttgaccaagaggagwtaagtccttttcttcctatgaaggctctccatggcccagttcttttgggtggggtaaacctgttcttacacaaattacttaagcggccaggtaaccaacactagttattgcgatggccatgttaagtatggtcatctcagttttacatgaggcaaytggctcagaggcaatttcacttgtgtagggtcccacagctacacatggtagggaacgaacgtgggtttgactgaaactaatgtttttctttttggggggacaaggtcttcctcttgtcacccaggctggagtgcagtggcttgatcatggttcactgcagccttgacctccagggctcaggcaatgctccgcttcagtctcccatgtagctgggaccacaggcatacaccaccatgtgactaacttctgtattttttgtagagacaggggtctcactacattgcctgggctgatcttttttttttttttgagacagagtctagctctgtcacccaggctgagtgtagtgctgtgatctcggctcactgcaagctccgcctcccaggttcaagccattctcctgcctcagcctcccgagtagctgggactacaggcgcccgtcaccatgcccagctaattttttgtatttttagtagagacggggtttcaccgtgttagccaggatggtctccatctcctgacctcgtgatcygcctgcctcggcctcccaaagggctgggattacaggcatgagccaccgtgcccggcctgagcctgggctgatcttgagtctttgggctcaagcaatccgcccacctcagcattccaaattgctaggattacaggtgcaagccactgcatctggtctgaaacctacatttttaaccattagcttttcctggctccttggctgcccaccctggagacagcccaaccctgtgtgtagtggcagggtttccctctccctgctgtccctaacccccttctccagcttgggtattatatggttatggcttccctttagtgagcacgttacgtgcctggtctgcaggcaaagtgcttcacacaatttctaattcagacaagcggcctgaagtctgaagctgaaaggctgggtgactgacctgggtttacccagctgctgagcagcagatgagtggctctgaagtcagctgtctaaagctgagacagcgtggaggcagggctttaaagcccaacggtcatggctgtttgcaagcagtaatgcaaggcatacgtgaataaccagagcccagttagcggcggggccatggctgggaggggcatgattagtcactgtgcagcagaaatgtgttgaagtctagctgtctcccttacagggcatgcatagggacgtggtcatcctgga

SEQ ID NO: 96045 - DNA, 37802 bp, Homo sapiens
cggattaataagcgcagccaggtacccgcgcgaggcacttgctggcaatggcgggaggcggacgtggggggtcatgcaataggtactggaaggagagaggcgggcacaaaggttgcgggaggaacaggtgcccacaatggtggcagatctgcccgtggatcactgaagattcctgctctcctgctgaggtggagattgcagtgagctgagatcgcaccattgcactccagcctgggcaacaagtgcaaaactcagtctccagataaaaaaaagaaaaagaaaaaaaagaggccgggcgtggtggcttatgcctataatcctagcactttgggaggtcggggcagacggatcacgagatcaggagttggagaccagcctggccaacatagtgaaaccccgtctctagtaaaaatacaaatttagtcagacatggtggcacgcgcctgtagtcccagctgctccggcggctgagacaggagaatcacttgaacccgggggcgggcggggaagggattgtgatgcgccgagatcgcgccactgcactccagcctgggcaacagagccagactctctctctttttttttttttttttttgagatggagtctccctctatcgcccaggctggattccagtggcctgatctcagctcaccgcaagctccgcctaccgggttcacgccattctcctgcctcagcctctggagtagttgggactgcaggcgcccgccaccacacccggctaatgttttgtatttttagtagagacggggtttcaccgtgttagccaggatgatctccatctcctgacgtcgtgatccccctcccaaagtgctgggattacaggcgtgagccaccgcgcccggtgttgaaactcccttgaggcattttcttcggccttcgggtccatcctctgtctcctccttgacctcctcatctcctcctcgccactgccttggggaccttggccaggctcatggcatccagcagccactcaatgtcaatacctccatgttcatctctcagcccgcccttgcccgtgaacccatgcttatttatttatttttttatacgtgcacccatgctcttcaggtctgatgaagtatccagaatcaagctcctgaccatccccaaacctgccctttctgcagggtttacctcgctagtcggcaccatccttgattcttctctttctcccacccaggccatcatctcttgcctggttgatacccacagcctcccctttgggctttatccttatccccgtcatagctgccagagggaccctgtgaaaacactccccagcctgctcattcctctgccctaagcctgcatggcacagagcaaaagccagttgttatgggacctaggaggtcctgtgggatgggccccagcctgcatcttcatcctcttctccccaccccactccattcactctctgcctatcgctcaccagcctatrccacctgcctcagggcctttgcactgaccatttaggccacattccaggctcttttcacacgttgcctcctctgagaagccctccctgaccactctgcccatacctcatgcctcttgattccccttacctggcttgtggtttcagcactttccctgtgtgtgtttgtttttcttggcatgagggcaggacctaagtgtctgttccctgttgattccccagtgccaggcatgcagtgcaaactctagaaatattttttgcatgaaggaatgagtgattgaatgcagcaagggtctggaggctgaggaccaggcagacagacattcagagttgctggaacgcgacagagacagggagtcagactggtcatgcaagatcctgggcctgcccttgggtcctggggagccacggaaggttgtgggtgccagagggttgtggtcagagccacagtcaggggccttctgagacctgtgtcccctccccaccctccctccccacctcctcaggccagctctggggtctcggcaggtggtccacaacatgacctctgagttcttcgctgcccagctccgggcccagatctctgacgacaccactcacccgatctcctactacaagcccgagttctacacgccagttgatgggggcactgctcacctgtctgtcgtcgcagaagacggcagtgctgtgtccaccaccagcaccatcaacctctagtaggggctgctgggccgcctgggtgggaaagggccaggggcgggtggcccagggactgcccacttatccagtaaggtggctccgtcacctcttttcctggtgggaaactgaggcccaaccttggtagcttatcctgggcctctcagtgagtatgtttgagcctcagtgggtggatagggaccaggctgggccaggcaaggtcgggcactgtctgacctggctgggcggtagctttggctccaaggtccgctccccggtcagcgggatcctgttcaatgatgaaatggacgacttcagctctcccaacatcaccaacgagtttggggtgccccctcacctgccaatttcatccagccaggtatggggtggaggtccgggggtgggggactggggtggagaggggcgggtgtcctgggcaggcagctgacgggcatccctgtcttctcccatcggccatagggaagcagccgctctcgtccatgtgcccgacgatcatggtgggccaggacggccaggtccggatggttgtgggagctgctgggggcacacagatcaccacagccactgcactgatatgtgtcacagcttttctccctggccgtgcccaccctgcacagcccccaagccacgctgatcacactcccatgccccaggccatcatctacaacctctggttcggctatgacrtgaagcgggccgtggaggagccccggctgcacaaccagcttctgcccaacgtcacgacagtggagagaaacattgaccaggtgggccgggggttggagaaactgagtcacggtgtggggccccagggcatcctgggctggaggcctggatcatcacagagtggacaatggttggtgtcctctctctagtgcctgggccatctggagcccctgtgacatgaaggccaaaccccctgctccagtgagacccagcaggccccaacctgctcttcctgatgacctggcccgaaatggcaccacctgggctgaggcctgtgaccacacagatgtggttcaggtggcatctggagccttgctcaggcttcccctctcctcccacccccaggcagtgactgcagccctggagacccggcaccatcacacccagatcgcatccactttcatcgctgtggtgcaagccatcgtccrcacggctggtggctgggcagctgcctcggactccagraaaggcggggagcctgctggctacwgagtgctccaggcggacaaggctgacaagcaatctagggacaagatactcactaggaccaggaaggggactctgggggaccggcttcccctgtgagcagcagagcagcacaataaatgaggcactggagaggcgggattcggagatcttcacgctgcggtcgctggaactagcctcagcatcttcagcatggggaaagccaggcacgtggctgggggccaggggaaggtccatgccaagccctgccccttcccaccctgatccctcagacttggggccaggccctcccttccctgggctgggcagcaacaccacctaggaccagccaccagagggtgcagcgaccccggccctttcttaggcagagagtggccagctgatgccgggaacccgggtgccttctcagacccgtaggcgtccagctcaccctgccgaggacatgggaggtgaagctgaggtctgaggagtggggattgggcaagaggctggaggaaaacatctcggtcagagccaagcccctggggggtttccaagtttaagcccagagtgaaacccaagcttgtgatcctctccagagggaggcctggttctcagggaacagcaaactggaagaggtccccagatcccagggatcagggcttggaccagccggggatgcagcccagagggagtgggtttggaagggaacaactagacacagcagccttcaccatcagcagcccctccaggcctccctcggggcctgctccctcctccaggcacagttccaacacctggggcaggattctgggaaaggctggtggagataggctggtgaggggtggtggtcacagcccagcaccaggggcactctggatatcaccaggggcactctggccagggcccaggtgaggccaggtcggggctatccttcaggagccccgaaaacctggtgataccaaagggcccacaaacagggttttgtgcctgcagagtagagtaccaccggttctgagccctggagggctgtgtctctggggctcccagttgagtgatgtacgagtcactcctcaatccttattttatttatttaatttaaaaaattatttaaacaaatagagatggggtctcactatgttgaccaggctggacttaaactcctgacttcaagcagtccccccatctcagtctcccaaagtgctaggattacaggggtgagccactgcacccggcctcaatccttatttcggcctgagaggaaaggccgtggccccatttgcaggggagaagactgaagctggaggggcaggccttgctctgggttgcacagcaggaagagaagtgggagctggccacgaggcttcctggacccgacacgctggtggggtacaccctggttctccaggtcccgtggggctcagcccaggactacctcggggggtgagggacttaaatcctctccttcattctcatcgccccttcccccatcatttcctgaggaaggacattcagggaccttcctggctgtgcctcgggtcaggaccagaatgacacccattcctttccctgggcctttgctcaggcggtccctgcaccctggcctctgcctgaccaggatggtggggagaggaggggggacgtcccccacgctgctgtctccactgttcctgctgcccaggcctctgagcttccaggactgcagcgggtgggtgggtgggctggcctaagcccaggaatgcacttcagctcctggttgagcaatgtcactgaggcttgggagtcgggtgggggcgggaggaggcatccacaggccccccaccgcgagaggcagccgtgggaacagcctgcctctaaacaatcattccagtccaggctgaccaggggctctggctggacataggggcctggcaggctgtgtggcctgtaaggacacagtctgtctctgtgcctcagtttctctgctgcccagatgggggggcccggcttccaggtgtagacatctggagcaggcagtgttcagctggggaggaagcggggaggactgtgggggccacrtgggaagaagtccagcccacatcacctgcacccctgctgagcctggtcaacagagcccctcagtgggtcctcactctcctggctgcctcccatttaggcaccctgaggcctggggagaacagagccaggccagtgtccctagagaggctgcgctgccagcacagtaatagcggatttggattcagggaagcagacccgcagctagggtgggaaagagctacaggcagggcgtggcctccacacagcctccctccctggaggtccatgctgcatttccaggacagcaagtcctggacaaatggtcccggatgccaagggctagaggcatggtctgtctgcattccccacatgggcgtcttgtagtcaccagcatttgatgctgtcaagtccccctgtcctctgtgcagactgggaagcccttggccaccctggggagttgtgggacccaggccaggctgcagaagcataaggacttgaacccaagttttaagtgacaccaccttgtgtccccctccctctgcctctgttcagctccaccttgatgctgactaggctgggccatgaggagagggttaggggatagagatgggagctggggagcagggctccactctgggaggggggcagccttgccggatccaggggagagagttgagcggccccagctctgctttcccagagctgccgggaacccggggaatggtgtggaggttccagggagccctgcccctacctggcaaccgcagtgcagcaggcaccaagttctcctgcacattgcgacagtgtgaccctgggctctggcgggyggtaggtggggcctttggacctactagcagtgagggagttaacacagcagctgactcctctaggcaaggaaaactcccctcagacgctttgctgcctggcctcctgccagcaacaagcaggagctgaaaaccagaagttgaggcgtgagtttggccactccgtagtgtgcacttggtgagggcagcagctcgccacagctgccagccrtctgtccattcacccatctgtccatctggcagcccgctgttcagacctgtctgtctgtccgcccatctgtaagcccatctctgtcccattgtctatctgaccatctttctcttactgtcctctttgtctagctatctggcctatctgtcgatccatcttcgtgtctgtcttcagcccccacctgtttgtccatctgtccaattacctgtgactctgtgcatcttcttgtccattcatctgcccacccatccgtccctccgtctgcccaccagccgcccctctcctcctgggctgcagagccatggcccggggctacggggccacggtcrgcctagtcctgctgggtctggggctggcgctggctgtcatygtgctggctgtggtcctctctcgacaccaggccccatgtggcccccaggcctttgcccacgctgctgttgccgccgactccaaggtctgctcggatattggacggtgagtgagacgtgggaggaagctgggtggcccttggcagccagcccctcctggagaaggcrtgtgtgtgtgtgtgtgtgtgagwgaatgtatgtgtgggtgtgtgtgtgagtgtctgggtatgtgtgattgcatgcatgtgtgggtgtgtgtgagtgtatgtgagtgtgagtgtggggagtgtgggtgtgtgtgaatgtgtgtgattgtgtgtgggtatgtgtatgtgtgggtgggtgtgtgtgtgtgtgtgtgtgcacgtgcactggcccaggaagcaggagccgtgtgtgtgtgggcttcagcacctgcaggtcttgggcgcaaggaggcagcctcagggcccttgcacagaacaggtggcagggtgtgctcgtggggcagatggggacttggggacaatggtggtgtgtgagtccacgcctggctccaggattcaggaggcccatttgcatatcccaggtgggaacctgtctggccccgcctgaccctgctggccggtgcaggccccttcagtgaggccaattctccaaggctgcggtcttctcccagggtcatgggtgaaggggtttggaggctccctgcgtgggtactggcctgctggggtacacacaatgctgccatagccagtctgccccaacacccagcctggggccacatctcgggtctctcagtcctgaggagcccggtgccccacccctcacatcctctctccmtgagtcagggcctgggtctcgtgagctgagtgactgatacttggtgtcctggatgagggcgtggtggagaggggccacagcgggtgtttcctgaccctcttccaggaagcccagcccaagggaggcctccgctgctgctgctgcagaggacacatacaggatgccccttcctgctccctgcctcccactgggcccacaaaagccagggcaagcctcccctccctgccagccacctggtctgcttcccagaagttctgtcttgcaggctgttgggaggatcccagtgctttgtaaattaaagcaagggaggagtggctgctctctctctctgttcattcattcaccttttcattcattccttcttccctccattcccccatctgtccatccttccctgccctgatttctcatgccaccccccgcccctcctgacctggtcctttggtttctcttcaggtctttctgtctcctcccacagggctgagaatggcagctcagggacaagtcggggctggggactgcttagtctccccagtggctctcaggggatttgagggattgacgccagccgccaccccaggctgtgcccctcctctgctcaggaggacattcaggatgcgacacccacttaaactcgaagttgcaaagatgcaaatgagactggagtctcaggcaccagagaccacccgtgggcatgtggcctttgggagtggggacctgctgccacaaatttctaggtggagtctggacctgctgggtctccctgagtgactgtctgggggtctccatagcgtgccctgctgtgtgcgtgacggtcactggttgggtaggggtctctactctaaagctccctctgctggcatcccctcaaactgtcccttgaagagagaggatgtggtttgccccagtgttttgtcaaacaactctctccacttcctgtcttaagaagctgggagtggaagagagcctggggctggccccagctgctgctgcggaacaggggtcattggacactgggaccctggccggactggctggggggcctcaggaagaggcctgctgcagcgtcatcctggccaagatccctccttgcagaggcccctggccacactgccacagggtctgctggggccaccagaarcccatgctcctgactccatcatctctcccctctgtgctcacctctcaccaggaggccctcccagagtccagtctcctgctcttttttctgttttgtttttgagatgctgtttcgctctgtcaccaggctggagtgcagtggcrtgatctcggctcgctgcaacctctgcctccttggttcaaatgattctcctgcctcagcctcctgagtagctgggactacaggtgctagccaccacgcccagctaatttttgtatttttagtagagatggggtttcaccatgttagccaggatggtctccaactctagacctcgtgctttgcccacctccgcctcccaaagtgctgggattacaggagtgagtcacggcacccagccccatctcctactctttcagcactaggttttattcttgggattctgctacagccggagcccctgggtgcaagctcctaagctttctgtgagtgtggacccagcaccgtgcctagtagacatacaaaaggagcatggtgacagtgaggtctgttatctccagcataatgactgttttgatccttgtaaaaaaggtgatttttggctgggtgtggtggctcacacctgtgatcccagcactttgggaggctgaggcgggtggatcatttaaggtcaggagttggagaccagcctgggcaacatggtgaaaccacgtctctactaaaaatacaaaaattagctgggcatggtagcgggtgcctgtaatcccagctacttgggaggctgagacaggagaatcacttgaacccaggaggcaaaggttgcagtaagccaagattgcaccactgcactccagcctgggtgacagagcaagacttggtctcagaaaaaaaaaaaaagaaagaaagaaaagtttatatttttgttctaatggttatcttaatatcttcattctataattatatgttttatataattataatagctatataagatataatacccctagtatgttgttttttggatattctactcgttcctgatggttaatttatgtgtcaacttggctaagctctggtgccccgttgtttggtcaaatacttgtcaatatcttgctgggaggttatttcatagatgtgattaacactgacagtcagttgactttaggtaaaacagattacccaccataatatgggtgggccacctccaatcagttgaaggccgtaagaacaaaaactgaggtttcccagagaagcaggaattctgcttcaacactataacacacaaaccctgcctgagtttctggcctgctgactgctctacagatgttaggttccagacttcgagatcaactcttacctgaatttatagcctgctggcttgccctacagattttaaacttgccagtccccaaaatcatgtgagccaattcctaaataaatctctatgtataacctattggtttagtttctctaaaaaracttctatatccagtttcctggwtgttaagtaatactgaaactagctagtaacctcgtgttttttttttttttttttttgagatggagttttgttcttgttgcacaggctggagtacaatagcacgatcttggctcaccgcaacctccacctcctgggttcaagcgattctcctgcctcagcctcctgagtagctgggattacaggcatgcgccaccacacctggctaattttgtatttttggtagagacagggtttctccatgtgggtcaggctggtctcaaactcccgacctcaggtgatctgcccgctttggcctcccaaagtgctgggattacaggcatgaactactgcacccgtctcctagtaatttcttcttttccrtgatgtgtctcttatctctaataatacttttcttcttaaagtctacttcattaaaaatagttatgctgggcatggtggctcatgcctgtaattggcactttgggaggtcaaggtgagtgggtcgctgaagcccaggagttcaagaccagcctgggcaacatggtgagacaaaaagtacaaaaattagctgggtgtggctaatataattctaagttggcacacttgtagtcccagctacttgggaggctgagcggggagaatcgcatgatgctagaagggagagattgctgtgagccaagatcacgtcgctgcactccggcctgggagacagagtgaggctctatctcaaaaaaaaaaaaaaagttatacagctttcttggttagtgcatgcatgatatatttttcattattttccacctttctgtatccttacataaaaggcattgggttttactttatttccaattactttaatttttattgattgtccttttaaaagtaggtgatgatttatttgggttgaaacccaccaccaacttgttttccatgcctattctgtttcttcttatctcctttcacatcttgttttgcatttattatttttattattcaatttcctttttctctattagtttcctaactgtgcagtcttggggttattttaaaagatgacagtagattattttagagcttacaacatgcatccttcacttatcaaagtctaacatgagctagtacttttttttgtttatttgttttttcttgagatagagggagtcttgctctgctgcccaggctggagtgcagtggagcaatcttggttcactgcaacctccacctcttgggttcaagcaattctcctgtctcagtctcctgagtagctgggaccacwggwgtgcaccactatgcccggctaatttttgtattcttttttagtagagacagggtttcaccatgttggccaggctggtcttgaactcctsaccttaagagatctgcttacctcggcgtcctaaagtgttgggattacaggcgtgagccaccacgcccagcctatgagttagtacttctatcctcttcctagtcagtagaagaaccttggaacaggaactaaatttacccccagtgacttatatgctaatatttttgtgtattttaaatatatgtgtgtgcatagatgtatctgtgtgttttttgtgtttttattcttatttatgttgagagtgtagagctatgtaagagtaaagagaattgtgtaatgaagccccgagtatccattcaatttcaacaacaatcttatggccaagctcatttcatgtatactctttcctgcttccctctaccctacattatttcagtgcaaatcccagatatataactttacccatacatatttcagtatgttttattttaagccccacaagatatcattttctatactactataattttataccaataacrttcatttagatttacccacacgtttacctcttctgttacccttttttttttgagacagagtctcgctctgtcgcccaggctggagtgcagtggcacaatctcggctcactgcaagctctgcctcctgggttcacgccattctcctgcttcagcctcccgagtagctgggactacagtcacccgccaccacgcctggctaattttttgtattttttagtagagacgggtttcactgtgttagccaggatggtctcgatctcctaacctcatgatacacccgcctcggcctcccaaagtgctgggattacaggcgtgagccaccacgcctggccaccctttatttttatttataaaaatatctttgggaaaaaatatctttgggcacatggtcaaggatctcctgaggactgtgtcatgggctatatatatattatatatatatatatatattatataatatatattatatatataatatatataatatatatatatataaaatatataatatatattatatatattatatatataatatatataatatatatatataaatatatatatatataatatatattatatatatataaatatataatatatattatatatatatatatatattccatatatatacacacacatatatatatattccactttcactttttttttttttttgagacggtgtcttgctctgtcgcccaggctggagtatagtggcgtgatctcagctcactgcaacttctgcctcccgggttcaagtgattctcctgtctcagccacctgagtagctgggattccaggcatgagccaccacgcctggctaatttttgtattttttttttttgagatggggtctcactgtgtcgcccaggctgragtgcaatggcacgatatctgctcactgcaacctccacctccctggttcaagcagttcccctgcctcagtctcccaagtagctgggattacaacaggcgcatgacaccatgccctgctaatttttttgtatttgtagtagagacagagtttcaccatattcgccagactggtctcaaactcctgacctcaagcartttgcctgccttggcctcccaaagtgctgagattacaggcgtgagtcaccgcgcctggcctttttttttttttttttttgagacggagcctcactctgtcccccaggctggggtgtggtgggaagatctcggcttcctgcaacctccacctgctgggttcaaatgtttcttgtgcctcagcctcccaagtagatgggattacaggtgcccacaaccacacctggctaatttttgtatttttggtagagatggggttttaaccacgttggccaggctggtctcgaactcctgacctcaggtgacctacccaccttggccttccaaagtgatgggattacaggcgtgagccaccactcccagcctccatttttaatagatgacagttctttgataaaattcttatttctttatatccttgaatatagatacaaagtacttattttaaagtacatggtctgccaatttcataatctggagatcctatggacctttttaaaagttgtctgtgctttctcatgagctttgttcctgctgtcttatttccttgtttgcttggttgtttttaatttggcactggagagtatgtataaaaattgttagaggccgggtgcggtggctcacgcttgtaatcccagcactttgggaggccaaggcaggcagatcacgaggtcaggagtacaagaccagcctggccaacacagtgaaaccctgtctctactgaaaatacaaaaattagctctgcgtgatggctggtggctgtaatcccagctacttgggaggctgagacaggagaattgcttgaacccaggaggtgaaggttgcagtgagccgagatcgaggcactgcactccagcctggacaacagagtragatgctgtctcaaataaataaataaataaatataaaataatttgaggcctagggatctgaaattctgggatctcctttatgcatttgagtgactgagatgatttgaagctggatccagtgctcctgagggctgctctatttctagttgactcctagagtaagaaacctgcaccccacgtgtggggcattatggcatcccctccctcagcacatgagtaggtcaacagcactgctctagaccaggtgtggtggctcacgcctatagtcccagctactcaggagactgaggcaggaggattgcttcaggccaagaatttgagaccagccagagcaatatattaggttggtacaaaagtaattgcggtttttgccattaaaagtaatggtgaccctgtctcagaaaaataaaaagcaaaaaaaaaaaaaaaaagagagaaaagaaaaaaagaatccctgatctatttctcagcctcctcttcaggattggccgtcaccttgaggggaatgctggccttgcctgtctccagccctgtacttctctgcctcctatgcctttaagcacatgttttctatttgctgggcttttctagttctctgagggaagtgtggtctgaattacagtctcccattaccaggaagtctgatttacgtttaacagattttttttttttttttgagatggagtctctctccgttgcccaggctggagtgcagtggtacaacctyggctcactgcaagctccgacttccaggttcacaccattctcctgcctcagcctcctgagtagctgggactacaggcacccgccaccatgcccagctaattttttgtatttttaatagagatggggtttcaccgtgttagccaggatggtctcaatctcctgacctcatgatctgcctgcctgggcctcccaaagtgctgggattacaggcatgagccaccgcgcccggccttaacagattatttttttaaaatgtaagggagcaaggccaacgctgrggcctgggtaggaggccattgcaataacccagctgagagaggttggtggcttggaccagtgtggtggagatggaggtagaacctgcatccagagtcactggtgggttggatgtggggaaggaagaaagtgaccaatccaggatggctccagggtgtaggcgctgagcaaaagggggagtggttgtgtcaatttctaagacaacgaggactaggagaggagccatttcgcagggacggttggaaggaaaatcaaaagtacagtttaggtcatggtatgtttgaaatgtttcttagacacccagagtgggtaccttgtgcatagctgggtataagtgtctcragtgtagggagaggactggcggagttaaagtcggggagttaccatcacacaggttgcatctcatgccatgagcctggatggactcacccagggagaagatatagatgcacaaggaccatggaccaagcctggggcccccaacatcaggagaccagggaggtgggacgaaaaccaaagcctggcagggtgggcgaggtgggtgcagggacctggcccattccctcttggggctttggtttccccatctgtaaccatttaccccattttgcccyggaagccaagacarctgactaggctggaagcagacaggttggggaagcaagggtgcactccatttagttaggaagtgaggcctttgtctgggatgggagtttaaagtgttttttcccccagtttgtcatttggctttgtttatggtgttttattcttataaaaattagtgtttatgcctgacttgtttatttcattttctggctttgtgctctctttcctgttccaagattacatgtgtccctgtggtgcccatgtgtgccacgtgtgggcccagagagggacatgtggctcaggagctggggtgggtttgtgtccagatggacatgctaggtcaggacagacacctgagccaaaggagggtgctagggccagaggtcccacggggtgggtgcagggacccaggtccattccctctttgggccttggtttccccatctgcaactggggyttaaatgctggcttctggccgggcacagtggctcacgcctgtaatcccagcactttgggaggccgaggtgagcagatcatctgatgtcgggagtttgagaccagcctgaccaacatggagaaacctcgtctctactaaaaatacaaaattagtcaggcgtggtggtgcatgcctgtaatcccagctactcggcaggctgaagcaggagaatcgcttgaatccgggaggcgaggttgcaatgagccaagatagtgtcattgcactccagcctgggcaagaagattgaaactctgtctcaaaaaaaaaaaaaaaaaaaaaaaaaagctggcttcttgaggtgctggggaggaaggattcctgggtgttagggaagaggttgacctcagtgagctgtgcaggcctgtgccccagggacagggatcatcataatgtaggccaggctgaccagccctcagtgctaaagggcccacctcttgctgcccatggacagatggggaggggtaggccagagcatttattttctttctttcttttcttttctttttttttcttttttgaggcagtcttgctttgttgcccaggctggagtgcagtggcatgatttcagctcactgcaacctctgcctgctgggttcaagcaattctcctgcctcagcctcctgcgtagctgggattacaggtgcccgccatcacattcagctaatttttgtatttttagtagagacggggtttcaccatgttggccaagctggtcttgaactcctgacctcaagtgatctatccgcctcggcctcccaaagtgcagggattataggcatgagccaccacacccagcctaggccagagaatttccataggctcagagtcccaagagaagttttggggtccatcagctcaagccctatgccctgctggcagggaaggatcctgggatcacctgccaaaggccagccttgaagtagttgtggccagagtgtccccagtgagatggggagtggagtcccagggtgggctcctgaggccactgtgagggactgagaggtggccgaggcctcgttctgcctgtagcatatgagctggtgctgctgggaacaatggcaacagaagtactttgcaaactgagaagcaccttgtatatggcaaaggtcagtgtaaatggcatcacactttgcaaccgtagtgtgttgtggacctgtgagcagctggatttkatggggaagcctggttgtgttctgcaacctaatctgckgtttggtggcagccgacgtgccgcctccgtcaccattctccaatgagtgccagctgagcaagcctggtggggaggcagggggaggggagccccacagcgactctgtgccatgtcccctagagccatcctccagcagcagggctcacccgtggatgccaccatcgcggctctggtctgcacyagcgtcgtcaaccctcagagcatgggcctgggcggaggggtcatcttcaccatctacaatgtgacaacaggtgggcccacatgtgaactgccatggggaagatgggcttgtccacaccactgcgtaaccccttctccagccagtcccatcaactcaagcccgtttctgggtgttcttgggccccctgccctgccccatttgcctcagctgtgcaaagcccttgtgtcaactcctgtccctgtgttagcccagagtccatctcataatgcagagatggaaactgaggcctagagcaggccaggggctgtctgcaggrtccatgaccactcacctgccctgccctactccagggaaggtggaggtcatcaatgcccgggagacggtgccggccagccacgccccgagcctgctggaccagtgtgcacaggctctgccactgggcacaggtgacgccccatggaggtcccccactcccaccccccaggccactaggactaatcagaacacccccgcaaaggagcagcgcctcacrgacaggctgtgactccctggcacggggggacacggagcctgtggggaacccccagccccaacctgcagggattgagaaggtcccccttgggaacgggctctctgaggtgatccagggagagggaccaggctggacaaaggcctggagggttcagtggagatgggttggcggggcagggtggggctcctggggccagtttgtgtagggccccttgggcttggccatggactttgtggggagccacaggtgatttgagcagggagggacgtggtcgggtgtgggctccagaaagctcactctggctgctgtaactggggggccacatgtaggggtgatggcaaacctgggaaggcctggaagccacagggttgagagctgggatgtgccatgcaggggcccagtggatcggggtgcccggggagctccgtggctatgccgaggcccaccgccgycatggccgcctgccctgggygcagctgttccagcccaccatcgcgctgctccgaggggggcatgtkgtggcccctgtcctcagccgtttcctgcacaacagcatcctgcggccttccttgcaggcgtcaaccctgcggtgagccccacatggtggccctgggttmctgggttcaaggccatatcctgtctgggcccagtccacaccccagctctgcctcagtccctcttacactggaggattgaccctcggggtgctggccaggacaaagagtacttttcatggcccttccagctccccgtggcagagcctaacttggggttaggctgcggggagtttattgcccaagtgataggactccaaggtgtggatttgggctctgccacccgccctggggccccggcctccttcttcctctctctggcatggcaggagggcttcaactgccactctcacctgccccacccagcccactgacaggccctcccaggagtgagatgacaggccctaggtggacccaggccccactgggaaatttgccttccctggaccagggccatgagctgggtgagtggtgtcagtcccaccacctcctagagaatcagttccccggtgtccaccccagtgcctcgggaccctgggccagggcgccccccactgtagggtcctgaggactccacccatgagagccccggaagagtgtggctgcctctgggacctggccccaccctgaggctccccccaccccccagccagctcttcttcaaygggacagaacccctgaggcctcaggacccactcccatggcctgcactggccaccaccctggagaccgtggccacagagggcgtggaggtcttctacacggggaggctgggccagatgctggtggaggacattgccaaggaaggtcagcctccctgaggttccataccccatccctgctggaggaagagccaagttctgggcactgggggttgagggcaggctccttcccaggccctgagggagtgcaggcagtgcccgggaccccgagaggccatgcacctagctctgccggcccaaggacccctgtggtccaggacctcagagagcagagcctgcgggttagggccagcagaggggcgttaccgatggtcacggcaggtctgggtagccgagctgaccattctcacaggctctcataagccagctccctctcccatcttccctttcytttccccagcctccctgcctctggtctctgtccmcccctccacgcctggccccaaggggccagtcctgaggccactgcctacagacctaccatcatcctgtgtccacaaggcaaaagcatgagtggaatcccattgtgtgacctgacagcagtggctattcctccccgcctcagtttcccatctgttcatggagccctctccttctcatcccagggagccagctgacgctgcaggacctggccaagttccagcccgaggtggtggatgccctggaggtgcccctgggggactataccctgtactcaccaccgccgcctgcagggggtgccattctcagctttatcctcaacgtgctaagaggtaaagcccctgcccagagccctggcgcccaccccctcccccgcacccccggcccccgggaactcagactccaagcccaagcccagccaaggcccagctcagcctcctcctccataaaccgggttcacagatgcacaatatgaagacagagctgtggaaaccaatcaggatggtgggttttagagctggcctccagctcgacccatacgtgaggctttgctgaagggcgtgatatcattcgtccagagtcctcctcccactgggtgaccagtcccagacacagaagcaggtgggctgtgtgggtggtgagctgcctgtcaggggcgtgcacctgggggagcgaagccagcctagcccaaggcagcctgcaggggggttctggcagtgctgaggcctggggctgcctgcgctggcttaatattagwgtcctgtgtctgccattacaaatcaccacaagcttggtggcttaaaataacagaaatgtgtcctctcacagttctggaagccagaagcccgatatctaggtgtccacagggctgcattccattgggggctccaggggagaatctgttctttgccttgttgacctaaataaaaaacagaacaaggctctcaaagaaaatgatgtttgttccagagtaggcatcgcggtaggaatacccatgctagggtaaactatgtgtgtattcagggaggtgaaggaagacaaaagttttcaaagagaaaatgaggaagattatataacttttttgtttacaatcaatgataatttattgtacattttatttttttcattgcattattattattattattattaattattgagacggtgtcttgctctgtcgcctagggtagagcacagtggcacaatctcggttcattgcaaactctgcttcctgggttcaagtgattctcctgactcagcctcccaagtagctgggattacaggcatgggccaccacacgccgctgatttttatcttttctttttttccttttttttttttttctttttagacagagtctcaatctgtcacccaggctagagtgcaatggcacgatctcagctcactgcaacctctgcctcccaggtacaagcaattctcctgcctcagtctcccaagtagctgggattacaggcgcttgccacgacaccgagttaatttttgtatttttggtagagatggggttttgccacgttggtcaggctggtcttgaacttctgatgtcaggtgatccgcccacctcggcatcccaaagtgctgggattacaggcatgagccaccgcgcccagatgatttttatctttttagtagagacggggttttaccatgttggccgggctggtcttgaactcttgaccttaactgacccacttgcctcagcctcccaaagtgctgggattccaggcgtgagccacctctgcctggctattttatttttatttcattagtttttggggaacaagtggtgttcggttgcatggaaaagttatttagtggtgatttcttttttttttctttttttttttgagatggaatctcactctgtggcccaggctggagagcagtggcatgatcttagctcactgcaacctctgcctctgaggttcaagcaattctccagtctcagcctcctgagtagctgggattacaggtgcacgctaccaagcctggttaattaattaattwatttatttattttatttttttagtagagatggggtttcaccatgttggccaggctggtcttaaactcctgacttcaagtgatctgcctgcctcagcctcccaaagtgctggaattacaggcatgagccaccgcatctggtctttagtggtgatttctgagatcttgatgcacccatcacacaagcagtgtacactgtwcctagtgtgtagtcttttatccctcattcccctcccacccttccccttgagttcccagagtccattagagcatttttcttttcctctgagacagagtctcgctctgtcgccaaggctggagtgcaatggtgcgtctcggttcactacaaactctgcctcctgggttcaagcgattttcctgcctcagcctcccacgtagctgggattacaggcgcctgccaccacaactaattttttttttttgtattattagtaaagatggggtttcaccgtgttgaccaggctgctcttgaactcctgacctcaggtgatctgcctgccttggcctcccaaattgctgggattacaggtgtgagccaccatgctgggccccattatatcattccttcttttttctggagatggagttttgctcttgtcacccaggctggagtggagtgcaattgcgcgatctcagctcactgcaacctctgcctcccggttcaagcgattctcctgcctcagcctcccgagtagctaggactacccatgtgtgctaccatgcccggctaatttttgtattattagagacagggtttcatcatgttggccagactgctcttgaactcctgacctcaggtgatccacctgcctcggcctcccaaagtgttgggattataggcataagccaccatgcctggcccattatatcatttttattcctttgcgtcctcatagcttagctttggtatataactgtttcgggcctggcatggtggctcacgcctgtaatcccagcactttgggaggccaaggcaggcggatcatgagttcaggagatcgagaccatcctgcctaacacagtgaaaccctgtctctactaaaaatacaaaaaattagccaggcgtggtggcgggcacctgtagtcccagttgcttgggaggctgaggcaggagaatggtgtgaacccaggagacagagcttgcagtgagctgagatcacaccactgcactccagcctgggcaacagagtgagactctgtctcaaaaaaaaaaaaaactgttttgaaatgatcatccttggctagtaggatgcatggaaaagtgataagggtggcactggacaggccactcatgggcagatgtctttgcagaagtattttttgtgtaagattgtgatggccttcttgtaaggttgtgagctgttgtgtttttgaggcagggtcttgctctgtcacctgggctggagtgcagtggcactgtcaaggctcactgcagcctcaacctcctggactcaagcaatcctctcacctcagcctcccaaagttttgggattacaggcatgagccactgcacccagccgagaacggggcacttgtgcacgagagtcctgtcttcatggcctttccctggctctatttttcagagtttttttttttttgttttgttttttttttttttttttgagacagagtcttgctctgtttactaggctggagtgcagtggtgcaatcctgcctcactgcaacctcctcctcccgggttcaagcaattctccctcctcagcctccctagtagctggggttacaggcacccaccatcatgcctggataatttttgtatttttgtagagatggggtttcaccatgttagtcaggctggtcttgaactcctgacctcagcctcggcctcccaaagtgctgggactacaggtgtgagccactgtggctggctgccgctctattttgaaaattttcacagcctcttcccacttccggtggctgccagcattccttggcttgtggctgcctcactccagtctctgtctccatgatcatactggtttctcctctgctgtgtgtcctctcctctatgtgtctgtcttacaaggacactgtggtcacattcagggcacatctagataatccaggatcatctcctcctctcaaaatctttaacgtactttaggccgggtgtggtggctcatgcctgtaatcccagcactttgggaggctaaggagggtggatcacttgaggtcaggagttggagaccagcctggccaacacagtaaaacaccatctctactaaaaatacaaaaattagccgggcatgatggcctgtgcctgaagtcctagctacttgggaggctgaggcgggagaatcacttcaacccaggaggtggagattgcagtaagctgagatcgtgccacacactccagcctgggtgacagaacaagacttcctctccaaaaaacacaaaaaaggcggggcatgatggcttacgcctgtaatcctagcactttgggaggccaaggcaggcagatcacttgaggccaggagttcrataccagcctgaacaacatggcgaaatcctgtctactaaaaatacaaaaataattagctgtacgtggtggcgaacacatgtagtctcagctactcaggagactaaggaccaagaatcacttgaacccaggaggcagagattgcagtgagctgagactgcgccattgcactccagcctgggcaatagagtgagactctgtctaaaaaaaaaaaaaaaaaaaaaaaaatccttaacttacttttccacttaaggtattagtcactcttgtgctgtataaggtaatatccacaggttttgggaattaggatgtgggtggatctttctgtggtggggggtgggggcaacattcaacccattacatagggtgaccccaaccaacctgtgccccaacctctctccagggttcaacttctcaacagagtctatggccaggcctgaagggagggtgaacgtgtaccaccaccttgtagagacgctcaartttgccarggggcagaggtggaggctgggggaccctcgaagccacccgaagctccaggtgaggttgctgaggttgctgggctggtgggccgtcctcctccctggctcaggacttggcatgaaatgagggtcaggcctggtagggggaagttggagggatatgtatgtggttctaggccagggcagkactgaaagggatcccggggtggcaggtacaggggtcagstgcaggagtggcaccatatctcaaaggacctggagggtgagcagagtctagacctagctgggcttgagggagacctggccacaaggtagaggacagactggaggtggcccccatgggggctgatctcatcctgcccttggttctgcggattctgcctggcccctcactgaccctgccacctgcccacccaccccagaatgcctcccgggacctgctgggggagaccctggcccagctcatccgccaacagatcgatggccggggggaccaccagctcagccactacagcttggccgaggcctggggccacgggacaggcacgtcccatgtgtctgtgctgggggaggatggcagcgccgtggctgccaccagcaccatcaacacaccgtgcgtagggcctgggggaaggcggatggcttcactcctcctctcctagacctgcacacccccagccccatgtcccctcacttgtccccacggggcagcaccttgcttttgccctttttctcctcctctatttcaaaagaggcccccacccctgacatctctggctggaaaggctgctgctggggtggccccgacccaagatttacctgggaatgggtagcctcactcagaagggtgccctgatgtgggggcacaggtgggtctttggggacccctcctgggtggtgccagggagagaatagcggcttcagcatgcttcggggcagctgtaaaacgagggggtcctgcaaagcgtgcagggtaagtggtgtctggtgggagccccgggtcctagcccaggctcttctgcctccacggctgcagctttggagcgatggtgtattcaccayggacaggcatcatcctcaacaacgagctcctggacttatgcgagcgatgcccccggggttccggcaccaccccctcacctggtgagaacaaagcttcccacccrgggtccacaagggccccccaccaggggagaggagggagggggctgggctggggttgcatgctaacccctggatgggtcactgcacttgccaagacgytgtttgctcagcagtgagtggagacagggtgggtggagctcccggaaggtgctggcccccagttccaggcgagcgttccccatcctccatggtgccctccrtcttgatcaacaaagcccaggggtcgaagctagtgattggcggggctggcggggagctcatcatctctgctgtggcccaggtgagtctggggctcctggctcgagtgtctcctctctgggcagcatactgtctgactgtctctggagtggggatgtgagggctgatgtagggtagcagggtgccccctttctmcctgaaaccctcatctctcccccaggccatcatgagcaagctgtggcttggctttgacctgagagcggccattgcagcccccatcctgcatgtcaacagcaagggctgtgtggagtacgagcccaacttcagccaggtgaggctgaggtccgagctggatgcctagggcagagcccactccccaaatccgtgctgctcaaagccacctgggaggaactcagtcactgagattcttaggccaggtacacttcaactttgggggccataggagttggggaccttgatgggtgaggctgtcagtggcctccaggccagttctgtggcctccaagacagagagcagggtattgtctatgctgctcccaggctgaggatctcagcaccttggtctctggtctgtggttgatgccatttttcagaagtgagttttcctggctggggcctctcagactctccctcatggtgactttttccttgtgtgatttgtaactaatatttgcaactttatttgtgaaagaggttgtttttcctgtgacagtctgtaaagtgattttcttctggggcactagggcattggtggtaatttttactatatatataattttttttttttttgagacagcatctcactctgttgcccaggctggagtgcagtgttgcgatcacagctcactacagccttgacatcctgggctcaagtgatccttcctcctcaggctcccaaggaactaggactacaggtgtgtgccaccacacctggatagtttttatttttttgtttttcgtagaaacagggtctctcaccatgttgcctaggctggtcttgaactcctgagctcaagcaatcttcccgccttggcctcccaaaatgctgggattataggcgtgagccaccatgcccagcctacaaacattttttttgattccccacagaagcccatggtgcagctccaggggctgaattcttctggctgactccccctctatccttagacagagactcagcttccttggagcatctttgggttgatggatgccctttgttaggacctatttaaaagattgatagtggccgggcatggtggctcatgcctgtaatcccagcactttgggaggccgaggcgggtggatcacctgaggtcaggacttccaggccagcctggccaacatggtaaaaccctgcctcaactaaaaatacaaaaattagccaggcgtggtggcacacacctgtaatcccagctactcgggaggctgaagcaggagaaacacttgaacccaggaggtagaggttgcagtgagccaagatcgtgacattgcactccagcctgggtgacaagaacaaaactccatctcaaaaaaaaaaaaaaaaaaaaaaaagattgatagcagctgaggttccagatcgtcaaagctgcctctcctgttatgagacttcttcggtctcaagtccaccttccaaagcccttagaacctgagaaccatggccttagtccaggaacagagtgtagtcccaagagccttagttttcagaccttgagactaaggacctcagcctgttaggctcaaactcttggagtttgcaggcctccctccgyatgtagggtccttcgcatgacaggaagaccctctcagggctctcgggttccagggatcttagatatggaggatttcaagatccagggcacatcctttggagccctcctcccttgactctttttttatttttatttttttagacagtctcactctgtcactcaggctggagtgcagtggcatgatcttgcctcaccacaacctccgcttcccaggttcaagcaattctcctgcctcagcctctgagtagctgggactacacatgtgcgccaccacacctggctaatttttgtatttttagtaaagatggggtttccccatgttggccaggctggtcttgagctcccaatctcaagtgatctgtccaccttggcctcccaaagtgctgggcttataggcatgagccactgtgcctggccctcccttgactctttttttttcttttttttgagacggagtctcgctctgttgcccaggctggcgtgcagtggcacgatcttggctcactgcaagctctgcctcccgagttcacgccattcccctgcctcatcctcccgcctcatcctcccaagtagctgggactacaggcacccaccaccacgctcggctaattttttgtatttttagtagagacagggtttcaccgtgttagccaggatggtctcgatctcctgaccttgtgatccgcccgccttggcctcccaaagtgctgggattataggcgtgagccaccgcgcccggcccctcccttgactcttgactgaaggacctttgtctttgtgaacatcaattctcaggacctttcaccctggggacgtgaaatgctgagaatttgggagatgacagtctggggactgggattaatggaatccagtgacccacaaacctaaggttctcagctcccttggggagttggaatgtcagctattcaggtctagggctttccatggagtaaatcctaaactctgggttggagactttaagcctccaaggaccttcacagctaaggcccagggactagggcgaggagagtctttgatcctcagagtcttggagtttggccagtggactctgaggaatggagtctctgagcactgaaggtccaactttggcttcagcagtaaaggatcttggccttcaagtctaaggacagtgggcaattagtaggtcaggcatggggaactcatagccaaacgtgcagggctccaaagacctcatttgccctgtcagcagctcaggccatgtggcatcacccgatgcatctagatgtctccggaatctcaggccctgcagggtgaggttctcgggccattagttttttttgttttgttttgttttgtttttttggcttgttgttgttgagacaaagtttcactctgtcacccaggctggagtgcagtggcgcgatctcagcttattgcaacctccacctcctgggttcaagcaattctcatgtctcagcctcccaagtagctgggattacaagtgtgtgccaccaagcctggctaatttttgtatttttagcagaaacagcgtttctccatgttggccaggctggtctcaaactcctgacctcaggtgatctgcccaccttggcctcccaaagtgctgggattacaggcatgaccaccgcgcctggctagggagcagtgtttttaaggacaacttggcgggttgggggaagccaatgagccaggagtgctgataggtcagggatgaaatcatagggagttggctgcgcgcggtggctcccgcctacaatcccagcactttgggaggctgaggtgggtggttcacctgaggtcaggagaccagcctggccaacatggcgaaaacctgtctctactaaaattacaaaaattagctgggcaaagtggcaggcatctgtaatcccagctactggggaggctgaggcaagagaatcacttgaacctgggaggggaagttgcagtgagccaaggtcgtgccattgcacgccagcatgggtgacasagcgggactccatctcagaaacagacacacacaaaaaacccctggaaatcatagaatcatagggagttgaagctttcttcttgagctgagtccgttcctgggtgggggccacaaggtcagatgagccagttwatygatctggatggtgccagctgatccatcaagtgcagggtctgcaawatttctcaagcactgatcttaagagcagtttagggagggtcagaatctttagccttcagctgcrtgactcctaaaccataatttctaatcttgtgkctaatgtgagtcctacgaaggcagtctggtgcccaggcaagaaggaagtctgctttgggaaagggctgttaccgtctttgttttaaactataaactaagtttctctcaaagttagttcagcctacacccaggaatgaacaaggacaactgggaggttagaagcaagatggagtcgattaagttagatctctttccctgtctcagtcataattttgcaaaggcggtttcagtcttgctsttttgcccaggctggagtgcagtgtcatgatcaaagctcactgcagcctcaaactcctagcctcaagggatcctcctgcttcagcctcctgagtrgctgggactataagcacagggccaccacayccgactaattttttcttttttcttttcttttattttttaataaagacgtgatcttgctacattgcccaggctggtcttgaactcctgagctcaaaagatcctcctgcgccggcctcccaaagtgctgggattacaggtgtgagccaccacgcccagcccaatttttgattttcttttagagacggtgtcttgctttgttgccctggctgttctcaaactcctggcctcaagtgatcctgccaccttggctcccaagtggctaagactgtaggtatgtgccaccacgcctggcttttttttatttcttattttttattttttagaaacaggatcttgctgcattgcccaggctggtctcaaactcctggcctcaagtgatcctccttcctcagcctcccaaattgctggcattacaggtgtgaaccactgtgtctggcctcagtgtctaaatcttgagaagccacatcctccatcgaaggccccctgaactcagatttgcacctcaaggccctggtgtccttggatccagaacagacatgaacttgcatttggaggtcttcgggcctgggtggtgtccttcgtacatagtccctggaggctgagcttgtcctctatgggcctttggatctcttccatgctcccatctggtcctcccctcttcctgtgtcttcaggccctcttcctctccgtcttgccttttgatcatttttctcatttcttgcagaggcctctccctcctggagatgggctgagctgccctcccctgtgaacctgctttctctcctctccaggaggtgcagaggggactccaagaccgtggccagaaccagacccagaggcccttcttcctgaacgtggtccaggctgtgtcccaggagggggcctgtgtgtacgccgtctcggacctgaggaagagtggggaggccgcaggctactaagacactgctctgcccagagctgaagtctggccccaccatgagtcctgtgtccaggccggacatggctgggggaccaactactctggcaggatctggacccctggcaggggagtccagctgagagtggaagaggtggcggggaccagctgggcagatgagaggctgagcctcatccctaaccccctttcccagagcccctggtggtcctgaaccggcccctctatccctccgyaggcctcttgcctggggccactctcccaccctctcgatctgtatatcctccagtccaagattaaagrggcggactgtggcctgattccatggttctaagtggggaggggaccctcggacagtgcacagaggggtgcatgcaccaggctcctatggctctccacattccaccaccatggaggtggggaaactgatgctcgcggaccagccgaacctcagccaggccacccctggacagagacaagcaccacctctgcctcccaacacctcaccactctggtggccaggactcagcagcgtgactggccccagacctgagagctggttaactgaaaaatcacacaattcacaaatttggaaaagagacttttttctttcttctttcctttcattttttctttctttcttttttctttgagatggggtcttgctctgtcattcaggctggagtgcagtggtgcaatcacggctcactgcaccctcaacctcctgggctcaagccatcctcctgcctcagcctcccaagtagctgggactacgggtgtgcaacaccacacctggccaatttttaaaattttttttgtagagacagggtctcgctatgttgcccaggctggtcttgaactcctggtctcaagccatcctccctcctcggccttccaaagtgctgggattaaggtgtgagccactatgcccgacaagactttcttttttttttttccttcaacttgtgttttgagttcaggggcccatacgtaggatgtgcaagtttgttacatagataaacatgtgccttggtggtttgttgcagagatcaacccatcacctaggtattaagctcagcatccattagctattcttcctgaagctctcccccatcccccaacttactttctttttttttttttttctgtgaaacaaagtctcactctgttgcccaagctggagtgcagtggcaaaatctcagctcactgcaacttctgcctcccagcttcaagcgattctcctgcctcagcctcctgagtagctgggattacaggtgcgtgccaccacactcggctcattttgtattttttgtggagatggggtttcaccatgtagccaggttcatcttgaaatcctgacttcaagtgatccgcctgccttgtcctcccaaagtgctgggattacaggtgtgagccacagcggcaactttatttttcataaagggttacagactgcagggtggccatccgccactttcaaaagcatagcctctggcagagaccagagacaggcacttcttttttttttcgagatggagtctcgctctcttgcccaggctggagtgcagtggcacgatctcggctcactgcaagctccacctcccaggttcacgccattctcctgcctcagcctcccgagtagctgggactgcaggcgcccgccaccacgcccggctaattttttttgtatttttagtagagacggggtttcactgtgttaggcaggatggtctcgatctcctgatctcgtgatccggagataggcacttctaaggaggagaggttggggcaggagctgtatgctgaaggggttggctaaacatacatattcaacatgttacagggagagctatgaatattcatgaaggcagtcttgacacatgtgtattgaacgaacatgcatgtaacataggactcatgtttgctgtaggatgaagacggtggagacttaacattaaaatgtattacaaggtcaggcacggtagctcacgcctataatcctagcactttgtggagccgaggcgggtggatcacatgaggtcaggagttcaagagcagcctggccaacatggtgaaaccccaactctactaaaaatataaaaattagccgggcacagtggcgggcgcctgtaatcccagctactcaggaggccaaggcagaagaattgcttgaactcaggaggcggaggttgcagtgagccaagatggtgccactggactccagcctgggcaacagagtgagactccatctcaataaaataaataaaataaaataaaatgtattacaattaggccccatctgtcaaaacatcttttcagggcctgaaggcctgcaagtgagcaacttctgaaaaccagccagagccagttcatggtcaatggtctcttatcaggagaaagttactgaaatcagtctcttgtccagtcggagctgtagttatgcctggaaaaacagggggtcaataagttggcatccgtgagctggatgagctgcaaagtgtattaatgttgcttcaggccggtgcttgttgctgctggaggaaaaggaaagcctcattgctgttagaacatagtttattctttaagtgcagggtccatgaattaacccctgcctggcttggccttgggtcctctttataatttggtatcttgttgccacagagtctgttctgtcattttttttgagacagggtctggctctgtcacccaggctggaatgcagtggcatgatcttggctcactgcagccttcacctccctggcttaagccatcttctcaactcagcctctcaggtagctgggactacaggcacaaaccaccatgcacgctgccgtgctcagctaatttttttttttttgagacagggtctcactttatcacccaggctggtgtggagtggtgcagtctcagcccactgcagcctcgacctcctgggctcaagcaatcctcccacctcaggcccccaagtagctgggagtacaggtgtgtgtcaccacatccggctgattttttgctttttttgtaaagatggggtttcaccatgttgcccaggctggtctcaaactcctggcttcaagcaatcttcctgcttcggcctcccaaagtgctgggattacaggtgtgagtcactgcgcttggtcctcatccatgtttcgaatgaaatgattctttgttgtggggggctgtccccacactgtaggatgttgagcagcatcccgtgcctcagcctgtgtgatgcagtagcactccccaccgcacacacccactcatgacaaccaaaactgtctcaagacagtgccacatccccctggttgagaatggccgctctaaaccaacaggcccctaacttccataaatagctttgccagctgcagggtgggtacgtggtgctctctggggatctcactagagggatctgggactcctgcgcctcactggttcctaggaacatcggctgttcctccatcaccccaaatgtgccacagaggttgttttagtctgcctgggctgccataacaaaaatactggaaagtgggtggcttatagcattttccagaaatttattgctcacagctctggaggctgggaagtccaagatcaaggtactggcagatttgatgtcctgtgagggcccatgtcctcatacatggcaccttctaactgacatagtggaagaagctagctagctctctggggtctcttttatttaattactttagagacagggtctcactctgtcaccaaggctggagtacaatggcgtgatcatagctcactcctgtacccaagagatcttcctgcctcagcctcctcagtagctgggactgtaggtgcagcccactatgcctggcttctggggtctcttttatagggcactaatcccattcatgagggctctaccctcatgacctaaccacatcccaaaggccccacctgctaacgctatcacattggtgattagctttcaacacgtgaattttgggggcatagtgggtccacctggatggtccaggataatctccccatctcaaaaaattgaatcacatcttcaaagtcacttttgccatataaggtctaatcttgggttctagggattgggatgtggatatatttggaggttgtatgtgggagaggggctggatggggctaattcctaatctgggcttgactgcatggctggaagaggtggtctggcagactaggaggaaggtctgggagcaaaacatggctcactttgagatgagggggccaagccggcccaccacttgggcagacctgccatcatcaccgactctcgtgggccgctgtcagaattcaggcagatgcgagaccaccagcttctcctgcgatctggctttgggaggcagtggaagacagatctttgaaagcagcacggctgggtcaggggtccagggagcagaactggtgggtttagagagaagggagtctctggagtgcttcagtgtggtgggatccagaggccgaactcacaccgtcagggccctccgtgtggtagcctcctgctagataggctcccaggccatgatctcaatggcttcagctgaacttcacgccctgcagggtgacagagcttctctccttgcagtttaaacaaagtcccagatccagctctcaatggggcccctctgagcagtcttcatgggcaggggagggctgaggagaagtggttggctcaggtctgtggggccaccttgagagctgttggtagcagccacctgtcccaaaccctgtggaccaaaaaggaaaagggaaccaaaggaggagaaggctgctaggcacaaacctcaggtgccccacggtgggaacctggctctgtgctcccagaccacacctgcgcctgggccggggtgctgggaggctgcctggagcttgcttgggaaggcctggccagtctctcccatcagtgcctcccagtggcacccaaagagcatgataactttgtccctgtgtgtcggggagaggaaaaggggctcctgttccccccagcaggggtgcaaccctggctctgtggtgcctgattctgactcacctgcagagtgagggtgcactccctggacccttggccaccctgggactgccacccacctgagaaggctcattcactacttgtgaactgatggatctccatgtcggctttggccgagctgtttggagtctcagacccacatacccgagcaaccacctccagagcatctggacaaggtgcacaggcaccttggactcaaagtgccaaatggaagtcggccctgaggcagctggaagctctgcggtgcctgcctcgcctccctcctgcgctactcgtagaacccccctcttccctccagctgtgtggttcagccctgactccacctccttctctcttttccatctttttgctgctggcaccaccacagtctactccccactcctaatgcaataagctttggaaaatgcacatctgaccctgcctggaggtagtgcagagacttccttggttcctgaggccctggaggaagcccattcctctccctccctgctcatcccaccctgggagacttgcccaggccctgcccctacatccattctgcaccaccagcagtgccagccagtgtgcattcccagcccagccagagactcttacagctggcttttgaaacatcttgttacacagaggaaatcaataccaaaagggcgacatcttcaactaacactgtaatcaatacagatctgacccttcaggatacagctaatgcagggctcggaggaaaattcatttgcttaaatattacataaaaaataagaatcaaaataaataggccaggtgcggtggctcatgcctgcaatcccagcactttgggaggccaaggcaggtggattacttgaggtcagaagttcaagaccagcctggctaacatggtgaaaccccgtctctactaaaaatacaaaaaaattagccaggtgtggtggcgggcacctgtgatcgcagctgattgggaggctgagggaggataattgcttgaacctgggaggcagaggttgcagtgagctgagatcgtgccactgcactgcagcctgggtgacagagcgagactctgtctcaaaaacaaacaggccaggcgctgtggctcatgcctgtaaccccagcactttgggaggccaaggcaggcggatcacgaggtcaggagttcaagaccagcctggccagcatggtgaaaccccatctctactaaaaaaaaaaaattaccaggcatggtggcgtgtgcctgtagtcccaggtactcgggaagttgaggcaggagaatcgcttgaacccgggag

SEQ ID NO: 96046 - DNA, 15840 bp, Homo sapiens
ggagccgcgggatcgtggagcacggaaagtcagagcttggcgtgaggaaaggagtggggagtggtccctggggaaaagattcggggtcactgtcggggaggcggagcagggacagggccggacccctggcccaccaacctcccctcgccccgtgctgcccggcccacgcttacgtccgcaggtttgcccaggatggaggcagcggcggcgcagagtcgtttctccagccccgcgggcactcggttggcgggcaaattcgtgtccagctccaggaacggcatggcgggcagaggaacggaaacagctctggcggaagaaaagctgggggtacccaaggctcgcggaccagggaggaggggcgaggcgccacagcaacctggcttctcattggctggacagagactcggcgctccccgattggctgcctagggtacctcccgcttctgcaaacaaaagtcacgtgtgccggctgatttccggaagtcccatcgtctccgccctacgtgtagccccacccactacaggtctttaacccggtagtggacccaccctgtctcccccgaccctcctgcctggcgccaggtgggtttccctctcaagcttccgcgctgtggtcgcccggttcctagccctattagaggtctgaacaccacacccccgacacacaaggacacacacacacctataggggtcttccccaggctcgaccctaataaccaatacaacgggagcttaaagtttttttgaatgatttgccaccatttcgaagtcaggcaatttcatgttcagtatggaaatctgcgcttgggcagtcaggagatgtggttactcgcgggggcgcgggtagggctaggctcacgacaatacctgtccctgcctggtccccattgacatctgcctgtgtagcctcttgtgccggtggtgagccactgtccaccagggggtggcaaaatatgttctttaaaacatggaaaggccgggcacggtagctcacgcctgtaatcccagcactttgcgaggtccaggcgggcggatcacctgaggtcaggagtttgagaccagcctggccaacatgacgaaaccccgtctctactaaagatacaaaaattagccgggcgtggtggcagacgttgtaatcccagctgctcgggaggctgaggcaggagaatcgcttgaaccggggaggtggaggttgcagtgagccgagatcgcgccattgcactccagcctgggtgacagagcgagactccatctcgaaaaaacatcagaaaacatggaactctgttggcgtggcttaaacatgagtgtggtcagtgtggcaaaatcacttgaattgtacattacaaatatgactgaagttgtggtcgagcaatgtggctcacacctgtaatctcagcactttgggaggctaagaagggaggattgcttgagcccaggagttaaagatcaggctaggcaacatagcaagattctcttctttattttctacaaaaaaaaaaaaaaaaagaaagaaatctgggtgctgtggtgtgtgcctgtagtcctagctacctgggcggctgaggcaggaggattgcttgagcgcaggagatctaggctgcagggagctatgactgtgccactgcactccaccctagatgacagagtgagacccaggctcccccctcccccacaaaaaagaaagaaaaaatttgcaagtttatatgtacaatttcaactacgtgtataaaattctctataagtgtgcatacttaaaggagcctccactgaaaggccgacagagtctctgtctgtcatgatcttgtcctattagcagtttgtttattagatgactcagatatcagaaggtctgagacacacgacaggtaaatatgacagtcctaaggggagagggcagggacaggtggcaagtctgggaccaggtgtggggcatggacaagccagtggtccgggagtggggtgtagagaagactgtggtcaaggttatgaggaggcatgggagagggccaggaaataaccagggacttcccttcctgcaaggaggttcatgaaccagccctgcaccccacttgtggaacacaacatcgccccacagtgaggagagagaccgaggagaccaaggctgatcctgattcagacatctttccaccaggtcacccctcatcgatgatacatgctcagtccgggggtatcccccgcaaggaaacactggggctgaggagcccagagaggtcgcctgacctggactggggctggggaggtcagggaagtctccctggagaagagacagggtgccaaatgccaaaagaccaggaagggcaccaggcgaagatgaggagggaacagcatgagcggaggccaagaggccaaggtgggagcccagagaggggttaggagtgtgcaggcagaaggggccacctggaggagtgggagcaaggccttgaatgcaaagttcaatgacttgtactttagcttctgggcagtgaggaaccatacaaagttccacacagaaggtcagggtcaagtaagcgtttgcccaagctcttttcagaggtcacatggaagctagaatggaatggggtaggagacaaaaggaatgcaggcatgatatctggaggaactgtggaccagagcctttgcagatatgtcttctcttcaaccaaggagacggacagctccatgtctttattctaccaacacagcatcccctcagtggctcagcaagtgtgggacacgcactcacagcaagaaaagctgcattaaggtcttcagattctctttaacagcaggttctactggaggcaggtccttggccttcaggacagctgggagggcctcctggaagaggtcctcccgcactgcagcctccacgtgttgggcaccatgctgccaccgtgggtccgctttcaaagactcagcagccagcactgatgggctaggggaagacagagtcagcggaggggctgggcatagccaagtgtaaggcagcatgacctgctttaggggttctctgattggattttccctcctccaccatgtgtgtgatgggctaggatgtccccctccctggggacacttggaagcctcttaatatagctgcggtgaggggtttgtaaagccccattttatagatgaggacactgaggctcagaaggagaagtgactcacacagggtcccacagccagaaaagacaacatgagctgggatgtcagctcccttcccggatacaccactgcccagcgggccaccgcaccccatggcactctcatgcctcagctccgtgattgccaccaagccagccacagagatacggggcccagtaaggaaggcctggtcccgcaggaacttgtcctcgagcagctgcaggcatccgtccagctcagccaaagtggccgccaacatctcgggtggcactgactcgcccaggaacacagggattattatctggtgggccgacaggcagagagaggggtcagggtctgcccaaagcccatcctggttcccaccatcatcctatcatcaccagtccttgggatttctgctcacctctgctcacttctttccactcatagccaccagtagctctcatctcctactcaaacagggacagcctcccccttctccctgggtcctcacacaaggcaaccagtgggatccttctgtaatctcaatctgcccgtaccctctcttgcataaagccttccatggctccccactgccctcatgagaaaggcctcaacacaaagccagccttctccagtgcggtagccatcccctccccacttttcacctcacctcctactaccccccacttatcaaacgggaatgtgtgtatgaatcctccctggaatctggttacagtttatgctcccaatcagtaaggtcagagtggggcctgagcctctgcatttccaacaagctccctggtgatgctgatactcccagtccattgaccacactttggataggaagagtctacacttgctctactcaacttctctccattctgtcctcaaacacaccacgcttccttccccaccagctggagggggctctgctcccaggccccagaggtcaaggcagacacagttaaggtgtggaaacctccttattgcccgatggatcctccagagaggcggtcccttactttcagcagggcgcgtgtctacctgtttcatgctgtctcacacacagggtgccacccctgtgctgggcactgggtaagtgctctgtacatattaattaggagtactcatttcaaaaatatgtgtgcctttgataaataaaaacagtatgtgcatgttgtgttggtgtgtgcttccttgattattactgaagttaaacatgttttcatccatgtattgaccatttctctttgtccttcaatgaaacctctgctgatttccttcgctcatttttttcctgtgtcttcgtctgatgagtttctcttctttttgtttgttcgtttgtttgttttgagacagtctcgctcagtggcccggctggagtgcagtggtatgatctcagctcactgaaacctctgcctccaaggttcaagtgattctcctgtctcagcctcccgagtgtgccaccgcacccagctaatttttgtatttttagtagagacggggcttcaccgtgttgcccaggctggtctcaaactcctgacctcaactgatccgcccatctctgcctcccaaagtacagggattacaggcgtgaaccaccacaccccacctgtctgatgggtttctaagaacatcttaaaggacattacttccttctgacgtatcttttaccgagatccttcccagttttttgcttaaggttaatccattttttcctccacaaagtaaccttgtatatgtattggttttttctttgttgagttctcccactgttctgaggcttagaaagtcctttcatacccagacatcagagaaacagatcccgtgagagtaactgggattgcaggtgtgggccagcatgccctgttatcactccctttctctgagtcagcttttctctctcagtctcgtctactcctcgaactcaggaaatgtcactacaggtggccccagctcccgtttacctccccatagggagctcctctctccagttccagtttcaaaactcccaaggaagcattctggttcactcgcttgggccactggccagagggatgggatactctgaaagattcagctagagtcccgggcccagccctggaccatcactgtgccccctggtgagatgccagggctgggattcagggagaagaaaggaggttcccggacagtcattcctgcctcccgcggctgcgggctccctgcccccatcctgtgcacgaagtgggagctcccgctgtctggcagctcccgctgtctggcagcagctgctctgcaggggacagtctggacggcagaaagttcatccttgaccccagccttccagtcaaggttcccaccagtttgggacacctgcaagtgtcacatcccactgggtgaaactctaagatcccttttagaggatcccattcgctccctcccttccgccaccatgcagcgccgagaaacagagctctgaacgaaccctcagatgtccgtgcgctggggcctttccaggacggcggcgcccagtcgtttctgggtcagggcgacgcctggaactgggcagggtccctggcaccgggatcccgaaaagcagacctgcttctccctgtccagccggttccccttccccttgcagtcggccccctgcatccgcgtcctccctgccagtcgagggtccccagctccaactccaccctcccagctgtgcgttcatagcgaccgccctccctgtagggacgcacggatctggtggtggagtcttggccggcaggactggacaggaaccgaaggggcgaggcgggtccgggggtggtgcgctccaattgggtgctgtccccagggggtggggcctgatcccctatttcccggcgcgccgggatcctgccacagctgctgcccacaccgcgctcagcgccttcactgccatccccgctgtccttgccgcccccgccatgggcctagagctgtttcttgacctggtgtcccagcccagccgcgccgtctacatcttcgccaagaagaatggcatccccttagagctgcgcaccgtggatttggtcaaaggtgggcccagcccgtttccccgcgtgtccacaaacccagtgcacccccaggcccccgccctgctctgccctgagcgtctcgccgcccgcacagccccctcacctcctcctgcagcgtctgccaccagagaatgctgtggactgagtggccttgaagggatcacagcctctctgaaccttagcttgccttctgaaaaggaggataaygttaccttctgctctgtagggatggaaagaaaatactgaatggagttgacagagttcttgcgtggaatgcacgcatataaattcacaaagcccagaagacctygggaagaaggacatrctgttgtgagaattaagagatgggaagagatgagccaccccagtttgcctcccctcccctggcccaccagagtccggctagaaaacttctctttatccacctgctgcacctggccccacccaccaaarccccccagctgccccggaatgtggcagggcagggaggcccagccagggagtgaggctgatccaggcctctagtcccagaccttgctgtttctcagggctgtggggctccgcttggggaggaggagggagggtgtagaggtgcagcgtttttactctgaagaccttttctgacttcttcctcttcagggcagcacaagagcaaggagttcttgcagatcaacagcctggggaaactgccgacgctcaaggatggtgatttcatcttgacygaaaggtgccctccttccctcacccctcaccgcatccggagcccatgtgaccttggctctccccactggccccgggccccagtggccctcccataccccatggggcagcgagggaggggaaaggcgagggatctggccgggcgcggtggctcacgcctgtcatcccggcacttcgggaggccaaggcgggcggatcacgaggtcaggagaccgagaccatcctggctaacaccgtgaaacaccgtctctactaaaaatggaaaaaaagttaaccgggcgtggtggcgggcgcctgtagtcccagctactctggaggctgaggcaggagaatggtgtgaacccaggaggcggagcttgcagtgtgctgagatcgcgccactgcactccagcctgggcgacagagctagactccgtctcaaaaaggccgggcgcggtggytyacgcctgtaatcccagcactttgggaggccgaggtgggcggatcacgaggtcaggagatcgagaccatcctggstaacacggtgaaaccctgtctctactaaaaatacaaaacattagcagggcgtggtggcggccgcctgtagtcccagctactggggaggctgaggcaggagaatggcgtgaacycaggaggcggagcttgcaatgagcagagrtcgcgccactgcactccagcctgggtgacagagggagcccactccagcctgggcgacagagggagactccgtctcaaaaaaaaaaggaaagaaagaaaggagaggtatctggggagaaggtacagcttggggtgtgwccgggatgagcaggggctgacagaacatgtccccccasctctcatcttcagccttttctgagccgcagggcctctccactcccagactgaagggtattagaagagaagacaagggaacatttttccactgttgcgcatttgttcaacaaatgctagctgaaaagagcctctagtgacttgtcgcagactacccaatctacccaggccgggcctagaggccaatgccatggcccaagggcacagctcatggtgaggtccagctgctgggcaggaaaaggacaagaggtcaggtggctgcagargtgatggctgggggcctgtcagacgggggccaaagacattcctcccctcgtgatccctgacccaagcgcgtggacatgcaagggactccacggagcatccactgtgtgccagccccatgcagggttccaggggtccagggagcctattctgagctgcaccgcctcggacaagtcacttgaccattctgaccttgagttttctcttgtgctaaaaggctaacaggagtstctacctcacagggcggctgctggcatatcacagagatgagrttctcaaaatgcaaagcagaaggtccagccaagagtcggtgcccaaggcaacaaagacaggaggagactcgtaggaggagkgggtggtgttggggagctggagatggagggcgaggctggagggcagtccttcaaatgcagagaagcccccgggccccactggcagatgggagcagttaggggtaaatgcctggtgccagtgtccttatagccactgcccatttgttcccagctyggccatcctgatttacctgagctgtaagtaccagacgccggaccactggtatccatctgacctgcaggctcgtgcccgtgttcatgagtacctgggctggcatgccgactgcatccgtggcacctttggtatacccctgtgggtccaggtgaggagagccatctggagagtgattggccatcagrgagtagttggcagtaggycggggccatagactgacccactstctgcccccatcagrtgttggggccmctcattggggtccaggtgcccraggagaaggtggaacgcaacaggactgccatrgaccaggccctgcaatggctggaggacaagttcctgggggacaggcccttcctcgctggccagcaggtgacactggctgatctcatggccctggaggagctgatgcaggtgtgagctcagcctgtgggcagtgtccctcttcgtgtcacacccatgaggcagacagaaacactgaggcctggagaaagccagaactttgcccagaatcatagagcaagtctctggatgatctggggccagaaccctgaacttctgcctcctgcctgggtgtggggtctcaccctggctgctcttgggctctaaggctgaacatactgcctgggcccctgtggtccattcacttaggggctggggaatggaccatgtctctgatacttctgcccatggttccagcattcgggtcggcagtgacaactgggaaagttgtatgcccacaactttttcatccttgtccctacagccggtggctctcggctatgaactgtttgagggacggccacgactggcagcatggcgtggaygagtggaggctttcctgggtgctgagctatgccaggaggcccacagcatcatcttgagcatcctggaacaggcggccaagaaaaccctcccaacaccctcaccagaggcctatcaggctatgctgcttcgaatcrccaggatcccctgaagggtctgggatgggggccaggagattagcaacaaggattcattctgttacttacttgcccctttttatctttccctcttgccccagtcccttctctccagcttcatgtgaagctctgcacagacaagacactcagtgtccttggcagtgctkctactcctcaggtgcagcatacataaccagtaagagactaaatctgcaatatataaagagctcctacaaatcagtaacatgaagaacactcaaaaattggcaaatgtcatcagtgttttaaacagaataaagattccaaacactttgaatagagaaccaagagttattggttttactacattgttgtgttatacatatggagtaaaagtatgtgctagtaatcctcatcatggttaataacaaagtaacctcacaataacgagtcaacataattgtatcaccagggcaacaaaatgttaagtaagtaaccaattcgaattgcaaactgttaaaggatataggcgatgtttcacggggcatagcaacggtctttgaagtctaggaaacttaaaagatttcttttaacaagcattcatgtcttctaggacagttttgtaataactgcaaatagtaagattatacattgtcacacagacctccatgtatatccatgggatggaccccaccacaatgattttaacggagagaacttgatataaagaattggtaaccaggcattagagaactccgaagacagagagaatccagattaacacggaggtaaacactgcaagaagctaccacccctagggctgggggatcaagggaggaattaggaagaccaagatgctggaggggccctgaagaattcaaacctccaagaaaggtgttgctcatcccccctagtatcaccttccaagaagggcaggtttccccagtttgccctgaggtcttcacaggaggtcatgtggctgtggatgcagttctcaaatgtgacagtagatgtcactgccgaccaataaacaggatgttccagacacactctgggctacctgcccacatgtcttgtggccttacggccccccatttcccaagcctgccctgtgcccatcatgtgccactctatcgggggacctgccccaataatcacgtaggttctttcctatttttcctaaccgtcagccggcttgagaaataaagggagagagtacaaaagagagaaattgtaaagctgggcatccgggggagacgtcacacgttggtaggatccgtgatgccccacaagccacaaaaaccagcaagtttttattagggattttcaaaaggggagggagtgtgcgaacaggtgtgagtgacagacatcaagtacttaagagggtaatagaatatcacaaggcaagtggaggcagggcaagatcacaggaccacaggaccgaggcaaaattaaaattgctaatgaagtttcgggcaccattgtcattgataacatcttatcaggagacagggttttgagaccaactggtctgaccaaaatttattaggtgggaatttcctcttcctaataagcctgggagtgctatgggagactggagtatatttcatctctgcagtctcgaccataagagacaggccacgcccaggggtgctgtttataagctgatacctcctggtgcgtattctctttctcagggacgttccatgctgagaaaaagaattcagcgatatttctcctatttgcttttgaaagaagagaactatggctctgttccgcctggctcaccagcagtcagagtttaaggttatctctcttattccctgaacaattgctgttatcctgttcttttttcaaggtgcccacatttcatattgctcaaacacacatcctgtacaatgtgtgcagttaatgcaattattacagggtcctgaggccatatacatcctccttggttgacaggattaagagattaaagtaaagacaggcataggaaatcacaacggtattgattggggaagtgataagtgtccatgaaatctttacaatttatgtttagagattgcagtaaagacaggcataagaaattataaaagtattaatttggggaactaataaatgtccataaaatcttcacaatccacgtttttctgtcatggcttcagccggtccctctgtttggggtccctgacttcccgcaacaccactcctagccggaagtattccaagtaaccattgcaactgtcctgccttaagggtgcctggtggtggcttctgtcttaggtcccattctggctctctcttccagtgatttctcatactttgggggacactctggcctgctttcctgggccttttccattaccaccccctctccccatcaggcactggggatggcggccacagcctgtgccttcttgatccatgctggctgccttgggattgttccttattggatggttttgctttcaacagacactccaataaagtacacgaaataaagaataaagttaaacagtcagtcctagtgctgtgtaggtggcagtaagtctgggagagcgacctcagctgaactaaccatgctgtgcatcattgtcaagcgggaccagcaggatcctcaggtcacctggcagcaggggcagggaagggtccctagaagtgatcttgagttgcacttagtgctcttggcagagggaagggctcgggctagcgctggaggcatgaagatggggtgtgttcagggctctccagcagtccaggcatgggaaggggacgctgagggccaaaggctraggtgacactgggaaaggaactataggaaggtaaggactggctttcggccatgtgactgaattgcctgtgtgtggtgtgtgtgtatgtgtgcgaatgtcagtgaactgtgtgtgtgaacgtgagtgaattgtgtgactgtgtttatgtgtgggtgtatatgtgtgtgatgtgagtgaactgtgtgtatgtgggtgtatatgtgtgtgatgtgagtgaactgtgtgtatgtaggtgtatatgtgtgtgtgtgagtgaatgtgtgtaagtaggtgtatatgtgtgtgaatttgaatggtgtgtaaatgtgactgagcagtgtgaatttgtgtatgtgggtgtagtgtgtgaatgagtgaactgtgtgattttgttggtgtgaattgtgtgcctgtgtgtgtgaggtgtatgtgtgtgtgtgggagtgaactgtgtgatgactttgtattaatgtcagtgaatggtgtggttgtgtatgtgggtgtatatgtgtgtgtatgtatgtgaattgtgtgtggggttggtgtgtatgtgtgtcaatgtgagtgagttgtgtgactttgttgaatatgagtgagttgtgtgattgtgtgggtgtatatgtgtgtataggagttaactgtgtgactgtgtgtaaatgttatgattgtgtgtgtgggtgtatatgtgtgaatgtgatacatcgtgtgactgtgggtggacgtgggtagatgtgtgtgtgagtgtggctgtgtgtcgaacagtgtgtgagtgtaagtgtgcaggtggtagctgtggaattaaggcacattaggggaatccttccttggctctggtccttggtttccctcctatgaaacaagttgggtgaattaggcagtctctggcattccaggatttggtctcaggtctaaacaggattttgtaaagtgaaagcagcatcccttgggcatcccgggaggtgtccctgccctccatggctcaccgtctgccacatggcccagcagcagctactctgcagggccatgtgctgccatgacaggtactgatccccatgggcgcgggcctgcaggtcctggaggtaccagtggtcaggtgctttgtacatgcagctcatatagagcaagctagccacactggggggacatggcaggggcagaagacatgccctgaacactcttcaaccgttttctggggcattttcactatccccatgatgcagaggagggatgtgaggctcagagaggttaggtaactacccagggtcacacagccctacacggggccagactgtcatctcaactaagggcagcaaggaagaaacaaaatgtcatgaacttcagcaggggctcagggaaggcttccaggaggaaggggcacccagtgtgagtctgaagaacgagagcatgttggatatctccccaacatatccaaagcgtggacagggccaggagcaaggccagcagggacagagccttccaggtgacatggcagcattgcttcccaccctgtcccaactcccgttcacctatggtgaagggttgtgcagtctgaccctcagagctcatcatgcctttatgggtgttggaccatccagtgatcccaggctctgaatgtgaatccagctccaccaaggaggcactatgtggcctcggtaaaggacgccaccatgcggccaccaacctggaggctggttttggctttcatttttcccacccacctccaacccttcagcaaaccctgcagttagatttcaataaaagtcagaactgaccacaatcccccacaaccctgcaccaccaccaccttggtctggggctccagcgctgcatgccagatgactgcagtggctttctcacccctgccagggggatcctttacgacgtaagtcagatcacagttctcctctgctcaaaactctccaacgactcaatccacctgcggtaagagccaaagccttcccagtgtcccatgctcccctctgtcgtgacctccygctcttcctgctcactgcacccaccctggcccgttgctctccagtctgaaccccatgcattgtcccacctggagccttcgccctcactcttccctccagtgagaacacccttcycctcatgccttgcacattcctacagctctctgctcagatgccacytcctycagggagtcttccctcagcatcctactcataatgacacacacccccactcttaccctgtttattttttccatggcatccatcaacatccgatatgttccatgtttacatgggttactgtcagctcccccttctattaatggaatgtgagctccatgaggagaaggacgcagacacgttcactgctcaagccccagggcttaaatggggtctggccctggtggatgtttagcaaatagccactgaagctcgctgagtggtccctcgactctccagggaaacagcacttgccccacaggatttgtgggcaaaatggtagcactaagatgcctggtacagccgctcctcgaaacttagcactctccttttttcggaggggaaggctggcggtgaggaggcccggaagcagactgggccctgtggccttgtgcaagtccctcccctcctccagcctcagtttcctcacttgtacaatgcaggaggggacttctataacccttgtcaacactgggcacctctgcctgcctccacccattcttcamcctggggctggtgcagggcccacagtccatgatccaagccatcaacagtgaacagacagccgactggccccacaaggcccggcagcagcccacggaccggttacctctcagccaaggtgaagtccccatccttcaaggcccggcaccttcctcagggggttcacctgggcaaaggcatcgctgtgctgctggcctgcaggaaagatcagagaggtgagtggggataacccagagttctctgaggtctctgcccacccccaccccaaaatcccagcagcagctttctgaggcccctatctgggaggcatcagggaagaggaagcctctctgctagtcactgggtcacagaccttgaccccatcagagggccatctttcctgtgtccagctccttgaagcatggctcaaggacaattccctggagctgtaattcacaccccacccccagccagttccatccataggtcagacccctccagcctcctccctgggctctaggcttgccccctctgattcagcttcctatcccagctggggacttaggccctactggccaggctgggtgacctgtcaataccccagagtcccagccaaacatgttcccaaccctcagaccaacctcattcttgctgggaatccctgccccattcagctacttagcctccggtggctcagctcttcttgctttcttatgccaaactctcaaggctccctccccagtgggggttcccaggtctgactcactttagcactctaggccagtgctagaggccgcattaggtgcctggtgtttggatcagaggacctcagtcaagccaggctccagtctgatcataggcctacatgtgggcctctttgcccttctactgaatggacatacacacccctgcccattctccctccacagactgcttctgtgtccagcccctgtts

SEQ ID NO: 96047 - DNA, 22436 bp, Homo sapiens
caaaaagaactgattccagagttgggtcagagaaaacacaagatgagcctggaacaccttgtggtgtgccataaagtaagtgcttgaaggaaaaaaaaaaaaatgagggccagttgataggccacagaagctaacctgaaggagatcctaactaaatagccaatgctggaacagtaagcaacaaaataatgatgataatgaattttaactcatagaatataatacatatccatggcctacactgacacataaataatcaaataaataaataaaagagagagagggtagttctcctttcagtagaacttgacttaataatgtagaaggaaagagagaaataattacctttaggcaaacaccacaaagatctgcagatggatgctaaagtcagggagcaaatttgtggagaacgagaatttgtgtcctctcaatgtatctctcccaagagacttattaattagaaagggatagtaattttatggtgtagaaacctggtagacaccaagtaaaccaatagatcaaggtaaatatcaccagtaataagacattccaatatcttggactccatgtgatgcactgagaaagacacaaagataatgtgtctttgtgttctggccaacaatgcataatctcaccccaatcattagaaaacactggacaaacctttaaattgagagacgttagacaaaataactgatcactactctttaaaagcatcaaagccaaggaaaacaagaaaagactaaggaagtgttatggaccaaggagaaataactaaatgcaacatgggatcttggatagggtcctggaatgaaaacacaaccttaatttaaaaaatggtaacattcatatcacatctgtaatgtagttaataatactgtaccaacactagatttctgttcttgataattgtatgattatgtaagatgttaacattagggaaagcagggtgaaggacataacagagcgttttgtattgttgcaatttttctctaaatctaaaattagtttaaaaagcttaaaaagaggccgggcatggtggctcacgcctataatcccagcacttttggaggccgaggcgggcggatcatgaggtcaggagatcaagaccatcctggctaacacggtgaaactccgtctctactaaaaaatacaaaaaactagcagggtatggtgagaggcgcctgtagtcccagctactagggaggctgaggcaggagaatggcgtgaacccaggcggcggagcttgcagtgaggcgagatcgcaccactgcactccagcctgggccacaggcgagactccatctcaaaaaaaaaaaaaaaaaaagcttaaaaagaaataaccattttgattatatatttatcatctgtaagcaatgtgaggatggtaaccatttatgtattgttcaccataaatccaagaaactcactaaaaggagcttttaaaaaaaaaaaagctattgaggccgggcgcggtgtctgacgcctgtaatcccaacactttcagaggccgaggcgggtggatcacctgaggtcaggagtttgagagcagcctgaccaatacggtgaaaccccgtctctactaaaaatacaaaaattagccaagcatggtggcgggtgtctgtagtcccagctactcgggaggccgagacaggagaactgcttgaacccgggaggcggagattgcagtgagccgagatcatgccactgcactccagcctgggcgacagaccaaggctccgtcacacacacacacaaaaaagctattgaataatcatgaaaaagaaaaatatctattcatttctgactcccagcccagcagctgcatttcctcagatagcagcacattcaccaggcttattagtctaagctaataagtttccaaaccccttagaatatagtttccatggcctcagaacacgataaagagtagcacaccttcagacctcagcaccctgatccagagtgataactggggatgtttcctggcctggaaggtgggaagcctatgtcttaagctcagtggtggcagtgccctggctgtgtgactgacttgacatagatgtcagtctctcagtctgtttcccctcatgtatgaggctttgtactagatgagggttctgcaagctaaccagcccaccctttttgtacagcccacgagcaaagaatggtttttacattttttcatatttgggaaaaaaaatcatgacacgtgaaaattatattaacaatatataaaattaaaacttcggtccctataattaaaattttattgcgacgcagctagtctgttatgtattgtctttggctgtatccacactacatcgctacagttaagtagacagagtatggaccccccaagcctaaactactattatgaatactattatactcattatacttacaatataacaatgtaaacactgatatatttacaacaaaagtttgccgaccgctgaacgagactgttctaagcatattctatttctaaccacaataatcacatagaaagaatcttagccacatggaatccgacggtcccacacttataacctgtaataacccaggtcctgaagagttaagtgactcccaaagccacttgtgcagataccttgggaatgccaggtgagttccatctggccagggcccgcctcttgcggggaggcagtgaagcagaacggtcaaaattttcagtctggagtcgcgctcacccactgggtgacttggagcaaatcatttcacctacccgcggcctcagtttccacccctgtaaatggcaccaataacaacactcacctcgcagggctgctgtgaaggtgaagcgaaaggtcgcgagtaaagggttagcgcgctgggctttgcacccagcagacgccaaatcaatggtggctcctgcggttactgggaacctccccggaggccggaacccattctaggcacctcagggcggcggcgagagccatgaagaggctcgcgaggcagccaggaagcccggcctcggtttccctgactggggctctaaagctgcccgcgaaacccccagcttcctcacgtaacccagcctcgcgcctgcagcccctccggcctgtgccccgggctctgctgagcctcacccccaccccggcaccgccttcaaaccagccttccaggaactcaccaggcgtctccacagcaacggccagtctgtcccgaccaccgcgccgtccggctgcgcgcctgacaacaaggcgtgctcccattggctccggtgccggttgtgccagccaatcagcgggggcgcacgcgccgctcgctctccgcgggctgcttagctggggccctgcagacggctacccttgggcggcgcgcgcgcgcgtgcgcgcgtgtgtgcgcgtgtgtgcgcgcgtgcgcgtgtgcgtgtgcgtgtgcgtgtgtgtgtgtgtgtgtgtgtgtgtgtgtgtgtgtgtgtgtgttgcgggagtggagcttgttgtttccggatccccgtcgtcagtcctagcgtgctggaggcttagagcaccagctcgtagtcggactctcttctccacagcttgcaccctgagcagtcactaaatgatgggctgtgtgttattacctgggacatgtgctctgaaaacagtggaaacttggggaacacttagagcggggtgtccaatcttttggtttccctgggccacgttggaagaattgttttgggccacacataaaatacactaacactaaggatagctgataagttaataaataaataaataataaaaataaaaatcaccaaaaaatctcaaaatgttgtaagaaagtttatgaatttgtgttgagccgcattcaaagccaagcagaccagcgcgttggagaaacttgacttagagggaaccagggaggaggagcatcctcattcattatattacctgtgcctctctttccaaaaaggatgtgaagcccaaaaggaacagatacaataggatattgaaacaaaaggaaaaaaaggaacaaaacctagtaaatgaacaagaagaggggtcatgggtggtgtcagaattccagagatgaaaaaaggcgacagagttgaaggggttctgtcaagggtcttgggctgaaagatggtactctcttgggagctagaataacaataaagcattgtagggaagaactttacactgtggttgaattcatagctgcttgagtcttgcacagatgattcaaataggagtgaatgttgggggctttttaacctcaaagacagtaacagcatggtgaaaaactcagttcagtacaataaagctatactgataagctagaagttctgaaaattgttgagtcaccaaccttgactttgagtattggggtaaacagtatttggggggtaaacagaagcataaacagatggtttcaaagctgcatggataaccttcagcctcggatacagcttccactcaagccttatcatgaaagatgcgctggagagaaacagttgaaaataggtgggaagggtggtccaagcagcaagaaagttgtgtggggaaggtccggaggtgagaaacatgcagatcatgctggagtgtcatgcagcacagtgttaccgtgaggcaaagctcagggccacagtggggagagagcactctggagagttaggaagaggccagtccaaacaagcaagcagaaaacatattgttgcagtcttgcccgtgcaccacaatgtaccagtctctcattgtggggtatcacccagaattctttgtctcacgaccaagaaaattagggagtgtggacacaaagggtaaggttgaagcaaaagtttaataagcaaatgaagaaagctcattgcagctggcggggggcccaagcaggttgcccattatgaggctgggtcagggggttttatggactgggaaaggaaggaatgtactgactggtcttggagaaagcactactcagcttggcccctggaccttgagggaccaatcaggagctgaagtgatagcctggcccaggaccaatcagaggctcacattctaaagcacgtccaagaaaggaaagtgcccactggaacccactgtagcccaccgtgtacatgtccacaaaaggagaagagactatttcctggaagcccactggttatacaaaggacaaaggcatttctatgctgggtcttgttcccttatcaaagtagctgtgggcatgccttaggcacaaagatcaaaggtgtttctgtgttgggcattgttcctttatctgagtgagccagaggtttgtgcaagtttccttatctgtgcctgaagcctgatttttcaggctgttcctctgtttaaaggagttttaccaaggacccaccttaattacctaacttttctctctcaatatcactctcactacactgaggatggcagatttaacatggggaatctatatcaaagactgtggccttatggtcttggtgagagttaggcctgaatcccatccatggtgaccgcaacgattcatttatatccaatgcaagcattccctgaggcactctgggaagcaggacaccatgaaacacactggcagaggaatgagtgcaaaatacttgggtcaggggtccaggggaaggaactccaaggtctagctatcaatgaaagtccttagcagtggttaggtacaaacacaccaggcacaggcatattccattagaaattgattttattaactacatagactgcacagactgaaaatctgaatttggtgtttcactggtacgctaaagataaggatcatcaaaggtttatgcagggaaacagtgaccaccacggtgtccaagggtcattagaggaaaattctgcatggaacatgtggaaagctacagaaatggagactccctataggctcccccacaccacccctacatactttgacattcaacagactgataggatatttagataagagggtggggacctcattcattcagtttcaatgcagtttcggcgctgacattgcatttccaggtttggcattctgggacatgggttttacaaggtgcctagctacagagaattatcagcaagagttaacagagaagatgaagttctctgcccaggaatgcccagagaaagtccctgaagacaaatctgccctgtgctctggcccactacagcagactatggacaggaaacagctcagaactagtggagaagggctgagcaactcctggaggtccagaattctggggagggcaggtgagaggagcagcaatggggcttgagctcttcctggacctgacacactatccacttttgcaagacagaatgacatcccttttgagctgtggatggtggagttggcttggggtgagccaggtggctgggctgggccccatggagtgggtgccaaggaccaggccctacactgagccttctckcctttctgcccaccaagggagcacctgaagcctgagttcctgaaggtgaaccccctggggaaggtgcctgccctcagagatggcgacttcctactagcaaagaggtaatggtgacctggtgcccacccagggtcagagccaggatctgcctgggttctggggctcagagttgtagggggaggcagaggcgagaggggagatctttccttggcttggagatctttccaaatcactgaggccccttcctcatttcagcctgtgtagctccgatgcagaggctggacccaggggcacctttgggctaaagctggaggctggaacctggctagagtctgagccagctggagctgcccaggtggggaaaggacgtaggtcacccggataaacctggacaacctgaagccagcgggcaaggcccaggcttgaggctggctcctccccaaatgtccccagctcatcctttcagagtcctaggagctgggcagacccaggggagactccacattcaatcccagctcaccacttcctcaatccatgcccttggggaaatcacagaactttgtgtgccaggtttctcctctgtaaaacggagtgggaggaataatgtatccacctcccagggcttacctgaggatagaaaatgggcacctagtgttctggggcactaggaagggaacttggagaccttttgggcagggcccacacggcaggcactctgagtggggaccctgatgccagggagtggggcctgggcacagagggcaggatggtatggtaactgggaggggaggtggaaacatgggcccagggaggatcagagttggaaatggagaaacagagtggtttggtcgtggggagatactgcctggagggagttgcagtataggggaggtcctcccctgaaggtgaaggtggggagaaaacctggtcaaatcaccctgagtatgagcaatgaagccacctggccctgacaggctggagaaaagatctctgacaccccctgcccacagcatggtcatcgttttatacctgagtcgaaagtaccagatacggggacactggtacccacctgagctgcaagcccgcacctgcgtggatgagtacttggcgtggaagcatgtcaccatccagctgcctgccaccaatgtctacctgtgcaaggtgagcttcctaggccctgtcatgcaggctggggcaggggcctggacccccagagatggaaggcaccagttggtacatattacatattagcttcacttccactgtcctcagcagacataactaatctatcacagtactccttcccctaagcctgaatgaatccttagaaaccttctgaacacagagccccagaggacatcactaatgagtggcagccgggaagggatggagaggaggcccaagaggcttccaagagtctgggttaagttgctcctctcctcmcagcccagtctctcctgccccacttctccrgacagcctgcagatgctgcacagctggagcggctgttggggaggctgatgccagccctgcagcacctggatkggggggtgctggtggccaggcccttcctggcaatggagcagatctccctggaagacttggtgctgacggaggtgatgcaggtgaagctttcctacccacctgccctctggggggactctgggcatggggctgagccccaaccccagctgccctgtcttcccagcccactgccgttggctgcgacctcttccaagactgccccggctggcagtgtggcaggcccgtgtggcggctgcccttggtactgagctcttgctggaggcccacaagctcatactccagcctctgaaccacagtgaggcttggcgggacccccagctggcccagaagcaggtgcagtgggtgcagcccactccactgcaccctgctgtctgcaataaacacactgcatgctcttcgcttgtctccaggcttactctgtcaccagaagtggggtcagtcccatttctcagcctagacctattagatcacagcatagagtgagtggcactcagtcctctacgtggggctctagttaccttccttggccaccaggtacacagtctggccactgcagccccaaccaaggccaggaagtttctaggctcctctgtgtggcacacaccggctgagtgccccctgacttcctggtggtggtgtccccattgctcccaaagctcacagtttcctgtgtctctttctcccagttcctttctagtcatagttcaggctygattcacctgtgtctctttctcccaattcctttctagtcatagttcaggctcgatttacctgtggatactcccagcctctacttctagaatcctccagggataattctcattgcctcctcttcattctggaccctgcaaagcccctttcgtcaggttctgcaatgaaaatccagccgtgggaattcccaggcataatcccttctcagactggtgtctgtgaggtggcaccacggggcacaggcacacgtggaagggggagagtagggtcacggctgccacacctttgccacgggcctctccccagcctactcctgggcctccttagaatccttgatgctgtgagaattgcaggcttcctggccttatgacaacacaaagggaaacaagaggtttccctggggaacacaggatcctgggcccagatcggagagggcacagggccagggactctggccagacataggcccaggtctgtggctggccaactgcggctgtggggcctggcatgtgtctcaacatggcactggagctctacatggacctgctgtcagcaccctgccgtgccgtctacatcttctcgaagaagcatgacatccagttcaactttcagtttgtggatctgctgaaaggtcaactcccactgctgcctggcaggcctggtcctggggggaggcaggacacacagattgcggcttttctttttttcttgttttttgatggagtctcgctctgttgcccagcatggagtacggtggtgctatctcggctcactgcaacytctgctgggttcaagtgcgtctcctgcctcagcctcccragtagctgggattagaggtgcatgccaccacgcccagctaattttttgtatttttaacaggggtttcaccatgttggccaggctggtctcaaactcctgacctcaagtgatctgcccacctcagcctccagagtgctgggattacaggcgtgagccaccgcgcacagcctgataggggcrtttctgaggagcagrgacagagacaagggaatcaccccagaggtccacagggaaggaaaagatgccacgcggcttgtaggctgcatccttgtccagcctaccttagtcagtgctcactaatgacagtccccacgccacagatgaacaggcttttcgaggagaagggggaaggaacagtagctgggactccctgggctcccaccaggcaccctggcttccttgtgggattctaggaccttgtgaactcagcacctgcccaccaggttggcaaagggggcagaagtgcacagtccgtctacacccatcctccccagtgttsagaaaggctcagggctccactaaccctgagtgagggtcagaggggtgggctccaactccatccccagcacagagggactccaaaagctcagcctgcaaaagcagaagcctctagaacacagaggaagagacagggaagctgtggaaatgaacgggctgcgagtggagcccccagaaatgtttccaactggaggcggctggtccaggaagagtttcagttcctgcccccacctcaggttccctgttaagatgaccctgattgtgtccragaagcttccctttggatgtccagctgtgtgctgggcctggcttccttaaagtggagacagagtgagagcgatgggattgcggatgggacccaggccctcagggcttcaggtgattcaaaggctgtgttttcagatccagctttgggggtgggcactggaggcctccggcttctgggtaaaagggtcgtcctggtcctgggacacaggtaggaggcacgggagtcaccaaacctagggtggagcaggctgggagccagcagttctgatcgcagtccggttctgcaactgccttgccctgtgacctggggtgagacgcaatgtccctccgggcctcagttccctcttcttgagaaaatagagagggaggcgtttgggtctctgggagtctcagttctctctcccctggagtcccacagcctcagaccttccctgcccctcccaggtcaccaccacagcaaaggatacattgacatcaaccccctcaggaagctgcccagcctcaaagatgggaaatttatcttaagtgaaaggtaagtcttccctggggcccttgcaccatctgtctctgcttctcctgggaggttcagtgcaagcatttgtctgtttgaccatggaaaatctcacacgtgcactaaaggagagtgaatactaactaatgagggacacgaggaaccccacaaatccatcgcccagctctgactcttgccaacttggggtccagtttacatcatttctattcccctgcctcccagacaccccatcattccattcataaatgtttagaagccagctcatgcctgtaattctagcactttgagaggctgaagtgaggggatggcctgagctcacgtgttcaagaccagcctagcctagacaacatggcaaaaccccatctctacaaaaaatacaaaaattagccagcatggtggtctgcacctgtagtcccagctactcgggaggctgaggcggaaagactgcttgagccaggaggcagaggatgcagtgagccaagactgcgtcgttgcacttcagcgtgggcaacagagtgagatcccatctcaaaaataaaaataaataagtmaataaatcaataaatgtttaggaacatacttttcagagataagagttcttaaaacaaacaaaaaaaaagcaacaggctgggtgtggtggctcatgcctataatccsagcacttccagaggctgacacgggaggatcgcttgaggccaggaagttcagaactgcagtgaactctgattgcgccactgcactccagcctgggctaggatagagcgtagcatcactacgataccattaagatacctcataaaattaacaataattcctggatttcatctaatatgtggctcctsttcaaaactctatgattatctcctaaacattttcttggcagtttgtttggatcaggatccaaagaagtttttttttttttttttttttgagacggagtctcgctctgttgcccaggctggagtgcagtggcgctatcttggctcactgcaagctccgcctcccgggttcacgccattctcctgcctcagcctcctgagtagctgggactacaggtgcccgccaccatgcctggctaatttttttgtatttttagtagagacggggtttcactgtgttaaccaggatggtctcgatctcctgaccccatgatccccccgcctcggcctcccagagtgctgggattacaggcgtgagccaccgtgcccagccaagaagttctgagtcttgcagccagttgctgtctctcctgccactttttaaccgatagctctctccatgccctgacctttttaccttggcatggttgctgctggtgatgataaaggagcccttgtgctgcggaggttcccacaccagccatcaatcagcaaggcctaggacatcccctccgaagcatgtctcccctccatccccttccctctgtccccatggcctccaacatycccagacaccacaaccttcccgatagttgctggccccctcattgtccattctgccccctcgggctcaccctccatccagcaccagagagatggatcctttcatgccctggcttatataatgcctaatcttaagcattaagtccataacctccctgcacctccaggggctaccctmcgtggactccacagtgtctctggctgcctcatcactccccaatcacccccacccttcttccagttgcaaccccctactctcttttcttcagatttaccttgctccctttaccctcgtatttcagcatgtgtttttctttgttggttttttgagacagagtcttgctctgtggcccaggctggagtacagtggcacaatcttggctcactacaacctctgcctcccaggttcaagtgactcccgtgcctcagcttcccaagtagctgggattacaggtgtgtgccaccacaactagctaatttttgtattttcattttagtagagacagggtttcaccatgttggccaggctggtctccaactcctggcctcaagggatctgcccccattggcctcccaaagtgccgggattacaggtgtgagccatcgtgccccccsgtttttgtttttgaaaaaggatcttgatctttcacccaagctggagtgcagtggtgtgatcttggctcacagtagccccaaattcctgggatcaagtgatcctcccacctcagcatcccaattcaacacgtgttgttccccctgctggcctactctttgttataccaccagcccccaactcctactcaccccgcagggctccttcccagcccttactgactgtcagacagacagctctggtgaaggtctttctcggggccgtttgggctcctctttgctctggaagccccagcagttgggcccaggccacaccggggtggttgaygtagtggcactcaggaaggcaagggcagtgcccctgaccggccccttctgcagcgcggccatcctttactacctgtgccgcaagtacagcgcaccatcgcactggtgcccgccagacccgcacgcacgtgcccgtgtggatgagttcgtggcttggcaacacacggcctttcagctgcccatgaagaagatagtctggctcaaggtgagcagggccacttctggggcttggggacacgggcacagggaagtcaggaaggctggaggccagttctggccctgctgactgccggcgacctcaagcaagtctccctccctctctgggcctcatttcctcagctccttctcctgcccgccttacagagccgtcaggagtgtggactgaaacaatgggcatgaaagagtcttattagggcgaggggaagggcatacgggaggggctgatgtgactcacccaggacagcattcgaggcatttcattctgaactagagaatctcagcgtcaaaaggcccacagaaggccaggagcagtgctcacgmctgtaatcccartactttgggaggccgaggcaggtggatcacttgaggtcaggagttcaagacctacctgtccaacattgtgaaacactgtctgtactaaaaatacaaaaaaaattagctggtgtggtggtgggcacctgtaatcccagctgctcaggaggctgaggcaggagaatcgcttaaaccagggaagtggatgttgcagtgagccgagatcatgccactgcactccagcctgggtgacaaagtgagattccatctcaaaaaaaaaaaaaaaaatggctcatagaaaatttgaagatggccgggcacagtggctcatgcctgtaatcccagcactttgggaggccgaggtgggcggatcacaaggtcaggacttcaataacagcctggccaacagggtgaaaccccatctctactaaaaatataaaagttacccaggcatgctggcatgtgcctgtaatccacgctactccaaaggctgaggcaggagaatttcttgaacccagcaggcggaggttgcagtgaggtaagatcccgccactgcactccagcatgggcaacagagtgagactccgtctcaaaaaaaaaaaaaaaaaaaaaaaaagaagaaaaaagaaaattggaagatgacaaataaccagtacacgtgtctctacttcaaattccatgcctgtgaccggcatcactaatcaatcacaggacttatgcctgctgagctccccaaatccttgtgaacgcatggttcccggcaccttccaccaatcagaactgctaaaagaggtgaaactgctttatatcctgggaagtgttcaatatctatccagcagacaagagtacagagacctggcagggcaggtggccctggagtacagcctcctcttccctcctcttcccaaccctggccagttgctgatcccaaagataacagggraggaagtttcagctgagaagatggagcatgcagtggaagaggtgaagaacagcctgcagctcttygaggagwattttctgcasgataagatgttcatcaccgggaaccaaatctcactggctgacytggtggccgtggtrgagatgatgcaggtgtggagtggrttggaggagggktagaccctgggcagaggtaggactcctctgtgaccaatggggccatcacttgargataggctggtgaggygggaaaggcargcagagctgycatgggggctgcgggaaccaggcctggggscctggactcaatcggggcaacaggaagcacagaatgtyatgaatcaggaaggatcacagttctccacacttgacaaagattcttcggtgtgggaggacccggagggtgagcctgggatagagaagaacactgcatttcctgctcaatccaccagcatcccagatacctcctcctcttgctggactctccaggaaatgttcactggcttcctgggtgtccttctggccctgcctgtttcccagagctccagacagacagctctggaggacagctctcgtggctgggtctgaggggcatccactgtgcatttggaggcacacctgagtgtggggcatttatgtggcctctacatgcaggggagggtgaccagttctgcttgtcaagacactggccagggtctcaactggccatcctgcacaccagctagggcactgcacactgaccaaagagactaatttgcatatcagccagagatatgccmggaggaggsacctgggrtcctggtggattgaccaggaaatacagtgttcttttccctattgcagagatctctggttgatacgaaaattagtctctttggtctgtttgcagggcagaccagcaccaggaaaaatcattctggcctgccccaagggttcagccatatacttcgtccccaccccttacatttcaccaacgacccacccmttctttgscttcccaaagatcttgggtgcaaacsgaactacagggtasactgtcttagtgagccagccaaactgcagggtagactgcccgccaggtctcccatcytagcccctgagcttgatcatagtgggagtctaaacatggaggaaaaaacctgagttctctccctcatccgcatatacacacctgggataaggggtttccctggaagaaggcaggattcatgcgagrtcgcagsctggagaagtgggagctgcctgggccaggagccctctcagtgtggttcagaaggcttggagcaagaagaccagtgactgaggactctgagggattctggatcctccatccccacctacatctattacatagtctgtgaccccttgctcaggccttgggggtcagcagcctaattctttccataggtagatgttagggacgtgggccagaggctgtgggagaggacccaggtggggctggtccccaggctgaccacatcttcgtctttgtctatcyacagcccatggcagccaactataatgtcttcctcaacagctccaagctagctgagtggcgtatgcgggtggagctgaatattggctstggcctctttagggaggcccatgatcgactaatgcagttggccgactgggacttttcaacaytggatccaatggtcacgaggaaaatctgtgagtttcgggagaagtacttgtgaccctaatcgcagcccatcctgcagggcctggctggctcaatgatctgagccaccttccttaaaggaaatgctaaaaaaacaactgttctttgcctaataaagaactggaacaacatcacagctgctgagcaacagacagttggcgtatgcatagggtctgatgtggaagtgggtggtggttacagatccttccagtttccaaaaagaattttaaaagtaaagggttaaatatgattacgttgtcagtaataatagttggtgacttcaatacctgacttttttttttttttttttttttttttgagatggagtctcactctgtcactcaggctggagtgcagtggtgcgatctcagctcactgcaacatccacctcccaggttcaagcaatcctcctgcctcagcctcctgagtagctgggattacaggcacatgccgccatgcccagctaatttttttctgtattttagtagagacagggtttcattgcattgcccaggctggtctcgaactcctgagctcaggcaaatcgcccgcctcagcctcccaaagtgctgagccaccctgaatccccaaagggattcggggcgtgagccaccacacctggcccccactttcagtaatagaaaaactgcagaagaccatcaaggaaatagaggacttgaaaagcactgtaaaccaattgcacacactagacatgaacagaacgttctacccgacaggagcagaataagcattcttctaaagagcacatggaatattctccagtatagagcatatatttggtcctaagtctcaaatttaagaagattgaaatcatacaaagggtgttctctggacacagtggaataaagtttaaaatcaagaacaaaaggaaaactagaaaactcacaagcacatagaaattaaacggcacactcttaaacaaccaatgggtcaaagacaaaaccacaagggaaattaaaaagtatcttgaatgaataaaaatgaaaacacaacatgcccaaatttataggatgcagcagaagcagtgctaagagcaaaatttatagctgtaaacacctaagttaaagaagaacaatcttcaatcaataacctaactttacaccttaaggaactagaaaaataagagcaaaataaacccaacaccaatagaagacaggaaataataaagattagaatggagataaatgaaatggaaaacagaaaaacaatagagaaaatcaaagaaaccaaaaattggatctttgaaaagatcaacaaaacttggcaaacctttagttagaatagccaagtgaaaaaataagactcaaattattcaccaagaaagtggaggatgggtgcaatggctcacacctgtaatcccaggactttgggaggccgaggcaggaggatcatttgaggccaagagattgagaccagcctgggcaacatagtgagacttgtttctacaaaaagagttatttattttttttaattagctaggaggcaaggcccagtggttcatgcctgtaatcccagcactttgggaggctgagacgggcggatcacctgatatcaggagtttcagaccagcctggccaacatggtgaaacaccatctctagtaaaaataaaaaactagctgggcatggtggcaggcgcctgtaatcccagctactcgggaggctgaggcaggagaatcgcttgaacccaagaagcagagttgcagtgagccaagatcacactgctgcactccaccctgggtgacaagagcaaaatttcgtctcaaaaaaaaaaaagaaagaaaaaattagctgagtgtgttggtgcgcgcctgtagtcctagcaaattgggtggctaaggtgggaggatcactttagcccaggaattcaaggttacattgagctgtgattgcaccactgcactctagtctgggtaacataggaaaaccttatatcaaaaaaaaaaacaaaaaaaacaaaaaccaaaaaaccagacaccagaaagaaagaaaatggacacatcactactggtattagagaagtacaaaggtttataaagaaatactatgaataattgtatgtgaacaaatgagataacctcgatgaaatgagaaaattttagaaacatgcaatctaccaaaacggacttaagaaggaagataaaatttgaatagacctgtaaaagtaaagatattaaaatattaatttttttaaaatcctaccaaaaagccgggcgcggtggctcatgcctgtaatcccagcactttgggaggctgaggtgggcggatcacgaggtcaggagatcaagaccatcctggctaatgcagtgaaaccccatctctactaaaaatacaaaaaaattagatggggcgtggtggtgggcacctgtagtcccagctactcgggaggctgaggcaggagaatggtgtgaaccaggaaggcggagcttgcagtgagccgagatcgcaccactgcactccagcctgggtgacagagcgagactccgtctcaaaaaataaatcaataaatcaataaatgaaatccctacaaagaaaagtccaggaccagatagcttcactggtgaattcaaccaaaagcttgaagaattaacaccaacccttcaaaaactcttctaaaaaatagaacaggaagaaatatttttcaactcattctatgaggccagcattaccctgataccaaagacagaaaaacacattataagaaaataaagttacaaagcaatatccttataaatatagatgtaaatatcctcagcaaaatattagcaaatcaaattcagcagcatattaagaggattatacacattgaccaggtaggatttatcccaggagtacaaatgtggttcaatgtacaaaaaccaatccatatagcacttcatattaatagaaagtcacatgatcatcctaatgcagagaaggcatttgacaaaatctaacatccttttatgataaaattactcaacagatgaagactagaaaggaacttcctcagcctgacaaagagcatctatgaaaaacctataaacaccatacttcattccttgtgaaagattgagtgtttcccctcaagatcaagagcaggacaagaatgttcattcatactacttctatttattagggcaattaggcaagaaaaaggaacaaggtggaatccagatcggaaagaaagaagtaaaactatctttagtcacagatgacattataggaactcctaaggaactcacttaaaaaccattagagctcataagcaagttcagcaaggttgcaggatacaagattaatacacaaaaatcaatagtatacatttgcagtaaaggatcaaaaacaaaattaaaacaacactttcatttacaatagcatcaaaaagaataaaatacttagaataactttaaccaaagaaaagcaacacttaaacacagcaaactacaatgtgctgttgaaagaaattaaagaagcaccaccaagcaatctgacctgagaaagcatgcaggttcaacagaatgagtcctgctcttcagcaagcacccatcttgtgttcaagctgggtctgtgaggtaagtctggcaacacagagatggacacacaaccaaatctggaatgcagataaggccaagggaaggtggatcaatcattggaaacattcaacaatccatggaagaaatgttaaaaatagaatctcagggtctaatgaagtcggaatagctctcttctaggtatttctgttgaaaactgttgaataattggataaagtaaaagataagtatcggggattattaggtagcaatgaatgtgtaataaatgtaaaaagaggggcaagtgcatacaaggaagtgtatgctactgggtttctgttgaattgtgcatggaagaccatcagcagttcaagtcaaaaagcttgtcttgagggactgtgccaggctttgcagctacaaacatcatggaggaaggtgtctgcccattagaagcccagagcccagacggacggactagagcaaatcctctccctcatggagctagatgggaaaacaaaactatctgataactaacatgcaattttacatctcttaccttgtttaatcctcacaaccaccctgatgagtagtagtattatccccatttcgtagatgaagaaacaagttcttcaaggggaagggatcctcggagtagcatatgaatgagaggcagaaccagagtcaggacctatatcttgtcttctccttcctaaaactagaaaagtacccacaaccaggcagtgtttttggtgcagaggaagcagtagtgaacaaagtacgcaaaagtctctacctttagtgctcacattattgtggaggaagacaacaaacaataatcccagtagagaaattagaatgttttgctaaaaagtccttaggtggggtgtcatgatgttggtatcttatgttcaaaaaacagtaagttgaaactggggttgcatatattagtgctgttgtactagtcctttcattttctggattttaaatgttttcataatttaaaagttgggggaaaacttaaagaagaccttaataaatggaaagacatcccatgttcatgattggaaggtgtagtaatgttaagatgtcaaattcaacacagtctgcattaaaattccacttggcctgtttgcacaaactgacaaattggccctaaaattcatttggaaattaaagtgactcagaatcttcaaaataattttgaaaaagaaaaagctgtaggactcatgcttcccaatttcaaaacttagtacaaagatactataatcaagacattgccaatcaaaccacaatgagatatcacttcacacactctatgaggggtataacagaaaagacagattaaaagtattgttgaggatgtgtgaagaaattgaaacccttgtgtgctgctgctgagaatgtaaaatgtataaccgctttggaaaacagcttgcagttcctccaaaagttaaacatatatacacatatatataaaatatattattatgtatatataacatattatatatatatgggttagttttgttttgttttttttgttttttttttttttggagacagattcttgctctgtcacccacgctagagtgcagtggtgccatctcggctcactgcaacctccgtctcctggtttcaagcaattctcctgcctcagcctcctgagtaactggaattacaggctggaattacaggcaggcaccaccatgcccagctagtttttgtatttttagtagagacggggtttcgccatgttggccaggctggtctcgaactcctgacctcaggtgatccacccacctcagccttccaaagtgctgggattacaggcatgtgccaccgtgcctggccaacatagaattatattatccagcaattccattcctaggtgtatacccaagacaactgaagacatatgtccagacaaaaacttgtacatgaatgttcatcacagcatggggattcacaatagctgaaaagtagaatcaatgcaaaagtccatcaactggtgaatggataaacagaatgtggtgtatacataaaatggaatataattcagccacaggaagggatgaagtactgttatatgctacaccatgaatgaaccttgacaccattatgttaaatgaaagaagccagtcataaaagctcacatatttcattattaaatttgaatgaaatgtccagaataggcagatacttactgtccacagaggtagaaagtagatgaatggttaccaggggctaggagaagagggaaatggggagtgactgtttaatgggtacagagtttcttttaggggtgatgaaaatgatctagaattagataattgtgatggtgacaaaactttgttaatatactaaaaaccaatgaattggctttaaaccaattgaattttaaagtatattttgaaagagcggatattatggtatgtgaattatacctcataatgaaaatatgattgcattgttcaaaagagtatgaaaggaagcacacaaaaaatatgaaacataaaatatggctctttttattctaaagtgtagaaattgaacattttgtctcaggatataaaacaaaaacaaagaaagctaaaagcc

SEQ ID NO: 96048 - DNA, 20762 bp, Homo sapiens
cccttaaggcaggacagttgcaatggttacttggaatacttccggctaggagtggtgttgcgggaagtcagggaccccaaacagagggaccggctgaagccatgacagaaaaacgtggattgtgaagattttatggacatttattagttccccaaattaatacttttataatttcttatgcctgtctttactgcaatctctaaacataaattgtaaagatttcatggacacttatcacttccccaatcaataccgttgtgatttcctatgcctgtctttactttaatctcttaatcctgtcaaccaaggaggatgtatatggcctcaggaccctgtaataattgcattaactgcacacattgtacaggatgtgtgtttgagcaatatgaaatgtgggcaccttgaaaaaagaacaggataacagcaattgttcagggaataagagagataaccttaaactctgactgctggtgagccaggcggaacagagccatagttctcttctttcaaaagcaaataggagaaatatcgctgaattctttttctcagcatggaacgtccctgagaaagagaatacgcaccaggaggtatcagcttataaacagcacccctgggcgtggcctgtctcttatggtcgagactgcagagatgaaatatactccagtctcccatagcactcccaggcttattaggaagaggaaattcccacctaataaattttggtcagaccagttggtctcaaaaccctgtctcctgataagatgttatcaatgacaatggtgcccgaaacttcattagcaattttaattttgcctcggtcctgtggtcctgtgatcttgccctgcctccacttgccttgtgatattctattaccctcttaagtacttgatgtctgtcactcacacctgttcgcacactccctccccttttgaaaatccctaataaaaacttgctggtttttgtggcttgtggggcatcacggatcctaccaacgtgtgacgtctcccccggatgcccagctttacaatttctctcttttgtactctctccctttatttctcaagccggctgacggttaggaaaaataggaaagaacctacgtgattattggggcaggtcccccgatagagtggcacatgatgggcacagggcaggcttgggaaatggggggccgtaaggccacaagacatgtgggcaggtagcccagagtgtgtctggaacatcctgtttattggtcggcagtgacatctactgtcacatttgagaactgcatccacagccacatgacctcctgtgaagacctcagggcaaactggggaaacctgcccttcttggaaggtgatactaggggggatgagcaacacctttcttggaggtttgaattcttcagggcccctccagcatcttggtcttcctaattcctcccttgatcccccagccctaggggtggtagcttcttgcagtgtttacctccgtgttaatctggattctctctgtcttcggagttctctaatgcctggttaccaattctttatatcaagttctctccgttaaaatcattgtggtggggtccatcccatggatatacatggaggtctgtgtgacaatgtataatcttactatttgcagttattacaaaactgtcctagaagacatgaatgcttgttaaaagaaatcttttaagtttcctagacttcaaagaccgttgctatgccccgtgaaacatcgcctatatcctttaacagtttgcaattcgaattggttacttacttaacattttgttgccctggtgatacaattatgttgactcgttattgtgaggttactttgttattaaccatgatgaggattactagcacatacttttactccatatgtataacacaacaatgtagtaaaaccaataactcttggttctctattcaaagtgtttggaatctttattctgtttaaaacactgatgacatttgccaatttttgagtgttcttcatgttactgatttgtaggagctctttatatattgcagatttagtctcttactggttatgtatgctgcacctgaggagtagaagcactgccaaggacactgagtgtcttgtctgtgcagagcttcacatgaagctggagagaagggactggggcaagagggaaagataaaaaggggcaagtaagtaacagaatgaatccttgttgctaatctcctggcccccatcccagacccttcaggggatcctggygattcgaagcagcatagcctgataggcctctggtgagggtgttgggagggttttcttggccgcctgttccaggatgctcaagatgatgctgtgggcctcctggcatagctcagcacccaggaaagcctccactcrtccacgccatgctgccagtcgtggccgtccctcaaacagttcatagccgagagccaccggctgtagggacaaggatgaaaaagttgtgggcatacaactttcccagttgtcactgccgacccgaatgctggaaccatgggcagaagtatcagagacatggtccattccccagcccctaagtgaatggaccacaggggcccaggcagtatgttcagccttagagcccaagagcagccagggtgagaccccacacccaggcaggaggcagaagttcagggttctggccccagatcatccagagacttgctctatgattctgggcaaagttctggctttctccaggcctcagtgtttctgtctgcctcatgggtgtgacacgaagagggacactgcccacaggctgagctcacacctgcatcagctcctccagggccatgagatcagccagtgtcacctgctggccagcgaggaagggcctgtcccccaggaacttgtcctccagccattgcagggcctggtcyatggcagtcctgttgcgttccaccttctcctygggcacctggaccccaatgagkggccccaacayctgatgggggcagacagtgggtcagtctatggccccggcctactgccaactactctctgatggccaatcactctccagatggctctcctcacctggacccacaggggtataccaaaggtgccacggatgcagtcggcatgccagcccaggtactcatgaacacgggcacgagcctgcaggtcagatggataccagtggtccggcgtctggtacttacagctcaggtaaatcaggatggccragctgggaacaaatgggcagtggctataaggacactggcaccaggcatttacccctaactgctcccatctgccagtggggcccgggggcttctctgcatttgaaggactgccctccagcctcgccctccatctccagctccccaacaccacccmctcctcctacgagtctcctcctgtctttgttgccttgggcaccgactcttggctggaccttctgctttgcattttgagaacctcatctctgtgatatgccagcagccgccctgtgaggtagagactcctgttagccttttagcacaagagaaaactcaaggtcagaatggtcaagtgacttgtccgaggcggtgcagctcagaataggctccctggacccctggaaccctgcatggggctggcacacagtggatgctccgtggagtcccttgcatgtccacgcgcttgggtcagggatcacgaggggaggaatgtctttggcccccgtctgacaggcccccagccatcacttctgcagccacctgacctcttgtccttttcctgcccagcagctggacctcaccatgagctgtgcccttgggccatggcattggcctctaggcccggcctgggtagattgggtagtctgcgacaagtcactagaggctcttttcagctagcatttgttgaacaaatgcgcaacagtggaaaaatgttcccttgtcttctcttctaatacccttcagtctgggagtggagaggccctgcggctcagaaaaggctgaagatgagaggtggggggacatgttctgtcagcccctgctcatcccggacacaccccaagctgtaccttctccccagatacctctcctttctttctttccttttttttttgagacggagtctccctctgtcgcccaggctggagtgggctccctctgtcacccaggctggagtgcagtggcgcgatctctgctcattgcaagctccgcctcctgggttcacgccattctcctgcctcagcctccccagtagctgggactacaggcggccgccaccacgccctgctaatgttttgtatttttagtagagacagggtttcaccgtgttagccaggatggtctcgatctcctgacctcgtgatccgcccacctcggcctcccaaagtgctgggattacaggcgtrarccaccgcgcccggcctttttgagacggagtctagctctgtcgcccaggctggagtgcagtggcgcgatctcagcacactgcaagctccgcctcctgggttcacaccattctcctgcctcagcctccagagtagctgggactacaggcgcccgccaccacgcccggttaactttttttccatttttagtagagacggtgtttcacggtgttagccaggatggtctcggtctcctgacctcgtgatccgcccgccttggcctcccgaagtgccgggatgacaggcgtgagccaccgcgcccggccagatccctcgcctttcccctccctcgctgccccatggggtatgggagggccactggggcccggggccagtggggagagccaaggtcacatgggctccggatgcggtgaggggtgagggaaggagggcacctttcggtcaagatgaaatcaccatccttgagcgtcggcagtttccccaggctgttgatctgcaagaactccttgctcttgtgctgccctgaagaggaagaagtcagaaaaggtcttcagagtaaaaacgctgcacctctacaccctccctcctcctccccaagcggagccccacagccctgagaaacagcaaggtctgggactagaggcctggatcagcctcactccctggctgggcctccctgccctgccacattccggggcagctggggggytttggtgggtggggccaggtgcagcaggtggataaagagaagttttctagccggactctggtgggccaggggaggggaggcaaactggggtggctcatctcttcccatctcttaattctcacaacagcatgtccttcttcccgaggtcttctgggctttgtgaatttatatgcgtgcattccacgcaagaactctgtcaactccattcagtattttctttccatccctacagagcagaaggtaacgttatcctccttttcagaaggcaagctaaggttcagagaggctgtgatcccttcaaggccactcagtccacagcattctctggtggcagacgctgcaggaggaggtgagggggctgtgcgggcggcgagacgctcagggcagagcagggcgggggcctgggggtgcactgggtttgtggacacgcggggaaacgggctgggcccacctttgaccaaatccacggtgcgcagctctaaggggatgccattcttcttggcgaagatgtagacggcgcggctgggctgggacaccaggtcaagaaacagctctaggcccatggcgggggcggcaaggacagcggggatggcagtgaaggcgctgagcgcggtgtgggcagcagctgtggcaggatcccggcgcgccgggaaataggggatcaggccccaccccctggggacagcacccaattggagcgcaccacccccggacccgcctcgccccttcggttcctgtccagtcctgccggccaagactccaccaccagatccgtgcgtccctacagggagggcggtcgctatgaacgcacagctgggagggtggagttggagctggggaccctcgactggcagggaggacgcggatgcagggggccgactgcaaggggaaggggaaccggctggacagggagaagcaggtctgcttttcgggatcccggtgccagggaccctgcccagttccaggcgtcgccctracccagaaacgactgggcgccgccgtcctggaaaggccccagcgcacggacatctgagggttcgttcagagctctgtttctcggcgctgcatggtggcggaagggagggagcgaatgggatccyctaaaagggatcttagagtttcacccagtgggatgtgacacttgcaggtgtcccaaactggtgggaaccttgactggaaggctggggtyaaggatgaactttctgccgtccagactgtcccctgcagagcagctgctgccagacagcgggagctgccagacagcgggagctcccacttcgtgcacaggatgggggcagggagcccgcagccgcgggaggcaggaatgactgtccgggaacctcctttcttctccctgaatcccagccctggcatctcaccagggggcacagtgatggtccagggctgggcccgggactctagctgaatctttcagagtatcccatccctctggccagtggcccaagcgagtgaaccagaatgcttccttgggagttttgaaactggaactggagagaggagctccctatggggaggtaaacgggagctggggccacctgtagtgacatttcctgagttcgaggagtagacgagwctgagagagaaaagctgactcagagaaagggagtgataacagggcatgctggcccacacctgcaatcccagttactctcaygggatctgtttctctgatgtctgggtatgaaaggactttctaagcctcagaacagtgggagaactcaacaaagaaaaaaccaatacatatacaaggttactttgtggargaaaaaatggattaamcttaagcaaaaaactgggaaggatctcggtaaaagatacgtcagaaggaagtaatgtcctttaagatgttcttagaaacccatcagacaggtrgggtgtggtggttcacgcctgtaatccctgtactttgggaggcagagatgggcggatcagttgaggtcaggagtttgagaccagcctgggcaacacggtgaagccccgtctctactaaaaatacaaaaattagctgggtgcggtggcacactcgggaggctgagacaggagaatcacttgaaccttggaggcagaggtttcagtgagctgagatcataccactgcactccagccgggccactgagcgagactgtctcaaaacaaacaaacgaacaaacaaaaagaagagaaactcatcagacgaagacacaggaaaaaaatgagygaaggaaatcagcagaggtttcattgaaggacaaagagaaatggtcaatacatggatgaaaacatgtttaacttcagtaataatcaaggaagcacacaccaacacaacatgcacatactgtttttatttatcaaaggcacacatatttttgaaatgagtactcctaattaatatgtacagagcacttacccagtgcccagcacaggggtggcaccctgtgtgtgagacagcatgaaacaggtagacacgcgccctgctgaaagtaagggaccrcctctctggaggatccatcgggcaataaggaggtttccacaccttaactgtgtctgccttgacctctggggcctgggagcagagccccctccagctggtggggaaggaagcgtggtgtgtttgaggacagaatggagagaagttgagtagagcaagtgtagactcttcctatccaaagtgtggtcaatggactgggagtatcagcatcaccagggagcttgttggaaatgcagaggctcaggccccactctgaccttactgattgggagcataaactgtaaccagattccagggaggattcatacacacattcccgtttgataagtggggggtagtaggaggtgaggtgaaaagtggggaggggatggctaccgcactggagaaggctggctttgtgttgaggcctttctcatgagggcagtggggagccatggaaggctttatgcaagagagggtacgggcagattgagattacagaaggatcccactggttgccttgtgtgaggacccagggagaagggggaggctgtccctgtttgagtaggagatgagagctactggtggctatgagtggaaagaagtgagcagaggtgagcagaaatcccaaggactggtgatgataggatgatggtgggaaccaggatgggctttgggcagaccctgacccctctctctgcctgtcggcccaccagataataatccctgtgttcctgggcgagtcagtgccacccgagatgttggcggccactttggctgagctggacggatgcctgcagctgctcgaggacaagttcctgcgggaccaggccttccttactgggccccgtatctctgtggctggcttggtggcaatcacggagctgaggcatgagagtgccatggggtgcggtggcccgctgggcagtggtgtatccgggaagggagctgacatcccagctcatgttgtcttttctggctgtgggaccctgtgtgagtcacttctccttctgagcctcagtgtcctcatctataaaatggggctttacaaacccctcaccgcagctatattaagaggcttccaagtgtccccagggagggggacatcctagcccatcacacacatggtggaggagggaaaatccaatcagagaacccctaaagcaggtcatgctgccttacacttggctatgcccagcccctccgctgactctgtcttcccctagcccatcagtgctggctgctgagtctttgaaagcggacccacggtggcagcatggtgcccaacacgtggaggctgcagtgcgggaggacctcttccaggaggccctcccagctgtcctgaaggccaaggacctgcctccagtagaacctgctgttaaagagaatctgaagaccttaatgcagcttttcttgctgtgagtgcgtgtcccacacttgctgagccactgaggggatgctgtgttggtagaataaagacatggagctgtccgtctccttggttgaagagaagacatatctgcaaaggctctggtccacagttcctccagatatcatgcctgcattccttttgtctcctaccccattccattctagcttccatgtgacctctgaaaagagcttgggcaaacgcttacttgaccctgaccttctgtgtggaactttgtatggttcctcactgcccagaagctaaagtacaagtcattgaactttgcattcaaggccttgctcccactcctccaggtggccccttctgcctgcacactcctaacccctctctgggctcccaccttggcctcttggcctccgctcatgctgttccctcctcatcttcgcctggtgcccttcctggtcttttggcatttggcaccctgtctcttctccagggagacttccctgacctccccagccccagtccaggtcaggcgacctctctgggctcctcagccccagtgtttccttgcgggggatacccccggactgagcatgtatcatcgatgaggggtgacctggtggaaagatgtctgaatcaggatcagccttggtctcctcggtctctctcctcactgtggggcgatgttgtgttccacaagtggggtgcagggctggttcatgaacctccttgcaggaagggaagtccctggttatttcctggccctctcccatgcctcctcataaccttgaccacagtcttctctacaccccactcccggaccactggcttgtccatgccccacacctggtcccagacttgccacctgtccctgccctctccccttaggactgtcatatttacctgtcgtgtgtctcagaccttctgatatctgagtcatctaataaacaaactgctaataggacaagatcatgacagacagagactctgtcggcctttcagtggaggctcctttaagtatgcacacttatagagaattttatacacgtagttgaaattgtacatataaacttgcaaattttttctttcttttttgtgggggaggggggagcctgggtctcactctgtcatctagggtggagtgcagtggcacagtcatagctccctgcagcctagatctcctgcgctcaagcaatcctcctgcctcagccgcccaggtagctaggactacaggcacacaccacagcacccagatttctttctttttttttttttttttgtagaaaataaagaagagaatcttgctatgttgcctagcctgatctttaactcctgggctcaagcaatcctcccttcttagcctcccaaagtgctgagattacaggtgtgagccacattgctcgaccacaacttcagtcatatttgtaatgtacaattcaagtgattttgccacactgaccacactcatgtttaagccacgccaacagagttccatgttttctgatgttttttcgagatggagtctcgctctgtcacccaggctggagtgcaatggcgcgatctcggctcactgcaacctccacctccccggttcaagcgattctcctgcctcagcctcccgagcagctgggattacaacgtctgccaccacgcccggctaatttttgtatctttagtagagacggggtttcgtcatgttggccaggctggtctcaaactcctgacctcaggtgatccgcccgyctggacctcgcaaagtgctgggattacaggcgtgagctaccgtgcccggcctttccatgttttaaagaacatattttgccaccccctggtggacagtggctcaccaccggcacaagaggctacacaggcagatgtcaatggggaccaggcagggacaggtattgtcgtgagcctagccctacccgcgcccccgcgagtaaccacatctcctgactgcccaagcgcagatttccatactgaacatgaaattgcctgacttcgaaatggtggcaaatcattcaaaaaaactttaagctcccgttgtattggttattagggtcgagcctggggaagacccctataggtgtgtgtgtgtccttgtgtgtcgggggtgtggtgttcagacctctaatagggctaggaaccgggcgaccacagcgcggaagcttgagagggaaacccacctggcgccaggcaggagggtcgggggagacagggtgggtccactaccgggttaaagacctgtagtgggtggggctacacgtagggcggagacgatgggacttccggaaatcagccggcacacgtgacttttgtttgcagaagcgggaggtaccctaggcagccaatcggggagcgccgagtctctgtccagccaatgagaagccaggttgctgtggcgcctcgcccctcctccctggtccgcgagccttgggtacccccagcttttcttccgccagagctgtttccgttcctctgcccgccatgccgttcctggagctggacacgaatttgcccgccaaccgagtgcccgcggggctggagaaacgactctgcgccgccgctgcctccatcctgggcaaacctgcggacgtaagcgtgggccgggcagcacggggcgaggggaggttggtgggccaggggtccggccctgtccctgctccgcctccccgacagtgaccccgaatcttttccccagggaccactccccactcctttcctcacgccaagctctgactttccgtgctccacgatcccgcggctccccctccgcacgtctttcccttgtcgccctccccagtcatgacccgggcgtgaccttcagggaccgcggcccgtatcgggatccctgccccgcgaacactgcgcgtttcggctttcgcgcgctcgggtcccgtccccagaggtagcccggccggctccaacttcgggcaaaacttttcatgtccccctcagcgcgtgaacgtgacggtacggccgggcctggccatggcgctgagcgggtccaccgagccctgcgcgcagctgtccatctcctccatcggcgtagtgggcaccgccgaggacaaccgcagccacagcgcccacttctttgagtttctcaccaaggagctagccctgggccaggaccggtgcgtaggggtagtagkggatccatgtgggactgccgcagactggagccactgatcctgcctcagggggaaaaacccatttcttgccctgcccagtaaggacacatcagggtctggagctttggggccccctgaccccttaggttcctgctgttaggaccatcttcaaagtgcgagcaggattgaatgaatttctggctctgctcctcagtgtgtaagtctgtgaaccgggaaggctctcttttaacacccccggggcagtgcaagggtcatgtgggattgtctgtgtgctgtacctgccttggcacctgacaggtggctgaagtgtgattttctagaacttttccaggctggtcagaaggaattctgggtatgttctgaagttacgtattttggacctgtgtcccagccaggttccaggtgaagttcacgggagactcacagagtagtgaaagaccattggcctggatgtctagacatctgctttctgggtcctgcatagctgggggaccccagacaaacttggaaatgaaccatctccagttggcaacctcctcttctgtgaatacaggggaaaagacctccctcccccacaagaagcgtctgcaacccaaacctggcgttctgtgaccgagttaaagtttcctcttgggtaaaagatattcttgagccacatccatgtctaggaggaagtaagggcatgagaagcttgaaaggacactgtccaggcacggtggctcatgcctgtaatcccagcactttgggagaccaaggcgggaggttcatttgacccaggagttgtagaccagtctgggtaacatagtgagatgccatcccccaaaacagttttaaaaattaaccggacatggtggtgtgcacatgtagtctcacttagttggcaggctgaagtgggaggatggtttcagcccaggaggttgaggctgcagtgagctatgattgcgcattgcactccatcctgtgtgacagtgagaccttggctcacaaaaaaagaccttctgaaatggagcctttgttagtccatgaaggtcgatgaggaatggctgatcctgctgggtcctccctcaagctacagaggaataatacagtcagccccctgtatcactgggttacgcatctgttgattcaaacaaccatggattgaaatattagaggaaaaaaaattgataattgcatctatactgaaaatacgtatagactttattccttgtcattattccctaaacaatacaactatttacatagtacgtacattatattaggtattataagtaacccagagattatttaaagtatatgagaggatgtgtgtaggttacatgcaaatattacaccattttatgtaagggacttgagcaaatgtagattctggtttcctctggggattctagaacaaatctcccacggatactcagggaaaactgttactctaacaacaagtgttatacacttaccatgtgctaggtcctctacaggtactttacactcatgatcccatttgatccttacaatccctatccactctccctttgctcagacaagacatgctatccccatgaggtagataatctccattatgccaattttatgatgagaagacaggctgttcatactcccgcccgccccaaccaggctgtcccaagttctggttttcctcactggaaacttgctgttacctctgagaggggcatgttcacttatggcccagacattagtggcggggttggtggggtggggggtcaccctgtgctcagcctttgagaaaacaggtggctgaggtactgtgcccttagggagcctgcaattaggaggcagggtacccctcagtacacaaactgatggagatgatagagtgtacggcacacacaccgaggctactgtattgtgtgtctgtcctagctgggtcatgatgtgcggctacmtcccacacctgagtgtcccactgccctgctgggggttggggaaaatcattattgggatgagcaggtttgcaaaatgcctggtggactgaggcaggctgtcctgagtacccacagtgggagtacctggcaggggtcttgcaagatgtggtattagccaaggagctgatgatatctttttctctgtctcctgaaggatacttatccgctttttccccttggagtcctggcagattggcaagatagggacggtcatgacttttttatgattgggcacggagggatccagggcatctgtgaactggctgcttcttccagagagatctcttggcagagtgagggcctggagataaccagctttggattatcccgcatgcaacattcctgtgatcacataatcctcttyttcatcctcatatgaaataaatgaagagagcttcctcattcaaacatgacttcttaccttctattatctctcctgggcatctggggccaccatgggcagcagggctggtggataagaccgtagggaacctggagggggatgatttagactgctcagatctggggctgggagactcagcctggaggctctgctctccacacccatctgcaggcctgtgggaaggtgtgagcagctggtccagctggggccttcctgcagactgctgacctgaggctcctgtcctcagccccaaaatgggaccagacctctgtactcctcctgaagtctactccctccatgactggctgggcagcctgccacgccactctccccttttccccactgtagagtggaggcaggggttgcctgtgtccctttgggggttggtcgctggttttccagaagcagggtccccagtctgcccctcctcctccccagggttgcaagcttcgactccctccctttggcaagactcaaaccgtcctcccagctgccccatcaccccttcctggcagtagcaccacttttcataacctttccagcccaggggtccccaggctgggaggacagctggggggatgaatggcaggtaaggcttcctgtgtcttctctcctgttgcaactgtgccacctgcacacttacacactcatggacacaccatgcacatacacacatccacccgcatctagtcacgattcatcacattcacacacatatacaatcataccatttacacacagttaactcgtgtacacacacatatacacccagtcacataattcactcacatccaacaaagtcacacaactcaaattcacacatatagaccaaatccccacacacgtacacacacacacacaatcacagcattcactgacattcatagtcatcacacagttcactcacacacacacatactccccgtcacacacaggcacacaattcacaccaacaaaatcacaattcacttatccacccacatactcaaattcacactgctcacatttacacacaattcactaaaattcacgtatacacccatgtacacagttcactcacatcacacacatatacacccacacataaacacacaattcactcacacacagttcactgacattcgcacacatacacacgcaccacacaggcaattcagtcacatggccaaaagccagtcctcaccttgctagttcccttcccagtgtcacctccgcctttggccctcagcgtccccttcccatgcctggactgctggagagccctgaacacaccccatcttcatgcctccagcactagcccaagcccttccctctgccaagagcactaagtgcaactcaaggtcacttctagggaccctttcctgtccctcctcctgccaggtgacatgaggatcctgctggccctgcttaacaatgatgcacaccacagttagttcagccgaggtcgctctcccagacttactgccacctacacagcactgggactgactgtttaactttattctttatttcgtgtactttattggagtgtctgttgaaagcaaaaccatccaattaggaacaatccaaaggcagccagcatggagtgagtgcagtggtggaaactcagattattgcagcctcgacctcctgggcctaaacaaaccttctgcctcagcctcccatgtagtttggatcacaggctcatgccaccatgctgggctaattgtatgactttgtagagatggggtcgcactttgtttcccagggtggtcttgaattcctgggcttaagtgatcctcccacctcagcccattttgcaaaagtgctcatcccggtaatgagcattccccaacccccagcagggcagtgggacactcaggtgtggaatggtggctgcacatcagcatgacccacctaggacagacactcaacacagtagcctcatcgtgtgtgctgcacactccatcatctctgtcagtctgtgggctgaggggcaatctgcctcctcctaattgcagactccctaaggacacagtacctcagacacctgttttctcaaaggttgggcacagggtggcccccccaccactaatgtctgtgccataagccaacatgcccctctcagaggtgacagcagttttcagtgaggagcgccacagcttgggacagcctggctgagggcgggggagtatgaagagccttagtcttctcatcataaaattggcataatggagattatctacctcatggggatagcatgtcttgtctgagcaaagggagagtgcaccaaactttgggtaacaaacagtttaaacttgtttttttagacattcagtaagccctttctcccccctccccaaaccgtttgattacaaagaagcacaatgggttaactgtggcaaaacataagaaataaggcaggggaggcaggtgcagccttgacaacataagaatatccaaacaatgttgtcaatatcaaaagaaaaaatcaaaacatcttttataatataaaataaatccatataattaagtactaattaggtgaaataacattatagggtatataacgtttattttctctatttaaatttgcatatcttaaatttatttgtttttattttattttttcctgagatggagtctcactctgtcacccaggctagagtgtagtggcacaatctcagctcactgcaacctctgcctcctgggttcaagaaattctcctgcctcagcctcctgaatagctgggattacaggcgtgcactaccatgcccagctaatttttacatttttagtagagatggggtttcatcatgttggccaggctggtctccaactcctgacctcatgatccatctgccttggcctcccaaagtgctgggattacaggcatgagccacctcgccaagctgcatatcttaaatttaatgtgaaacatcatgtttcaacttcgacttaagaatatcatgacatacagtttttggtgagtctagatgtaatggaatgaatatttaaatagacttcaaagattttatcaaggttgtatttggttatcattgctttaagtctttaatgcttttctttctttattggactaagcaattttagaaacaaaatccacaaccaacacacatacaatgccgatgtttctgaaaaaactaaatagtattatgtttagtatatcattaaaatagtgattgtggttaaacaaacaagcaaacaaacaaattactgcaactcatagatgataaacttatagaaagcaacattttagaagttccatctggtgtgtttgcactgtaagaaaataaatctggatatgagtatgtagggtccagccctacagggtcagtgagttttctcctcatgtgtggagatgagagagtgtagaaataaagacacaagacaaagagataagagaaaagacagctgggcccaggggaccactaccaccaagatgcagaaaccggtagtggccccaaatgccaggctgtgttgatatttattggatacaagacaaaggggtagggtaaggagtgtgagccatctccaataataggtaaggtcacgtgggtcatgtgtccactggacagggggtccttccctccctggcagccgaggcagagagagagagaggagaaagagagagagagcttacaccattatttctgctatcagagacttttagtactttcactaatttgctactgctatccaaaaggcagagccaggtgtacaggatggaacatgaaggtggactaggagcatgaccactgaagcacagcatcacagggagacagttaggcctccggataactgcaggcgggcctgactgatgtcaggccctccacaagaggtggaggagtagagtcttctctaaaatcccctggggaaagggagactccctttcccggtctgctaagtagcaggtgtttttccttgacactgacgctaccgctagaccagggtctgcttggcaacgggcatcttcccagatgctggcgctactgctggacaaaggagccctctggtggccctgtccgggcataacagaaagctcgcactcgtcttctggtcacttctcactatgttccctcagctcctatctctgtatggcctggtttttcctaggttatgattgtagagcaagaattattataatattggaataaagaataattgctgcaaactaatgattaatgatatatatataatcatatctaagatctatatctagtataactattcttattttatatattttattatactggaacagctcgtgccctcggtttcttgcctcggcacctgggtggcttgccacccgcatgagtaagatgtgcttgactgaataaatgagatccccagctagcactgggctatgttccagagcagtgcatctgtcctaatatgttacatcaggaatgtttgttcacaatccaccagctgcaggttttcatttactaagaattgaaagcaattaatcctggtccatccactccttcctccgttgttttactatctttgctttgagatcaggtactttgtgcccaggattgtggcaatgcatgtttactaaaaatgcatccattgatggtagaataattgtactaaattaataaaggaagagagtgtcttcatgtagaaaacagagcactaaattataattttacagtcacagcacaagctccagctcttcctaggcacagtggagcaacccgggtccactctttgtctgggatcatgagcctccactgtattcaggtatgcctgtccatcatacctcccaacagcataaaacttatcaacaagtaaacagacctccactgcatctctgctgatgctcattgattctactgtagtccacatgtctgttttgggatcagatgtctccacacaatctgagagtctggaagtcaagttggatgtgagagcatcatgttcccctatagcatacagcagtccgctccgggtcgttactcctatgccacctctcctttttgacatccgtgcacacagtgtccatgttggggtgatcaggcctaacaccaggccgtgggggctacaaagtctggcggggtcagaggaatgtgaaaagataagttaaaagtgcataaagtgggtccagagggccagcactagattgaaggctgcaaaggccccgagctctgggagcccacactatttattggtgatcaaacaaagaagcaggtggtgaggatgtgagggtaaacaggtgagggcatgagaacgtggggatagaaagctagtggtgcattaagcgtagctgtgacagcttagcacttcctttgatgcatgtagaatatgctctgctacttgagataatggaggacatgtttacgagtaagaagcaaggaaccaacaagtctgtgcacattccagaggctatgaggagttttatgccctgagccctgggttccatccaagccacacggggttttatgccctgggcttagatttgtgttgcggcagggcagccttccaccctatggcacagagcttggtgtaccaaaggccatgaggggttttaggccgtggaccccggacatctttcaagactcttttacattatgacagacaagccagtcctgcctcagctcttctaccaacagtccactcactagtataaggatcaaaacattctactgatttgagacaagaacttgcatcatgaccaccaactgcattaagttttccacttagcactgccacaccaactgtgctcctaggagtagacacagtggcaacaaaattccactggcgagcctgagggtcccaaatttccgctgtgttcagatggccccagccctcatgccctcttacggcatacatgggaccttccagtacagccacaccaaggccatgtctatgtgtggacataggtggcaccacactccctgtttttgttttggggttgtagcactctacagtattcaaagtcttcagtccatctcttcctccaaccacatacggtttgtcatctagcactgcgacaccaaactgtagcctcctctcattcatatttgctactggagttcatgtatttgtacagaggtcatacttttcaatgcttgttgctccttttgttgaatccattctcccaactgcaaataatgtaccaacagttgatttcctagattttgcctgaggactttgtaacgtgggtcatctctctggtaatacatggtacttcattgcttccataatgagtttctgacattctatattatcccaaaaaagtacattattttccatgtctgccaggaactgtggtgcaagaagaggtatcctaatataagccaaaagtttactta

SEQ ID NO: 96049 - DNA, 100225 bp, Homo sapiens
  misc_feature (1)...(100225): n = A,T,C or G
tctcaccccgttgctcaggctggtctcgaactcctagactcaagggatcctccagcattggcctcctaaagtgttgggattacaggcatgagccaccatacctgcttcctcttaaccattttttagtgcacagttcagtggcattaagtacacgaaactgttgtacagccaacaccagcatgcatctgcaaaactttctcatctgctcaaagggaaactttgtacttattaaatagatcttcccattcccttctgtccccagcccctggcaaccactgttctactttctgtctctatgaatttggctactgtagacacctcatataaggagaatcatatccattgtttgtttgttttttaaccattcgcctacatacaggctgttagtttgtttccctttgttggggaaggtgaagaggagggactattacactgctgcagggaacattctcacatctttgtacacttgtagaatgtgtcctagattctgggattttcaaaggctataaacattcagtatgaacctaaaagtttgtaccacgctctatttccactaacagtgtatgaaagcccaaattctccacttccttgccaatattggctattaaaatatttttctttttctatttttcttttttttttttttgagacagagtctcactgtgttgcctacgctggagtgcagtggcacaattgtggctcactgcaacctccacctcctgggttcaagcaattctctgcctcagcctccctcccgagtacctaggattacaggcgcccaccaccacacccggctaatttttgtatttttattttttgagacggagtcttgctctgtggcccaggctggagtgcagtggcgccgtctcagctcactgcaagctccgcctcccgggttcacgccattctcctgcctcagcctccagagtagctgggactacaggcgcctgccaccaggcccggctaatttttttgtgtttttatcagggacggggtttcaccgtgttagccaggatggtctcgatctcctgacctcgtgatccgcccaccgcggcctcccaaagtgctgggattacaggtgtgagccaccgctccgggcctaatttttgtatttttaatagagacagggtttcaccatcttggccaggcttgtcttgaactcctgacctcaggtgatccacctgccttggcttcccacagtgctgggattacaggcgtgatctatttttcttttcttttttttgaaacagggtcttactctgtcgcccaggttggagtgcagtggtatgatctctcagctcactacaacctccacctcctgggttcaagcaattcttgtaccttggcctccggagtagctgggattacaggtgtgtgccaccatgtccagctaacttttttgtatttttagtagagacggagttttgctatgtgggccaggctggtctcaaactcctgacctctagtgatctgcccgcctcagcttccaaaatgctggcattacatgcgtgagccaccatacccagcttcaattctgctgttctgaagccatcttaagagtcaccttgattgtctttgtgtgatccatattttcttgccatcagccacttccaacatggccaatttcaggttcagggtcctggggaaaggccagaggagcacatctcaagaagatgccccaagcatcagagttctgcatgtacagcagagccgggggccatggcctctgatttcttttggttgaattttctcatgggatgttcctcagatctccttcaatccacttcttatatctagtcctacagtatttttggccaggtgggcaaggtatgtttgaatgctgctttgattcaagctggatcctgtgtaaaactaagcaaatctttttcctaaagtttacagaaactctttaaaaagaaaaaaaaaaaagctgggtgcggtggctcacgcctataatcccagcactttgagagtccaaggcaggcggatcacgaggtcaggagttcgagaccagcccagtcaacatggtgaaaccccatctctactaaagatacaaaaaattagccagcgtggtggcgcaagcctgtaatccaagctattcgggaggctgagacagcagaattgcttaaacctggtaggcggaggttgcagtgacccgagatcgcaccactgcactccagcctgggtgacagggcgagactctgtctcaaaaaaaaaaaaagaaaagaaaagaaaagaaaagaaaagaaaaagaggccaggctcggtggctcatgtctgtaatccctgctactagggatactagggaggctgagtcaggagaattgcttgaacctgggaagcagaggctgcagtgagccaagatcatgccactgcactccagcctgggcaacagagtgagactctgtctcataagaaaaaaaagaaactcttaaaaaaaaaaaaaccagctggggccaggtacagtggctcattcctgtaacagcactttgggaggccaaggtgtgtggatcaactgaggtgaggagtttgagaccagcctggcatggtgaaaccccgtctctactaaaaatacacaaaattagctgggtccgtggtggtgcatgcctgtaatcccagctaccagggaggctgaggcggaagaatcacttaaacctgggaggcagaggttgcagtgagcggagatcatgccactgcactacagcttgggtgacagagcaaggctctgtctcaaaaaaacaagaaaacaaacaaacaaaaacaggccgggtgcagtggctcacgcctgtcatcccagcactttgggaggccaaggcgggcagatcacgaggtcaacagatctaaaccatcctgaccaaaatggtgaaaccccatctctactaaaaatacaaaaattagctggatgtggtggcgcacacctgtagtcccagctactcgggaggctgaggcaggagaatcacttgaacccaggaggcagaggttgcagtgagctgagatggcgccattgcactccaacctggcaacagagccagactccgtctcaaaaaaaaaaacaaaaaaaaaaaactgggcaagcaatctcccaccaggaaatgacagagcaagtttccaggtgtcctccacatttctcatttctttcctttgttttttaaaatatttatttatttattttaagagacaggatctctcactctattgcccaggctgtagtgcagtggcatgattacacctcactgcagcctcgacttcccaggctgaagtgattctcccatttcagtatctggagtagctggactacaggtgctgtgtacaccaccgcgcctaagtaattttttttttttaacttttgtagagatggggaataggggggtctctttatgtttgctgggctcaagcgatcctcccaccctcgtctcctgaaacgttgggattacaggcatgagacactgtgcccgaccaacattctttcctttgtactccttagtctgaatatgggtataaactattaaaaataacaaaattatccctgaaggccaatcttgatctcactcctacacattgaattcatcctgtaacaactttaagataaagaagttctgtccttttcaatttgcctgctttttttttttttttgagacggagtctcgctctttcgcccaggccagagtgcagtggcgcgatctcggctcactgcaagctccacctcccgggttcacgccattctcctgcctcagcctcccgagtagctgggactacaggtgcccgccaccgtgcccggctaattttttgtatttttagtagagacggggtttcaccgtgttaaccaggatggtctcgatctcctgacctcgtgatccgcccgccttggcctcccaaagtgctgggattacaggcgtgagccaccgcacctggccttttttttttttttttgagacagagtctcgctctgtcgcacaggctggagtgcagtgggcgatctctgctcactgcaggctctgcctcccaggttcacgccattctcctgcctcagcctcccgagtagctaggactacaggtgcccgccaccacgcccagctaatttttttgtgtgtgtttttagtagagacggggtttcaccgtgttggccaggatggtctcaatctcctgacctcctgatccgccctcctcggcctcccaaagtgctgggattacaagcgtgagccaccacgcccggttcaatttgcctgcttttctactgcagtttgggtgatctaggcctgatcattagaggacagattccatccctgtcagcaacttcaattgctccattaggatcttcactcttatgttcttatttattcatcccaacattaatttaaaaaacaaacagaaacaatataaaaaaaaaaacaaagaaaatccaacaatttgcaaataccagctacggagcatgagatatgaaataaaagaaaaaaaatttttttttctttgggacagagttttgctcttgtcgcccaggctggagtgcaatggcacaatctcagctcactgcaacctccgcttcccgggtttaagagattctcctacctcagcctcccaagtagctaggattacaggcgtgcaccaccacacccggacaagttttgtatttttagtagaaacggggtttcaccatgttggccaggcttgtctcgaactcctgacctcaggtgatccactggcctcggcctcacaaagtgctgggattacaggcgtgagccaccgtgcctggccgagaaaaagcttttaaccgtatcagtagatactggtttcggggtttctttcggggtcacttacacccctgccacctcctccagtaccaatttacccatggccaaacacagggtgatgtgtaggaacctgaaagcacgtctccgacctcagctgcaaaactgtggagtcccacacactagactttatattccagcatttcctctcaccattacatttttgcttttttccatccttacattacctttaccacatttttgtttttcccataattacattagataaggcaatggctagacgtggtcttttactaacttgttctattgggagcggacgagaaaaaaaaaaaagacaaaccctagaaatgtcttcaggtcccagccatgtttaggaaaatacttgaaggcttctgcggtgagagtgctacctggtaagggcgtatggacacacgtggagggcaagaaatgaatttgggtctggtgccgaaacatctttccactgctgtgattttgttttctggtcagagtaataatgctcgttgtaaaataaataaataaataatacataaaaaggaaaaggaaaattcagagaaaatgaaaacaactcgtaatcaacgtgctttttggatgtgaactgctccctttgggagggcaatggagaagtgaggacgcactgggtatctggcccggaacagccggcagtgggtacaccctgcctggtgaattcgaccggggttttgggggacccgccacccaagggccgaagagcagggccgccctacgggcgctcccatttggccacctgagtggcgacttggcgccttcctcggagcagctccggggttccgtcgtcccggttcccactggtcccttacgcagagaccaaaggcaggaaccttccctcgtaactatccaccgactgaaaatagattctgagtccgcccccgcccctccccccttaaaatcctccccactcttaaaatcctcccctttaaagggagccacagggtgacgccgggggagtttgcggaagcgctaaccgcgttggggcctagggcggatcccgtgattgggacaggccccgcccccggctccacttcccccattgtgtgagcggctcgggcctaggccccgccccctccggaggcccggccactccccttttccacccccccttggctcatttccggccgccgccgctaccgctagcctgtaaggaggattcggcagagggaagaaacaacagccgccatcttgtttgtgtgctaggctgggggggagagagggcgagagagagcgggcgagagtgggcaagcaggacgccgggctgagtgctaactgcgggagccagagagtgcggaggggagtcgggtcggagagaggcggcaggggccgagacagtggcagggggcccggggcgcacgggctgaggcgacccccagccccctcccgtccgcacacacccccaccgcggtccagcagccgggccggcgtcgacgcctaggggggaccattacataaccccgcgccccgcggcgtcttctcccgccgccgcgggcggccccgaacggagccccggggggcgggcgctcccagcacctggccgccggcggtgggggccgtagcagcggccgtatttatttattttccgcgggaaaggaaggcgaaggaggggagcgcggcgcgaggaggggccgcctgcgccgccgccggagcggggcctcctcggtgggctccgcgtcggcgcgggcgtgcgggcggcgctgctcggcccggccccctcggccctctggtccggccagctccgctcccggcgtccttgccgcgcctccgccggccgccgcgcgatgtgaggcggcggcgccagcctggctctcggctcgggcgagttctctgcggccattaggggccggtgcggcggcggcggcgcggagcgcggcggcaggaggagggttcggagggtgggggcgcaggcccgggagggggcaccgggaggaggtgagtgtctcttgtcgcctcctcctctccccccttttcgcccccgcctccttgtggcgatgagaaggaggaggacagcgccgaggaggaagaggttgatggcggcggcggagctccgagagacctcggctgggcaggggccggccgtggcgggccggggactgcgcctctagagccgcgagttctcgggaattcgccgcagcggacgcgctcggcgaatttgtgctcttgtgccctcctccgggcttgggcccaggcccggcccctcgcacttgcccttaccttttctatcgagtccgcatccctctccagccactgcgacccggcgaagagaaaaaggaacttcccccaccccctcgggtgccgtcggagccccccagcccacccctgggtgcggcgcggggaccccgggccgaagaagagatttcctgaggattctggttttcctcgcttgtatctccgaaagaattaaaaatggccgagaatgtggtggaaccggggccgccttcagccaagcggcctaaactctcatctccggccctctcggcgtccgccagcgatggcacaggttagtttcggcagccccggccttccacgttccctttaatcttttctactcggtgcgcctttattcttccattttttttttcttcctctctctctagttccctgccccttaattaattttaaaggtatttgaatgagctggtcgaagacgtccagtagcccaaccattttctttgcctcctaatacattgattgcaacactatgtcatatcggtgtgtgttctggaattagagctcgtaagtgggtgctatatagaaatggcctgtattgttgctctcatgcaatttaatttgggaaatgccaatgcatttgtgtgtaagagctcctatgcaatttaagtttcattttttttgttcttggcaaatgaatttcgaatcctttctccttactgtacttactgtgtttcctctactttccactcttmgaaattttctctcctttgcagaatattttctgttgaggaatagggtgtaaaaaaatcttgattttgtgtgtgcgaggtccaagatttcaggttagaggtgaagtttaacaattcttttatcttacctaccattcttagcttttttttcctttttcttcttatttgctttaagaatcaatatggagcgcagttcatttcacatctcccagttctttggtgtgagaccaaaatgtctgaaactctgggtttttaggttgggagaacaggggcatgttctttgcagtttgcagtcactttctcattttaggggaaataagataaacaattttgtggagttacgtacctggaaatcaaggttagaagttgaaagagttccaatcatgaactacaaacatgaactgattgtacaaaagtttaaaatgtgcattaggtttggtgtttgtgtgtgtctttgtctttttacacttttaaacatacttggagatcaagattttcgtttaaaagctttacgaccagttcattcagttgtggactagctcctttgtcaggagaagttcagggagacttcttccatcatcccttcattcttttcttacagttagtttaatggtgttatcctgatgggtaaggaccttttctttgctgggataatgaagatgaagaatggctggccatctgacagtccacaagatgttcccctttactacggagcatctctttaactccctgagagcaggctcagcgtcatccctccatctgccagtgagagtgcataatggagttaaatgtaccctttgagtttgtagagaacttcgagagcatgtttctaaataggcttcatttcagagggtgaaaatgggaagacagagctaatgctttgaattcgttgcttttataagaaagatgtgaaatgaatttaagttaacctgcaaaaattgagaagtaggaatcttgcgagttcctctacctaaggcttgtaacattgattatgcatgaactttgatctgtacctattctatgaaggtactgtagtctccagggatttttttagctggttttttccttcagaattcatacacatacacaaacgtcgttgtattcctttgcacctactaaagtgccattcagaaacattttttagatcatctttagasacttaatcacctgtagatttttgtggtgtttctttcgtatttgtgtaatgtggtagtttttgctttttagttttggtgtaacgtggtagtcgattttacattggagttagccagtgacttggaacgtaggggaaacttttttgtgtactttgagtagtcctgatttgagcagtttcgtcttggagctgtattgtttaaatacttctgttcaggtgtgctactactttctccatgtcggtctgttttgctacttgaaatatctttgaataattacaagagttttaaatgtgttaagtgggcttttatagtttaaaaaaaaactcaacattgagattaattcattcactcataatgctaagagtttatcttagttacttttctaaattttgtaatgagggttaactttacccccctccccaaatcaagattctactccaggaattctttggtgtacggtttttaattgtaaccagtctgggtttgggggaggggagaagtgagtataaagaaaatactgtccctctgttaacttacttcaagttgggtaccattgtaattttttttttttttttttttttttttgagatggagtctcaytctgtcacccaggctggagtgcagtggtgcgatctcactacaacctctgcctcctgggttaaagcagttctgtctcagcctccctagtagctaggactacaggcgcagaccaccacgcctggctgatttttgtatttttagttgagacaggatttcaccatattggtcaggctggtctcgatctcctgccctcaagtgatccacccaccttggcctcccgaagtgctggggttacaggtatgagccgcccggccagaggtaccattatatcttgaattttttttttttgacattctgcagtttgtaatatgtttgcaggtaacttttattggaggcacatcacctcttaaaacttttaagtttcaaacttgtaacttttgatttttgagttgtcacttgggtattttataaatgtgaaagaaaattatttcttgatattatggtttttgtctagaactggttgaaataagcccgaaattctagcacctaaaacttttttaaaaaaagtgatttaggcttgcaaatctcgtgatgtaaatatatccaccaagagcgttctaatgtcagctttaaaggaaagaaaactggaatccaatgggatgacatgctaaagtgttacaaatcaaattattacttaaatctcaacctctgaattgctgtttaatactcagatattctcctaaaaaatttccaggttgattcaaataacttaggttaaactcaacttttacgtgttgggatggggaagagaagacttatttgtagccttcacacctttatgttcctgtttcagtatttgcatttgatccattgaaatttttatttcatttggtatggttagggtaaaacaaatcatttgagaaatgacattttgttctccctctccctccaaaaaaaaaagattatgaaagccacttgtaaactttttttgtaaaaatgaccaaaagactggaaaagttaatgttaggcaaatcctggaaatatcttttggagctgtttctgatcatcttgagtgatggaaatgatgagggtcatctgttgtcttcattactcagtgaacacgttttgtcactgcttggtaaacgcttaatgccgtatgcacttaaaaagcacctggaaagataggattttaggatctggcatataattaagtagggtaaagatccttctggtcttggtacagttttgtggccctgggttttgtgcttttttgttttttgagtttttcccccatttcaaagacacagggcagatagtgtgtaaagtatacctgctttttgaccagtagattaatgtacacagtggagaagtggtaaggctttttaaaatgtcagctctactttttttttttttttttttttttgagacagaggtttrctctcgttgcccaggctggagtgcagtagctcgatcttggctcactgcaatctcaacctcccaggttcaagcgattctctgcttcaccctcctcagtagctgggattgcaggtgtccacaaccatgcccagctaagttttgtattttttagtggagacagtatttcaccattttggccaggctggtctcgaactcctgacctcaggtgatccacccgcctcagcctcccaaagtgctgggaatacaggcgtgagccaccatgcccggctgtcagctctattttcttaaaatgccattgtgttagtggttcgtcatcctaaccaaaacattttgatcaagaccatttattttccagctctgtaacttgtgatatgctatgttttattttattttggcttgaatgtttacataagagtttgcttctggagtcttgcagatatagctcctgatttagtgaggcatttctctcctcagtattaaattgcaaaacattttactaaagtgctttaagtttttctggcaattattctcaaggccttgtaagttcatttataggacttcaagaaggttgtctctggttgatagtgagataaagtgacttttaagttgtaaatcttgaatgcgttacaatatgggggtcttattccagcaggagttcatcttctatagcagaggttggaattgtattggcatgtccagtgaatggataatagggaggagggaggaaagggtttctgccttggtggccttttggcattattttgtgtttttctttgcttttctctctcttctttatttaataaaaacaaaaaaatggaaayagttgaaaattaatgcaaagtggtatttgtagggacattaagtggtaaataggaaagagaaaaagagtaggaagagtgttgcagatacaagtgggagtgtaaaatactttttcctggtatatttacaaaaacaatttgagagttattctgccaattcatatacccagcaattaatggaaaagtaaaagatgctagttttatgtttgtccagattttagggtttccttctttgaagatttctaaagttgaatatttttttaagtgaggcaagcagtaaaattaatgggcaaatgaaaccaattataccaagtctaaaatttttcttttttttttgaggcagagtctcgctttgtagctgggactacaggcgcctgccaccatgcccagctaattttttgtatttttagtagagacggggtttcaccatgttggccatgatggtctcgatctcctgaccttgtgaacctcccatctctgcctcccaaagtgctgggattacaggcgtgagccaccgcgcccagctaaaaattttttttttttttaatacttttaagttttaggatacatgtgcacaacgtgcaggtttgtcacatatgtatacatgtgccatgttggtgtgctgcacccattaactcgtcatttagcattaggtatatctcctaatgctatccctctcccctccctgctaaaaaattttttaacattgaacttcgcaggtgattttttttcgcttaatagacggtagtttcattttgaaattttcatgggaaattactgctcactttcccagaagcgcttaagaggataaataataattgaggtgttaagcctcttctgagcaatttggatataatttgtttttagatctagattcttttttataaatgtcccaaagcaattagaagtgattgttttttttgagacggagtctcgctctgtcgcccaggctggagtgcagtggcgcgatctcgggtcactgcaagctccgcctccygggttcaagccattctcctgcctcagcctcccgagtagctgggactacaggcgcccgccaccacacccggctaattttttgtatttttagtagagacggggtttcaccgtgttagcaaggatggtctccatacactgacctcgtgatccgcccacctcagcctcccaaagtgctgggattacaggcgtgagccatagcacctggccctagaagtaattttgttgagagagagagagtaaaactaaaagtactgaaaagagtaagagagtagctaagagaatgagtattggagtcagactgctagagttcatagcccaggcttgtatttattaactgtgaactttgggccaaatacttaacctggctcaacctcctcacatttattcctaaccacagccctgtaaggtgggtgcgcaccttataggaatccaccttacttacccaccttacaggattrtggttaggaataaatgagaattctctttatcagatgcttaggactatgcttgcttctgtgtagtatgtgttcattgttaactgtttttaactttactgctaaatatatcagaaggaaagcagtggtagatggtttgggggttgtttttgtttttttgatttgcaacgaagtcttgctctgttgcccaagctggagtacagtggcgtgatctcggcctatgacaacctccgtctcccggcttcaagcgattctcctgctcagcctccggagtagctaggactacagctgcgcagcaccatgcccggctaatttttgtatttttagtagagacagggagtcctgacctcgtgatccacccacctcggcctcccaaaatgttgggattacaggcatgagccaccgcrcccggcctgtttttgtttttcgtggatatacagtagtccccccttatccttgcgggatacattccaagatctccagtggatacctgaaaccctgtatagtagtgaatataattgtcatcagtcagaacacgtttctgtccgtgtcttccacacacaaatttaatgccttttccatcttaactaatcacttgtcatgcactgtggctgtgatgtttgcagtttgaggtacaacagcaaaactatcacgaatttttttccttcacaatttcatgtatagatttgatctttgtaacctccgcatacaattttttttcattccttattaagtcaagaactttcaccttcaagcaatttacagcttctctttggcatatccawatagctgtcattgctacttttggacttagggactgtcattaagtaaaataagggttacttaaaactcaagcattgccctgccccatagtcagtctgacaatctgataactgagatggctactaagtgacaaatggctggtagtttatacaggtgaatacattagacggaggggagattcactacccggtcaggtgagatttcatcaggctactcagaatggcgcacagtttaaaacattgttgtggctcacgcctgtaatcctggcactttgggagattgaggcaggaggattgcttgaggccaggcattcaagaccagcctgggcaatgtagtgggaccccccatccccccaccatctctagaaaaaaaatttaaaaagtcagcaaggcatggtggcatgcatctgtagtcctagcttcttgggaggcttaaggtgtgaggatctcttgagcccaggagttttgaggttacagtgagctatgatgacaccactgtacactccagcctaggtgacatagcaagactctgtttctaaaacaacaaaaattagtgtttatttctgcagttttctttgtaatatttttgtaccacaggtgtttgaaatggcagaaaatgaaacggggtaaggatgaactcctgtatagatagactggataaagagaaagccaagtgcatgatgttcatagaggagtcttaagagtaagccttatgtcatctatccaaatgttgttttctaggagtataagaatataggaacagagcttaaaatggaaaaatactgtacagttagccttccgtatctgagggttccgtgtttgtggagtcagccacagattgaaaatatttaggggaaaaaaatccatggttgcatctgtactggacatgtacagactttattttcttgtcattattccctaaacaatacagtgcaccaactatttatgttgcatttacactgcattaggtattgtaaataatccagaaagaattcaaagtatatgggtgggtgtgtgtaggttatatgcaaatactacatgtcccctttatatcagggactggagcatcctcagattttggtatctgcagtggagrgagtggattctggaaccaattcccagcagataccaagggacaaccatatatatatagtatcatgacatcttgtatcatgtcacgtatatatatatcatatatattatcatgtcacgtatacaagacatcttatatatcctatcatgtaagatgtcttgtatacgtaagtaatagaaatgaaaatcagcagatagttaaggcataatgagaaaatggaaaacattgttcttgttagaaatgtttaagaatggcttcttgataaagaactgtgttaagcatattctttcttctttttagacacagagtctcactctgtttcctagacaggagtgcagtggtgcaatcctggctcactgtagcctccatctcctgggttcaagctattctcctgcctcaacctcccaagtagctgggattacaggcacctgctaccrtgcctggctaatgtttgtatttttagtagagatagggtttcaccgtgttggccaggctggtctcgaactcctgacctcagtctgcccacctcggcctcccaaagtgctggtattagaggcgagagccacagtgcctggccaattaagcataattttttctatttttcattttcttacatggatctttttttttttttttgagacggagtctagctctgtcacccaggctagagtgcagtgacacgatctcggctcactgccagctccgcctcctgggttcatgccattctcctgcctcagcctccctagtggctgggactacaggcacccgccaccatgcccggctaattttttgtatttttagtagagatggggtttcaccatgttaggcaggatggtctcgatctgctgacttcataatctacccttctcggcctcccaaagtgctgggattacaggggtaagccaccgtgcccagccacctgggtcttaaagaataaattttcttgagatggagtcttgctgtgttgcccaggctgaagttatcctcytgcttcggcctcctgagtagctgggattgcagatgtgagccactatgcctgcctctaagaaactttcttataaaggaggaagaagaaaagtagcagtgcagtgctccaaagaatttttttacaacacttaaggaagaactacctttaacttgtagcactagagactctgtttcaaagaatgcacaagaatacttacccttattacttgtaatatactctcatattttctgttgcttttttttcttttctttttttttttttttttagtactggttgcagcctactatattgatttttatgacccactgttggcttttgagccataatttgaagaatactggcgtagaagagttgacaagatggcagttattctgtattaggccaacattttctgtatgccaggaacttatcctctgtacattgttccttctttccttcctggagtttatagataagggaagaagactggcattcacggagtctggtgtgatcagcattgtatttgggaagtacgtatatagtgggaggaacaggagaacctaacccagtagttatcctggtggctgtctttgaggaattgtgtctgattttgggatctcacagatagagataggattagtaaaaatgagcccaggctagaaaggagactgtgtgaggccaggtatatcctgttctgggaacctgtgagtgctgtctgactggtagaatagccaaaaacttgactgtagaggtgagcaagggggccaatcatggagggcttataatacaggaatttagactttccattttacccatttaatggatggggcagaattgtgctttaggcagttaagtaaaaggargaatagtttgggaagaacagggaaaaacaggaggcagggagaccagtgaaacagctgttttagggttccagccacccttaccacagaagatggaaagaagtggaaagatttgagggaagatggatgatcagcagaacttggtgactgattagaagttaggtagtaagatggacaaatcaaggataattccccagtttaaagtttgagcaacttgttgggtgatgatttatttattatttatttatttattttgagacaatctctgacccaggttggagtgcagtggtgtgatctcagctcactgcaacctccgccttccgggttcaagcgattctcatgcctcagcctcccaagtagctgggactaaaggtatccaccaccacgcctggctaatttttgtatttttagtagagatggggtttcaccatgttgatcaggctggtctcgaactctggcctcaagtgatctgctcgccttggcctcccaaaagtgctgggattacaggcatgagcagctgtgcccagctggataattatttaataaattggggagcataggaagcatagtatttgtgaagtgggtaggcaggtgtgatgggrgtagtgatgttacatttggggcattttgaagttggtggttcttctgagttgagcagtcagtcactcttcatttgctgcacctttatctcattttagccaacagacattgaatacctaccaagtcttaggtatttgcaatgtaaagacaaattaaggtgccttctgctgtcagagacttcagagatacagtggggttggtatacatgtccacacagttttcccgtaagttatgctttaaaaggttttttaaatgttatatataaaggcaggggatgggttgcttttgacagagtaggtttggagcgttgatggaaaacttcatggagaaaatgtatatttgaacagggttggtggaaattaacataccttagaagtagggaaagttggaagggtttttcagatgaagctaacatgtttctgatgtggctagaatatacgctgtgtgatagggtttttcatgggagagagatgggaaaggatgttggggttctattgtggaaagagaaatatgctaaggaatttgccatttatcttagcatcaggataagaattgtatgagcaggggagtgacatggttggggaaagactaattctggtaacaccgtacagagcagcagtaggtagaacctatggcaggaagactaggagtacattatttacctcttttgaaatgagtttgtcatttgccttggaagtttttggtacattgtaattaacaaagtgaattgtttattttgttcaagatccatgcttggtttgccagttgttataaatgtagaaaatataccagataccaacttagaaaccattcactctccttgttatttacagatatgcaaggtttttttgttgttgtttttgttttgttttgtttttaaagggtatgtttctccatctaggattccctgtaggccttcccttgtaacaaatctcaaggtttgctcaaaatcaagaaatgttcagtgacagttaagttagcacacaatttaggcttactataaaacatgtccttgagttgattcttaaggtgggattttaataaataatagtgtcttcatcatgtagtttttttggtttttttttttcatacagagtcttgctctgttgcccaggctggagtgcagtggtgtaatcttggctcactgcaacctctgcctccccggttcaagtgattttcctgcctcagcctcccaagtagctgggattacaggcgcccgccaccacacccagctaatttttgtatttttagtagacacagggttttgccatgttggccaggctgacctcgaactcctgacctcaggcgatccgcccgcctcggcctcccaaagtgctggggttacaggcgtgagccaccatgtccggcctcatgtagttattttcacaagaagtgtcactatattaatacattgaaaaagagcaaggtgaattgtcaatgtgaattttctaaacatggccccaggtcacattcttgatcaattaaagcacttcacctctttaaaattcaagacttaaggctgggcgcagtggcctacacctgtaatcccagcactttgggaggctgaggcaggtggattacttgaggtcaggaattcaagaccagcctggccaacatggtgaaaccccatctctactaaaaatacaaaaattagctgggcatggccgggcacggtggcttacgcctgtaatcccagcactttgggaggccaagacgggcagatcacgaggtcaggagattgaaaccatcctgggtaacacggtgtaaccccgtctctactaaaaatacaaaaaaattaaccccgtctctactaaaaatacagaaaaattagccgggcgtagtggcgggcgcctgtagtcccagctactcaggaggctgaggcaggagaatggcgtgaacccaggaggcggagctagcagtgagccgagatcgtgccactgcactccagcctaggtgacagagcgagactccatctcagaaaaaaaaaaaaaaaaaaaaaaagccgggcgtggtggcaggcgcctgtagtcccagctactcgggaggctgaggcaagggaatctcttgaacccgggaggcggaggttgccatgagctgagattgcacctgggccacgagagtgaaactgcatctcaaaaaaaaaaaaattcaatattgaaatgttttgggtttttttgtttgtttgtttctttttttgagatggagtctcactctgtcatccaggctggagtgcagtggtgcagtctccactcactgcagcctccgcctcccgggttcaagcgattctcctgcttcagcctcctgagtagctgggactataggcacatgccaccacagccggctaatttttgtatttttagtagagatggggtttcactatgttggccaggctggtcttgaactcctgacctcatgatccacccacctcsgcctcccaaagtgttgggattacaggcgtgagccaccacccctggcgtgttggggtttaaaaagaataaacttcaagttaatctcttcccaaagtataagtataccttttgatgtcatgatagcaggaccatgtgaagagtacatattttgaaatttgcttgcacttttgccctttcactctattggatttcaaaattcaacagctgtcagcatttgtagctgtgtaatcctgtataattatcatcttttatccaaatttgtataaaacttacaagttttcctaatttttttggagtattagagatcttgcctgtctttccagcatggatattttattttaattttcttaatgttccttcaaattacgtagtttgaaatgtttgtacatctttatttccttgctagatgggttgtttatatgattagataattcttcatttacagagggttaaagtaactttttttaaatgaagtactgaatagaggttaggaaagttgttggaacctgataaatttgtaaaatttacaaaatttctcattttaaaagctacagttttaaaatttcatgctttttaagcatccattgtaagagtaggagtgtccaaaagcaataagaacaagaaatctttgtaagattggtagtttcagtgtttagccaaaccattatcagaattagaatgactaatgttatgtaggtttggttttcaactccattctttttttgtttcattttttaaaaaattccaaatctctaacctggccttggcgctctgagtcttctgatctctgcccacctcatcactcactttgttctccccattttgtttatttcaattgctgaactggctgagcttttactctccccaccttaggttgttccactcttcatctgtcaagctcctactcatcctgtggactcaaccactgggttagatgaaagaaaagtttgacgtgtccactctttaaaaacattaagtgttttttgttgtttgtttgagactgtcgtccaggctgtagtgcagtggcgcaatcttggctcacggcagcctcgacctcctgggctaaatgatcctcccacctcagcctgtagctgcaccaccatgcctggctaatttttaaattttttttgtagaggcagggtcttgctatgttgctcaggcttgtctaaaackcctgggctcaagcagcctgccttggcctcccaaagtgccatgattacagttgtgagccacctaccaggtctggcctaaaagcatttttttatttttrttttttgaggtgggatctcgcactgtcacccaggctggagtgcagtagcgtgatctcggcttactgcaacctccgcctccaaggttcgggtgattctcaagcctcagcctcctgagtagctgggattacaggcgtgcaccatcacccccggctcatttttgtatttttagtagcgatggggtttcaccatgttggccaggctggtctcaaactcctgatctccgccagcctcggccttccaaagtgctgagattacaggcatgagccacggtgcctgacctaaaagcattttaatgccacagagaaagccagctaaagggaggaggagcagtagatggattctgtcttctaagtgggatttgagaattgactggattttaaataattaataaaggtgttttacttaatgaacacagtttaagagaactgagttgattttacttcattttacctaaagtacaaaggtaagtgtgtttactcaaataatatgtgagccttttaagtaaaaaaaaaaaaaagtgtaactgtgagagatactaatatagtagaattagattttgagccaaaattgttttaattttaaattacattttgtgtcatagttaagtaactagaaaattgtctgatttatgttcatagtacagtgtttgggattatatttttaatggttctaattttgaaggttatgcttcatttatatataatacttcatttgttcaatttctcacgtatcattgaattattttgatcctttgatttttggaaaggctaaatgaaccgagattattttttatttatttatttggagtttggcttttgttgcccaaactggagtgcattggtgcagtctcggctcactgcaacctctgcctcctgggttcaagcgattctcctgcctcagcctcccaagtagctgggattacaggcatgtgccaccacacccagctaattttgtattttttttttgtagagacagagtttttccgtgttaggctggtcttgaactcccgacctcaggtgatagcttgcctcggcctcccaaagtgctgggattacaggcgtgagccaccacgcccggccaccgagtttattttataagggattatatggttacatctgttgcaaggagcaaaccacaagcaatatagaagacaacaagggtgatctacagaatcagtatgtgataatgaaaggatgttttgactcaacactagtttccacgtgtttaatccaaactcagttgttgtttaaattgttaaatttctaatacacggtccactgggtaaaccatgtattaggctaaacttttctttttctttttcttttttttttttttttttttttgagacagggtctcattctgtcgcccagtctggagtgcagtggcgtgatcatggctcgctgcaacctcaacctcctgggctcaagcaatcctcccatctcagcctcccaagtagctgggactacagatgtgcaccaccatgcctggctaattttygtatttttttgttgacactggtgtccttctacattccaggctggccttgaactcctgcgttcaagcaaccctccagccttggccttccaaagtggtaggattataggcgtgagccacggtgcccaacctatgctaaacttttcacatcagatttatatgtgtcctgtcccgttttacttcaccatgattggactcagtgtacactcagatgaagaaacttcaaaaaaaaaatactgctccttgtgaagcagaagaaagattttactgaaagtgatgtttgtattggagcatcattaaaggcataaaggaacttgtgaacaaactacttggtagaagcagcctggtgatgttgattggttgatactttaggaagcgggaaatgtcttactggagatagttccttcatttcaacagtcatttgtgatactgttttttaatatttgccataggatagttaaaaggtaatggaacaaacttcagatttataagtttttaattaaatataaagggggcaaaagtagataaatatcttaagagctcaccttactgtctagaaaaaatacttgctggcccagcgccgtggcacacatatgtaagtaatcccagcactttgggaggccaaggtgggaggcttgcctgagcccaggagattcagaccagtctgggtaacatggtgagacccccatctcaacaaaataaaaaattaggtgtggtgatgtgtgcctttggtggcagctactaaggaggattgcttgagccaggaggtgaagctgcagtgtgctgtgatcccgtcgctccactccaggctgggcgacagagcaagaccctgtctcaaaaaaaaaaaaaaacaaaaaaaaacggaaaacataagacagcaatcaaatacaatagatttggcttcagtaaatgaaaaccctcactgtaggccctagaataacaagacttctatattactaaagctgattactgcttgatgaactctgtacatgtgatgtgactagtatgaacttctgaggttgttgagatgaatgagaataaacgtgaggtgccaagaaaaatgcctgacacattgaaagtgctggataaatgtatgctgtcatcattgtaagctgggctatctcctaatagtgtaatgagtccattgaataacaataggtaacatgtttatagtgcttagtgtgtgccaggtactgttctaaacactttacatttattcactcatttaatcacaaataacatgaagtaggcactttgctgttatgcagagatggaaacaaggttatccctgcatcttttttttttggcagggggaggaggacgggaacggatggagttggtttttttttttggagcttctgagacccaagcttcaggccatgctcccccaagcacctccccaccaccaccccccaagatgtagtcttgctctgtttcccaggctggagtgcaatggcgtgatctcagctaaacggaacttctgcctcccgggctcaagcaattctcctgccccggcctcctgagtagctgggattacaggcgcctgccaccacgcccagctaatttttgtatttttagtagagatggggtttcaccatcttggccaggctcgaactcttgacctcaggtgatctgctcgcctcggcctcccaaagtgctgggattacaggtgtgacccactgtgcccatcctgttccctgccccccccccctttttttttaagttattgagacagagcctcacttggtcacccaggctggagtgcagtggcaggatcatagcgcactgcagcctcaacctcctgggctcaagcaggccctttgagtaactgggacctgtaggtgcatgccagcatatccagctaattttttttttttttttttttttttttttttttttttttgagacaaagtctcactctgttgcccaagctggagtgcagtggtgtcattgcarcctccacctctcgggttcaactgattctcctgcctcagcctcccgactagctgggactacaggcatgctccaccattcccggctgatttttttatttttagtagagatgggatttcactatgttggccaggctggtcttgaacacctggcctcaagtgatccacccgcctcggcctcccaaagtaaagtgctgggattgcagatgtgagctaccacatccggcctatatccagctaatttttaaaaataatatttttgtagagaggtggtctttctcccctcggccttccaacgtactaggattacaggcgtgagccacccttctggctgtcttttcctttttattttttcacacttccagtggtccttgggatctgtgtatactttagaatcatcttgtccagtttcttgacaaacttctagaagtttgattgatactgcattgaatctatagatcagtactggggaatgatgtttttaatactgaggatttctaagtgtttgagatattctgtttagtcagcctttacttttgagtttacacctgttttatatacattgtcagtttttccctatgttataaatctttttttttttttttttaaatttgagatagagtctcactcttgtcacccaggccggaatgcagtggtacaatctctgctcactgcaaactctgcctcctggatgcaagcgattctcgtgcctcagccttctgagtagctgggactacaggcatgtgccaccacgcgcagctaattttggtatttttagtggagaccgggtttcaccacgttggccaggctggtcttggctggtcttaaactcctgacctccagcagtccacctgtctcagcctcccaaagtgctaggattacaggcgtgagccactgtgcccggctctacattatttaaaaaattatttgtaaccatttgttgctggcatacagaaattcactttgatacgtttatatttatggtataaccagtcatcttgctaacctctcacaatttccagttgtrtgtatttctttaaaattgacaacagttgtgtatattcatgggttatagtgtgatgatatatgtatttgctttgaactttctatgtcaacagttatattatctacagacaataagttttgtttcttcctttttcctttttctttctttccttcttttttgttttgagacggagttttgcttttgtcacccagggtagagtgcaatggcactatctgggctcaccacaacctctgcctcccaagtcaagcgattctcctgcctcagcctcctgagtagctgaggttacggcctgcaccaccacgtaccgctaattttgtatttttggtagagacggggtttctccatgttgctcaggctggtctcgaacacccgacctcaggtgaacgcctgccttggcctgctaaagtgctgggattacaggtgagaaccaccatgcccggacttttttctctttttttttcttttttagaacttgtaaccttttttttttttttttttttttttttgagacagagtctcactctgtcgcccaggctggagtgcagtggcgcgatstccactcactgcaagctccgcctcccgggttcacgccatcctcctgcctcagyctcccgagtagctgggactacaggcatccgccaccgcgcccagctaattttttgtattttttagtagagacggggtttcactgtgttagccaggatggtctcaatctcctgaactcgtgatccgcccgccttggcctcccaaagtgctgggattacaagcgtgagccaccatgcctggccacctatttttttatgtgtgtgtgagacagtctcgctctgtcacccagcctggagtgcagtggcactgtctctgctcactgcaacctctgctcccctgggttcaagcgattccttgcttcagcctcccaagtagctgggactacaggcgcctgccaccacacccagctaattttttgttttgttttgtttttagtagagatgkggtttcgctatattggccaggctggtctcaagctcctgacctcaagtgatctgcccaccttggcctcccaaagtgctgggattacaggcgtgagccactgtgcctggccaagatgaatcttatattttctttatcctttgttactatggcgaatgacagtttatagatgttctggtgtcccctggattcctgggattatcccaacttgatgatgatttttgagcctttggtttgctctttttaaagagtcttgtttctgtgtccatgaagaagattggcctgtgtttttcttatattggccatgtgtaatttttatattatttgttttttttttttagaagtatttgtgttagcttgaattgtattttccttgaaagtttggtgtagggcatgcctgtaaacaattcggatatggtgctttctttatggaaagattaaccaagggcttattttctctagtagcagtaggattacagtggtctggcttcccatgtgcctattacccagcttcaggtttactagtatattatactacccttccccccttttttgctggagtattttaaagcaaatcctagccatgtcatttcaccagaaatatttcaatgtatatctttcagtaaaaaggatttattttaaaataatgccattgttatagtcaataaagttaatgatttcttaatatcacccatttctcagtctgtacctaaatatgtcttaytctcatttcaaaatgtgtgtttatagttggcttgtttgaatcaggattccmccccccccccaacttatgctatggatttgttggagaaactgggacattccatatcctatatgatttcttttttattaaggtttgagtattttctccggaatttatttattttgtatgttttcttcatttgtataaagttgatagtattgctttatcttttaattttctttttttcttaaccttcttgaagttcgtcttttgttactccaaaaaactaacttctagttttggtaatgctgttacattcctatttcctgtttcgtttatgcttttgtctttgattgtcttcttcatattaatactatttttctaatataatttggatacttaattcattattagcaacctcaggagactcactggagagttcattaatttgtaactttatttattattattatttttttgagacggagtctcgctctgtcgcccaggctggagtgaagtggcgtgatctcggctcactgcaaactctgtctcscgggttcatgccattctcctgcctcagcctcctgagtagctgggactataggcgcccgccaccacgccctgctaattttttgtatttttagtagagatggggtttcaccgtgttatccaggatggtctcgatctcctgacctcgtgatccgcccacctcggcctcccaaagtgctgggataacaggcgtgagccactgcgcccggcctttttaactttattttctaacataggcctttaggttttgaaatatattttttattactcaatttcctttgtgatttcttttgtaatttatcactgcctgtttttaaaatttctaaagtggagatttttttgccctctatgttcagtatgctaatgataaaatattttcttggatactccaggggaaaagtaaaaattgcaaataaagtatgatctcagttttgtaaatcacgtaagtataaggaaataatgaaggaactatatcagtatattaagcaggcatttttgaatagtggttttaggtcagttttgttacacatttgggtatttkttgttgttgttgttgttgttgtttgagataggatctcgctctgtcacccaggctagagtgcagtggtacattcacggctcactgcagcctcaacttcccaagctgccgctatcctccttcctcagcctccctagtagctgagaccacaggtacaggccactaggcctggctaagttttgtrtttttttgtgcagtttggttttctccatgttgcccaggctggtctgctgagctcgagccgtctgccctccttggcctcacaaagtgttgggattacaggttgtgagccaaagtgctcagccttgtggcacatttttgatggaggagcccatatgatatttcaaaaggaaagagtaattctgtaaaactctggactctaaattatgccctgagatcttgggatacaatttgacttagttcatatatgaccacatgttggtttagttaatatatgaccatgtgcttactatgttgccagtaggcaaggagctggtatataagtggtaaaacatgtccttcgcgaagaatgcatggttggagtgaggggtggtcacaagggatggcaaggggaggagaggaggcaaacccagagataatttcagtgacatgataaaatgctaaaagatacagaaggagcaggattgggaagaaaaaaaaaaactacaagaagaggaagggcacatacaggaagagttatacttaggaactaagattaattggatcaagtagaccattaaggcaatattttgtcttcaagggatggtccattttttaagaggataatagctgtggaatttttgttgttgttagtagacaaggtctcacagtgcccagacttgatgtgaattcctgggctcaagctatcctcttgcctcagcctcctgagtagcttggactatagatgtgtaccactatgcccaacacccagtaatgcctttttaatgtgaaaactactttagagaattgaaaggaaagaaaactcaaataatttytatartaggttaatactgtcaataggtcaatcaggagtaattttcttcccccaggggatgtttggtgatgtctggagacagttttgattgtcacaattgggatatgggtgctactggcataagtagaaagaccaggagtctcctaatgataatagagggcacaagacaatcaccctccacccacaacaaagaattatcacatagctcaaaatgttaatagtgccagggttgagaaaccctgcattaatctatacttagcacccagttttgtttgttcttttttgagacaggatcttgctctgtcacccaggctggagtgcagttgtgcagttaaagctcactacaacctcaaattcctggactcaagtaatcctcccaccttagcctcctgagtggctaggagtatagcctagtgccaccacacccagccgactttattgtttgtagagacagggtcttgctgtgttgacctgggctgaagaattcctcctgccttggccttctaaagtactgagattacaggtgtgagctaccagggctggtcttgcaccctgtttttggtaggggtggtttgtatggtgaaggagccagaggcatggtgttgtaccctattctggctagactttggttaaggaaagctattctgtaggctacaggtcaaaaactccgcctgttaaaggcctactttgaggcaggtactatataggaacttggtaaaaaatggtggatagccctctgcttaactggagcacacactgagtgttccacaaatgacaggtcttttgtatcagttgtgtgtctttatgtattacaatatttaaaatgttttctttccatcctgagtttagtttgtgtgtagatattttaactgttcttctaaggaacttgggaatattaatacagcttaattgcatttcttttttccatgactgtggatacaaacctttagctagcaactcatgtaataatgggtgttgcactttttttttaacaaaaaataaaattttatttcaactattatgctaattctataacattatttagaatgtttttctttttttaattatcctttaagttttgggatacatgtgcagaacgtgcaggtttgttacataggtatacatgtgccatggtggtttgccgcacccatcaatccgtcatctacattaggtatttgtcctaatgctatcctctcctagccccccatcccccagcaggccctggtgtctgatgttcccctctctgtgtccatgtgttcgtatttaactcccacttatgagtgagaacatgcggtgtttagttttcttttcctatgttttctgagaatgatggtttccaggcttcatccttgtccctgcaaaggacatgaactcatccttttttatggctgcatagtattccatggtgtatatgtgccacattttctttatccagtctrtcattgatggggggtgttgtactttcaatcccttttttccttggtcttattttaggtatagttcttaagtgtttaagtttgttgatataaccaaatatcccctcaatttaaaaaatctataaaatggttttagtatgacctaaaaaactaccatacaaatagtatatatatagggctgtgtgtggtggctcacacctgtaatcccagcactttggaaggccaatgcagacagatagcttcagctcaggagtgtaagaccagccaggtcaacatggcaagctccgcctctactaaaaatacaaaatttagctcggtgtggtggtgcgcacttgtagtcacagctacttgggaggctgagatggtagaatcacttgaacctgtggatagaggttacagtaagccaagatcgcgcaccactgcactccagcctgtgcaacagagtaagaccctgtctcaaataaatagaaaaacatggagtgaggttkggaaatgacatttaatgcttattgagaacaatatagagcagttttttattttggttttgtcatactttgacctttgtcttytccctttgcttttagattttggctctctatttgacttggagcacgacttaccagatgaattaatcaactctacagaattgggactaaccaatggtggtgatattaatcagcttcagacaagtcttggcatggtacaagatgcagcttctaaacataaacagctgtcagaattgctgcgatctggtagttcccctaacctcaatatgggagttggtggcccaggtcaagtcatggccagccaggcccaacagagcagtcctggattaggtttgataaatagcatggtcaaaagcccaatgacacaggcaggcttgacttctcccaacatggggatgggcactagtggaccaaatcagggtcctacgcagtcaacaggtatgatgaacagtccagtaaatcagcctgccatgggaatgaacacagggatgaatgcgggcatgaatcctggaatgttggctgcaggcaatggacaagggataatgcctaatcaagtcatgaacggttcaattggagcaggccgagggcgacagaatatgcagtacccaaacccaggcatgggaagtgctggcaacttactgactgagcctcttcagcagggctctccccagatgggaggacaaacaggattgagaggcccccagcctcttaaggtaagtacagttttggtttgtgtgcacaatcggcatgcatgtgagtattgtcatgatggatggagggtttgccttacattgtatagcagtttccactattacacgccaggaatttactgtgctgtcataagttttaagaagtgcctgtatttaagtaaaacgtttattttacagctggtattctataacttcatacttccaaatgattgctggctaatgctggttctctctggcacaagtattggaatgtttttatctcatttccaagtccagtttagccttgtagcctccttataaaattacagttttgagatggctggcattacactrtcttcagatggatactccatttgttcctattgctttgaatgtccctggttttcaagagatacatttattctgagaaatgtattaactgttatttttctttattggttgatggaaattaaggtgcatttgttcatgtgaaacctcaacagtgtagatgtttcagtgaaccagaacttggccaaagacttctgttagctttattaactagagaatgctaagtatattaaaaatattttaaacttttaaatgtggatcctgtatacataaataaggcataatcacacatactttagtgcttatttcttcatatttttctttacatattttatctgtttttcttaaaatgggatcacactatggttgccagtgcctggcatgtagttcgtttttgttgaatgagagatggcttcacttcgaagatgaaattggagataggtacgattttcacaaggagtcaagagcaagctttctctgtaacaggaataatttgagcagacatcaggacttctgtgttcctgagaatcttgggtgcagtggctcatgcctgtaatcccagcactttgggaggccaaggctagaggatcgcttgagcccaggagttaagagaccaaccaggtagcattgaccccatcttctatttaaggggaaaaaaaaaaaaagaaccttgatggtgacagagaatgcaagtgtgaattgaagacagatggacaaacttgtgttggggggaactgaggtgacatgtaggaattcaaaaaccttaaatttttttttgctgcgagaatattgacaagttaggattctgttttagcattcctttgtagattctccctttctgcccctcacccccgccaccttttttttttttttttgagacagggtcttactctgtcacccaggctggagtgcactggcctaatcatggcttactgcagcctcaacctaccaggcttaaacagtcttctcgcctcagcctcctgagtagctggaactgaaggcacataccaccatgcctggcttattattattttttttttttttttttttttttttaagagatggggtctcactatgttgctcaggctaatctcaaactcctcttgggctcaagtgatcctcttgtctcagcctcccaaagtgccaggattacaggtgtgagccactgcacccatcctctgacacttttagattgccgtgtcagtgtagtttacttagaatatttggagtgagaaccaaaaacaaggtaaattattaagtacctcttctaggatctaggaacatagctatgaagagagaaagtccttgccaccgatgtttatattctgttacggagaggagggatgacttacaataaaccctcactggtggacaaaatactttagggttaaagtagtgaatgaacttattttatgtaacctactttctactgtgcacataagatataaattttagagtatgccaggtaagtgctatggagaaaaataaggaaaggctcattgacatctgcttgggggtgtgggactattatggttataatcttaatttctttcagaaactgggtttatatagaagtgagcaaaacaaaaatccctgtccttgtggagcttgtattttgatgagaaggaggaattcaaattttaaacttctgttaaacgatattttatttccttatttgatttttattttgagaccgagtcttgctgttgcccatgctggagtgcagtggcgtgatcttggatcactgcaacctctgcctcccgggttcaggcagttctcctgcctcaggctccaagtagctgggaccacaggcatgcgccaccaagcctggctaatttttgtatttttagtagagaaggagtttcaccatgttgcccaggctcgttgtgaactcctgacctcaagtgatctgcccacctcggcctcccaaagtgttgccaccgcacctaggcctattttcttattttaaatgaatccacctatattgatattttgtagagtacttatatcagtgtttgacaaatgagggagctttaaatgtttaataaatttaacaaatgttttaagttatgtaggtttaggataagataaccacttaaggctggatgcagcggttcacacctagaatcattccagaccagccccagcaacatagtgagacccccatctctaccaaaaacaaaaaattatccttgtgtcgtggcacacccacgccagcagttgcccttccactgtaccaagtcctaaaattatcttgtagagcgaattatactcattacatttcttaaactcctaagacttgtgatatttaagaattaggatttaaggtgtaagaaagttttcagtaagatttgatgactgtaaccctgttggcaaatgacatcagcttttgcacaccgttcttgtcatggatgaatctgtggttcaggaggtgcaggcaggtggtgacattactactacagctgtcttccaaaagtctgacctatggtgatttataggaagaaacttggatcatactgscttttaccccaatctttagattcagcataaactaatcaaagccagaatgttttaagttacttttgtttttgagacaggatctcttcctatcacccaggctggagtacagtggcaccatcacagctcacttgcagccttgatctcccaggcttacgcgatcctcctacctcagactcctaagtagctagtactacaaggactgtcatgccctgccagttatttttatttttgttgagacagggtctcactatgttgtcttggcatcaagcaatccacctgccttggtcttccaaagtgctcagattacagacaggggccactaagcctggccacatttttttcaagaagaaaaaataggcatggctcagtagttcacatctgtattcctaccgctttgggaggctgaggcaggaggatctcttgaagccagaagttcgagatgtgcctgggcaacataatgagaccccatctctacttttcttttttcttttttcttttttttcaaaaaagaaagaatagttgtctgcaggacgcatttcttgtagctgcctagaactttgtgtggcttcctcaccctctcctttttagtttaggtagctatttgtatggtggtgggtaattggacatctggagcatattagctatggagaaagaaacaagatcaaataactatagtgtagcagaaattaagtacaaaatcttccttattacatttagtgtggggagtaaagaagcagggctcaggagatagaaggggcagtgatctggaggttggttggtattttattttctaattcctcagcagatctgtgtgggagatggaaaaacaaaagctagagaatcttttttggtcacagtgaccaaaagtgtcaggaagaaattactgccagctgatcagcaatcagtgtagtctgtgtatttaaacccatagtctgccatagaggagcttggagtttccaggtaatgcatcgtgatcaagggaacaagcagtgtcaggaattggttgaaattcagttggtctaggcaggcaaggcatgcaatcatgaaggaccagattgtttggggaaatatttggataaagacattacatttattaacaagagacaacaacacagcttagaaattccaacattttgttgattcagataataggactcttgagggcataatttattgtcttagtcttttattgtttgtcatgcgggttctgtgatagaatgactttcatactatrtctatcatgaattttcatgctaataagaaacaggttaaacaactcccccatgtataggtatggatattattggagccacataggataaatactagtagtttaaaaaaaacataggtagcagcagcacttgcagtcagatttgtaactaccaaaagtagcctggacttgatttaaacctgtttctgcattctattgcccctgcaatcttttggccatatttacatagaatcaagaaggtttttttctttcttcttcttcttttttttttttttttttttttttggagacagagtttcgttcttgtcgcccaggcaggagtgcaatggcccaatcttggctcattgcaacctctgcctcccaggtttaagtgattctcctgcctcagtctcccgagtaggtgggattgcaggtgtgtgctaccacgcccagataatttttgtattattagtagagacagggttttaccatgttggccaggctggtttcaaactcctgacctcaggtgatccatccaccgccacctctcaaagtgctgggattacaggcgtgagccaccgtgcccgaccaagaaattatcttctctgaatgcttctcatttcaggccacctcattcttttatgcttccatcaaactgccacttgtaaattacttgtaaatcattcttgtaaattacttaccttagtctctgaatttcatctggaaaatgaaaatgttctttaacttttttttttcattttttggtaatagtataaagaagattaatttacatttttttgttttttttaatagaggcaaactgctgaaccaaaaaagatgtcatattcatagatttgcagagtatagatattgcatatgatttaaagaacgaattttaggccaggcatggtgggagatgcctgtaatcccagcacttaggcagaaggattgcttgaggctaggagttcagtcaactcctgggcaacatctctacaaaaataaaaacaaaaattagctgggcatggtggtgcaagcttgtagtcccatctgcttgggaggctgagatgggagaattgcttgagcccagaggttgggaattataatgagctatgataatgcaactgcactccaacctaggcaacagagtgagaccctgtctttttatataaaaagtaaaagaaaaattttattaagagctttgtacctgtccaaaacagatgcttcacagaggtagtaacatttgaaattacaaggatgagtagaatctgcaggtgtttcttagttaggttgtactatctaaggaaccaacagaaaatgcctctctgtgaacttggtgtttatttccaggttggcattaaggagtcaaataggaaagaaaatgtgctactgttcagttgtagggaaagggaaaagcttgaggcaaatgctggaggctcaaggagcgtgatactttcagactttaagaaatcagtacaggaaatatataagataccatagataggtagtcagacttcataaaggctttggtatacgtactgtggggttgatttttttcttttatagaggcaggtgaaaacagaagacaggcaaacctgttgtccacagtctgtacaagcactgtgataggtttgagttaagacagtcacagtaggtaggaatacatgggaagggttttagtgtctatgtgtgcttttagaggtagaattgaaggaccctttgattggtcttagcagacagaaatctggtatgaatcctttaattgggcagtagctatagtatcttgagttattctgagtgtttgctcaatgtttctagtagtgatgatgacttgtagttgggatcctatgtgtaatttggcagaagaggacggtggcttcaaactttgtttgggatataaagttgaccccattttgaattattttaaaataatttgaaagattaatgaaaatgcatttttataactttcattattagtaaaacgtttgactttagaataatgctgtttttcaattaattattattatagtataatggctccaggtgaacttaacataaatatagaacataaactactttttaaagtacagagggagccggcacagtggctaacgcctgtaatcccagcactttgggaggccgaggtgggcagatcacttgaggtcaggagttcaaggccagccttgccaacatggcgaaaccccgtctcgactgaaagtaaaaaaattagctgagtatggcggcgcacgcctgtagtcccagctactcaggctgaggcaggataaccgcttgaacccaggaggcagaggttgcagtgagccgaaattgcaccactgcgccccagcctgggcgacagagcgagactttgtctcaaaaacagagaagtacataagggttgcaaagtcaaatgacttgaagggccaagcaggtgacttagcaggtgacttaatagagcagctaggtttaaaacagcaaggaatagtgtggagtctggacttccgcatgctctatgtaaaggagtcagaatcagaagttttaaaaaacactgtcatcagtgtccctacacaaaaaaggacatattcccaaaccatcagttttctactttttatacaaacaaaatacaggaataattattcaaatgaggccaagcatggtggttcacgcctataatcscagcactttgggaagctgtggtgggaggattgctagagcccgggaatttgagaccagcctgggcaacatggcaagaccctgtctctattttttaatagtcaaaaaaaagaagaagaagaaaacattcaaatgcttgaacatgacaaaggggttagatggcttattaagttgaattcgccatgtagcatcatgtgtgacgtaatggaaatgaatggcaaaccttgtttaacagaattaaatgaagatgattaaaagtatttctaaaacatctttatttcaaatatttatgaaaataactctgtacatttaccatacccaaggcccctaaatcttaattttgatcttaatcttgaaaatgtattgttgttagcatactttgtatagtgggttttttttgtttgtttgtttttgagacagggtctcactctgttgccgaggctggagtgcagtggcctgatcatggcttacttgcagcctcaacctcccaggctcaggtgatcctcctacctcagcctcctgagtagctgggaccacaggcacatgccaccacatccagcttttctttccttttttttttttttttttttttttgagatggagtctcactctgtcgcccaggctggagtgcagcggcgtgatctcggctcactgcaagctccgcctcccgggttcactccattctcctgcctcagcctcccgactagctgggactacaggcgcccgccaccacacccggctaattttttgtatttttagtagagacggggtttcaccatgttagccaggatagtctctatctcctgacctcatgatcctcccgcttcggcctcccaaagtgctgagattacaggtgtgagccactgcgcccggctgttttttggggktttttttttgtattttggtaccgatgggttttcaccatgttccccaggctgttgtcaaactcctgacctcaagaaaccctcctgccttggcctcgcaaagtggtgggattacaggtatgagtcrccaggcccggccacttggttttttgccatcatggctccctacaacctctacctcccaggcttcactgataatcccactttagccttccaattagctgggactataggcttgcgccaccatgtccagatttttgtattttttagtagagatggggttttgycacgttgcccaagctgtagtgtcttttctaatagaagctgagaatttcctttgaaactgtctttgtgaacttggaagtgaaatcagaaaaggaataataatgtcttaaattttattgcttattttgttttcttttgtttcttactcttagatgggaatgatgaacaaccccaatccttatggttcaccatatactcagaatcctggacagcagattggagccagtggccttggtctccagattcagacaaaaactgtactatcaaataacttatctccatttgctatggacaaaaaggcagttcctggtggaggaatgcccaacatggtgagtactaatccattacagacttgttttcaaactggcattttgacaaaagaattgtgttaaactttcacccttctgttatatatgctgggatttgtacccactaggagcctaaattgatatgtacttgatgatccctgtgaggaggcttgtgcttcctttccatttctctgttttttttgttccatgtggttattgatcagtgagcatgttgatccaaacaggagtaagtgaactgctacaatgaagttttaggggcctgccattcagcaacttggtcttgtgagcgtttccatacgatacgaaagcggaacctttcacttttgggggaaggaatctctggcaaaggatccgaactctcagtgaccatatttaccaatattatttgattctactacacccaagtaaattccctctcaaaagtaatgtattgttttaaacagcaatttttgttaaataaaattttcaggaacttctagtgttatttttgtacagtcaaactactagtagtaaatgtgtctgcattcaactttggaaaaacattgtctgaaaaaatcctctttcagatgttttagttttgtcctttgtgtcattatgtttatggactgcctatatttgagatactctgccaagtactggagttatacagatgaatgaaacatgtcatctctgtcccgagaaatgttcactttttttttttttttttttttttttttttttttgagacggagtttagctcttgttgcccaggctggagtgcagtggtacgatctcggctcactgcaacttctccctcctggtttcaagcaactctcctgcctcagccttctgagtagctgggattacaggcatgtgccatcatgcccggctaactttgtatttttagtagagacagggtttctccatgttggtcaggctgatctcgaactcccgacctcaggtgatccgcctgcctcggcctcccaacgtgctagggttacaggcgtgagccaccgcgcccggcctgaaatcttcactttttaatttaaaaaactaaatttatcccagagtttaraaaaactagtttttcaccaacccgaaagacccctctgctgagtctcttgaggagttcttcattgctctttaaaacctaatttgggtgtgcttttaactacagacaccctctcacccttccctctcccgctggagtttaccatgtccttctctctgcttttgctctctgtgtattatacatacttatatcacttcgtaatgtcattttttttcttattaaattgagcttcttaaaggtaggagccatggtttatgcattycctgtgtcaaaaaatggagtctggcttatagtagactaaccataaaggttttcattgaaaatatccacatctctatttattaagaaatagcacattatgactcctaccattaaatatattgttatatctctcagggtcaacagccagccccgcaggtccagcagccaggyctggtgactccagttgcccaagggatgggttctggagcacatacagctgatccagagaagcgcaagctcatccagcagcagcttgttctccttttgcatgctcacaagtgccagcgccgggaacaggccaatggggaagtgaggcagtgcaaccttccccactgtcgcacaatgaagaatgtcctaaaccacatgacacactgccagtcaggcaagtcttgccaaggtaagtggacccacaggrtyactgtacttagcaatttttacagccagggagaagaaggaaaatgtgatcaagtctattttgtggtgatggatatgtttaataccttaattgtggtgatggtgtctgtatgtacaaagtcaccaaaatgtatacattagaccaggtgtggtgtctcacacttacartcccagcactttggtaggccaaatggggaggattgcttgaggccaggagtttgagaccagcctggacaacatagcaagacctcgccgggcatgatgatgcacctgtagtcctagctgagggactaagaaggctgaggaaggaggattgcttgagcccaggaagtcaaggctgcagggggctatgattgcgccactgtactccagcctgggtgacaatgtgagaccatgtctttaaaaaaggttgggcgcagtggctcatgcctgtcatcccagcactttgggagactgaggtgggcagatcacttgaggtcaggagttcaagaccagcctgggcaatatggtgaaacctcgtctctacaaaaaaatactaaagaaaatcagccagatgtctgggtgtgttcctgtagtcccagctacttgggagattgaggtgggaggatggcttgagcccaagagggcaggggttggtgtgattcgacatcataccactgcactccagcctggacgatagaaccaaaccctgtttcaaaaaaaaaacagtgtacatatgtgtaattttttaaaattattttattttatttatttgttttttgagacagagtctcgctctgtttcccaggctggagtgtggtggcacaatctcggctcactgcaaactccaccttccaggttcatgccattctcccgcctcagcctcccaagtaactgggactacaggcaggcgcctaccaccatgcccrgctaattttttgtatttttagtggagacggggttttaccgtgttggccaggatcgtctcaatctcctgaccttgtggtccacccgccttggcctcccaaagtgttaggattacaggcgtgagccaccacgcttggccaatatgtgcaatttaaaaaatatttataccccaaagcatttagaaaattccattgtctaaatgcatcatcacagttaactcactcggtaaaggtcgtcttggctgcgtccattctgtggcaattacgaataaagctgccataaacaaaatcaattttgagactcctttactgatagtgacgttattttaggaaatgataaaaacacagttttttttttgagatggagtctcgctctgtcgcccaggctggagtgcagtggtgtgatctcagctcaccgcaagctccgcctcctgggttcatgccattctcctgcctcagcctcccgagtagatgggactacaggcgcccgccaccatgscggctaattttttttgtatttttggtagagacggggtttcactgtgttagccaggatggtctctatctcctgacctcgtgatccgcccgcctcggcctcccaaagtgctggaattacaggcgtgagccaccgcgcccggccaaaacacactatcgtttttgtgagcaagtatctaaggatgtgagaagagaataaattttaaaggtcttcccatgtggtgatcctcatagactttgatttttatttgccctagcatagcatactttaaatgttattgagggtttgctaactgtcatgtaggcaagtgttcaatttaatacaatttactgcagtcatttttacccgatctaatacaatttgtatgaagtcattaaaaagtgttcttataggcatgtgtgtcataacattggtttagagtacatttgcttagaataaagtaggttgtgtatagcatggtgaaaaatgagggctcttaagccagactgcttgaggttgaatctcactttgagtactctgtgactttgtgcaaattgcttacccattctttttgcctttcttgactgtgaattctgagtattaataggagctaccttatagggctgttaggaagatgaaataagttaatgcatttatgttacttattaagtggtcaacaagttagctattattaatgtaaaaacattaacctgctcttgaaaaaatatgttttcttctctttagtggcacactgtgcatcttctcgacaaatcatttcacactggaagaattgtacaagacatgattgtcctgtgtgtctccccctcaaaaatgctggtgataagagaaatcaacagcgtaagtgatgaaatcttttgaaggtttatatgaaaagttttaaagtctcaccagtgccatttatagtactacttgattatgtgagggacctgtggtgttgtactatgttgaataaatgtttttttcccttttaatttttctgcttccctagtgcatagaattgaactgcttagggagtttgaggctgcagtgagctatggtcatgttactgcgctccagcctgagtgatggagtgagaacctgcctcaattaaaaaaaaaaaaaaaagaaagaaaaaacagtgcagtggctcatgcctgtcatcccaacagttttggaagccaaggcaagaggattcccaggagttcaagaccagcctaggcaacttagcaagaccttgtatcttccaaaaactttaaaaattagttgtgtgtggtgtgcctggctgagatgagaggattgcttgaatccaggaggtggaggctgtagtgagctatgattgtggcacagcagtccagcctgggtgacacaaggataccctgtctttaaaaaaaacaaaacaaaacaaaacaaaaaaaacaactgaacactgcttaacatccaaaataagatccaggaactctcaatacttattatttatacaaacagcaataggtaaatttatgttctgctttgaacctatgaaaatttaaagaccgttgctttggcattgggcaagttattcttttatactatacttgtgatctaaacgttccaggtacttggaaattattttaaaaagaaaaaatatgagattatttttataatattgggatatagaagagctttttttttttaagagaaaagacgagattaacactttaaaattgtaactaccacatctctatagcaacaaaaatttaagcttttagggttaaaggacaaatttgggaagtattgtacagcatttgaaaatggaattaaattttataacaagaattgggaatagaaaatagacaattcaccagagacgggaggagagaggggaactcccaatataattcactattaagaagagaaataaggtatcgtttctctcctgtagtgtaggcagaaatgatgctgccgggtgttggcagttgaatggctccaaagcattcatacagtgttggtcggaacattaataaagccctttgggaaggctattgggcattcagaatcaaaagccttttataccagtggtcccctttaccaatcagttctgcatctagaaatttcttccaggaaataatggaagacaagatccacatactcagatgtttcataatcacgtaacartaattttgtggggttttttattagacatgttagtcttttttttctcaccagcattaatttgtaatactatatcttttgtcttctctagcaattttgactggagcacccgttggacttggaaatcctagctctctaggggtgggtcaacagtctgcccccaacctaagcactgttagtcagattgatcccagctccatagaaagagcctatgcagctcttggactaccctatcaagtaaatcagatgccgacacaaccccaggtgcaagcaaagaaccagcagaatcagcagcctgggcagtctccccaaggcatgcggcccatgagcaacatgagtaagtttgtgtcatcctaataacatggtattggttgtgtcagtaaatgacatctataaacacagtgttgttagctcctttttattttttctgctacatgattttttaagtaattttttaaagattacagtgtaaaaggtcccttacagttcatctacgagaggtaactgccactggtttgtatcttccttgatccttttttgcattatatgagttcagatttgcagaaatgagatcccatatgttattccacaacaaactttgattaatactgtgtagacgggccgggcatggtggctaacacctgtaatcccagcacattgggaggccaaggtgggtggatcacaaggtcaggagtttgagaccagcctgaccaacatagtgaaaccccgtctctactaaaaatacaaaaattagtagggtgtggtggtgcgtgcctgtaatcctagctacacgagaggctgagacaggagaatggcttgaacctgggaggcagaggttgcagtgagctgagattgagccattgcactccagcctgggtgacagagcaagactccatctcaaaaaaaaaaaaaatactatgtagacatctttcatagtcagtattccatgtatcattttaaatggttgtatagtatgtcattctttcattctttttttttttttttttttgagatggagtctcgctctgttgtcaggctggaatgcagtggcacgatctcggctcactgcaacctctgcctcccgggttcaagcgaatctcctgccttagcctcctgagtagctgggactacaggcgcgtgccaccatgcccagctaatttttgtatttttagtagaggtggggttttcaccatgttggccatgatgatctcaatctcttgacctcgtgatccacccacctgggcctcccaaaatgctgggattacaggcgtgagctactgcacccggcccaacaatctcttacagatggacattgagatctccaattattctgctgctttaaactatacaacagaaattgtgttttgacttgaggcattttgggctgaaacatatagaaatgagtgtagttggtaatgatttcctcatgtctggcaggaggaatagtgtgccttttcaaatagtttttttgtgacttgtttgcctcacttcctgttttatgactgagagggaagagggagaagtgttccagtatcctaatttggggatatatatgtttctctgattgcatatgataacattggaagaattgttctaatatcttaattttgggatatgtatgtttctctaattgcatatgataaaatcaaacagcttttttctgtgtctatccctctgctgtcaagcagttcaaatatctaagctattttgtttgagtagttagacatccagcattgtagagaccaggtcttgtccaggttggtcttgaactcctggkcttaagcaatcctcctgccttggcctcccagagtgctgggattacaggcatgagccaccgcacctggcctaagattatccccccccccacccccaccccggaaacagagtctcgctgtgtcaccgaggctggagtacagtggcacgatcttggctcactgcaacttccgcctcctgggttcaagcagttcttcctgcctcagcctcccaaatagctgggattagaggcacctgccaccacacccagctaattttttttttggaacgaagttttgccatgttggccaggctggtcttgaactcctgacctcaggtgatctgcctgcctcaacctcccaaagtgctgtgattacagacatgaaccactgtgcctgaccctctaagattattttttaatacagattgagtatcccttttcctaaatgcttgaaagcagagtactttagatttttttcggagtttggaatgtttatatttgctggttgagttgagaatcccaaatccaaaaatcaaaatgctgcattgagcatttcccttgaatatcattcacaaagttttggatttctgtatttgggatgccaaccaacccatactgctattttttactttcttcctattttccactgctgtgttctgttgctcccatktttggtttttgaattaatcttcaggacatttttttctttctgtttttctttactatataataacagtattttcaaaccagtgatctgcttttaagcacatgttgagccactgtgcagtaaagtttaatgctcctgttttcaaaactgttgaacaactgttttgtcagaaactgaaagttatgagagtgaaatgcaaacatttttagacccatcaattttgattttgacttttaataatttaagatctaaaatgctagatagtgacatggagcttcttgtattcaagtttgtaagtcagattttgcagtcactggcrtgactattttagacagttgtgctaatgctcattgtaccagaccatttctattttaatattctttagattcttcattcctgccctgttgttattgtttattacttggtctgttgatttcattcttttcttttttttttttttttttctgatttcattcttgaaagtagtattttcaaggaggatgtttttcttgagttttacctaatcagggacttagataagttttcttagataaattatggataactagaaacgtacgtgtgtgtttgagtttggtctcgctgtgtgcatgtgtgtttttgagactgggtctgataactggaaacgtacgtgtgtgtgtgtgtgagattggtctcactgtgtgtgtatgtgtgtgtttgagactgggtctcgctgtgtcacccaggctggagtgcagtagtgcgatcttggcctgcatcctctgcctcctgggctcaagcggtactcccacctcagcctcccaagtagctgggaccacatacgtgcaccaccacgcctggctaatttttgtatgttttgtagagacagggtttcgccatgtggcccaggctggtcttgaactcctgagctcaagtgatcgcctgcctcgacctcccaaagcagtttgtgtttttcgttacttccatgacaaccagtactaactagttaaataattattgagtgacgagtttttaagcaggactaggaaaagggatgaggagcaatcttgccttttcaggcttccttttacctcttctgtattgaaaataacatgtacagcggtaatggaaagttggacctggacactagcatattttcccctcttgttttatatcttctgtcttggaatgagcattgcttttttctttctttctttctttttctttttgagacaacatctcactctgtcgcccaggctggagtgyagtggcgccatctcggctcactgcaacctccgcctcctgggttcaagcgatgctcctgcctcagcctccaagagtagctgggactaggcgcacaccaccacctttttgtgttttcttttagtagagacagggtttcaccacattggccaggctggtcttgaactgctgacttcgtgatccgcccacctcggcctcccaaagtgctgggattacaggacgcccagccagcattgcttttttatctcccattccgtgttacgcagaatgcacttacctttttccttaagttttagtaggttgttgtcttcccctggcctggaatttcattactgtaattgggtagttcccttttgtttttcaaagttatgtttatagttcctattatagctcttttcctctcattatattatcttgcctatgtacttttatatatatgcacaattatttgaatgataattttgggggatttttgcccccatttcttcgtgtctttttatttagaattagatttaagattactcaagttccctttgtttttatttcttctggtctcctgaagtgctgagattacaggcgtgagcctctgcgcctggtcacatttgctttttttttttaagttatgtttcgttttctatgatttactgttgggtgcttcatctttttcttacctgtttgtaagggtgcttcaaatcagcctttacatatgtgttgccagttatattgtcaattatttattgtatatgctgcaaattttttttctgatttgtcatttgtttcttaactttatagtatttattgtatggtggctgttgtatttatttctgtctcctgttatttcattttgacttaggtgctagtcctatgggagtaaatggaggtgtaggagttcaaacgccgagtcttctttctgactcaatgttgcattcagccataaattctcaaaagtaagtcttaacgtgatttataccctgggtcacattacaaatactactggttaacaattcattgtttgacttttgaacttagtttcctcggtttgaggatgtctttgaatacagrtagatgtttgagtccattctttcttttttcgctctgtagcccaggctagagtgcagtggcatgatctcagctcactgcaacctctgcctcctggttctggttaaagcaattctcctgcctcagcctcctgagtagctgggattacaggaacacaccaccatgcccagctaatttttgtacttttggtagagacagggtttcactgtgttggccaggctgttcttgaactcctgacctcgcgatccgtctgcctcagtctcccgaagtgctgggattgcaggcgtgagccaccacgcctagcccactctttcttctttctacagccttaatcgaaattgtattgattttctagtgtagcctacaccttccctaatacagtaggatgttgcaaggttacagctccataatagccttatcctgatgttaagaattagtccaccagcctgggcaatatgtcaagacgtcttctctacaagaaaatacaaaaaagttaacggggcatggtggcrtgcacctgtagtcccagctactgatgaggctgaggtgggaggagcacttgaggctgggaggtcgaggctctggtgagccgtgattacaccactgcaccctagtctgggtgacagcgagactgtgtctcaaaagataaaaattattattttaaaaagagaggtagtccatcatccaaagcattccctgaggtgagctgtgttaaaatgacagcttagtctgataacacaagccttagaaaactaagtatgggccgagcatggcagctcccctgtaatcccagcactttgggaggccgaggcaggcagattgcttgatcttagaagctcaagaccagcctgggcaacatggcgaaatcctgtctctgctagaaataagaaaattagccgggcatggtggcayccacctgtaatcccagctactcaggaggctgaggcaggagaatcgcttgaaccccggaggcagaggttgcagtgagctgagatcatgccactgcactccagcctgggtgacagagcgacacgccatctcaagaaggaaaaaaaaatggctgggctcagtggctcacgcctgtaatctcagcactttgggaggcccaggtgggtggatcacttgaggtcaggagtttgagaccagcctagccaacatgatgaaaccccatctctactaaaatacaaaattagccggacgtggtggcgggtgcctgtaatcccaccaactcaagaggctgaggcaggagaatcgcttgaacccagaaggcagagattgcagtgatctgggattgcaccactacagtccagcctgggcaacagagcaagactttgtctcaaaaaaaaaaaaaaaaaaaaggcattacagacaaaacccagaaaatgaagtcttatgatatcttgtgttaggacatcatcctgccctccaaagaaatacaacttaccctcacacaggtatgaacatgcacagtttaaaatcagtctagtcacacacttctccctgcctagctccttaatgcgaatagaagtgacatagcatattgattccattacaataatcagtgtcagcttgaattaaatgaggtcttctcctacctttcttcactaaaactatttggtgacccctttttgaagcccaatgatgagtgaaaatgccagtgtgccctccctgggtcctatgccaacagcagctcaaccatccactactggaattcggaaacagtggcacgaagatattactcaggatcttcgaaatcatcttgttcacaaactgtaagtaagattgtggacacgtctcattcgtaaagagatgttacgtcaacatgttttcaatctcctgggcatttaattactaaaggaatattagcaatttttctgtagcatggaggttgatgttgatacttctactcttgtggatttcttgctgctgctgcttttttccttctcaacctttcccaccatcatctatggtagtctttcagctttaatggtatgtgaactattctgtctagtgacagtaaataatatattaaacattgtttttagctattgcctttgcaaaacttatatatctaagaaaaactaggcctcagctcattaaaatattgcattgataacatccttttctgttactcctggtagagcaggggttttttgtttgtttgagatggagtctcactctgttgcccaggctggagtgcagtggcacgatcttggttcactgcagacttcgcctcccaggtgccagtgattctcctgtctcagccgcccaggtagctgggactacaggcacgygccacctcacctggctaatttttgtatttttagtagagayggggtttcactgtgttggtcacgctgacttcaaattcctgacatcaagtgatccgcctgcctcagcttcccaaagtgctaggattacaggtgtgagccaccacgcctgtcctggtagagcttttattatgtaaaaatctggtagggtggactctctggtcttctcgtcctccagatgtgcacatggcagtttatttttgagaagttgatatatttcaggcactctccccttacgaactccatcttaatctaaagagtttttgtcagatgaaggagggggaggcatatagagcaaggtaatgaaatgtgctcagcatcataaaaaggtagagcttggaccttgccaattacagagtttacccttcaaacaccatgcagtattttttcttggagaagtcttttcatttcactttcagttaatagcagggtcgtctttactgtatccatattttttaattgactgaggaactatttatcattttgtcttaatttatttttatgttatgtcaaactaccaattatatacgtttcatttaggaatttttttttcctcccacgaacccatgcttgctaatcatttaggattctttgtttgtttgtttttgtttttgtttttgagactgagtctttctctgtcgcccaggctggagtgcagtgtcgtgatctcggctggctactgcaacctcccgtctcctgggttcaagcgtttctcctgtctcatcctcccaagtagctggggttacaggtgtttgccaccacacctggctgatatttgtatttttagtagagatggggtttcgccgtgttggccaggctggtctcgaactcctgacctcaggtgatccacctgccttggcctcccaaagggctgggattataggcgttgagccactgtgtccagccaggaattcttcagtggtagcactaagtaacggaatttgacaaggaaagaacttcacaagtttaatgaaattattcctttaataaagaataaccgatctcttattttgtgacagactattcaggaacttttatttaatggacagagatgattatttggggttgatcatttgactttacgttaaaagtttattatatatgctcgagttttctaccaacttggtattattctggacttccatttatatcttcttgatctggttccttcaagtcctatgcaactgagtacgggatgtccaaataaaattagtgcctaaagatcacatttgtcagtcataagagatactagtgcaaaacattttgttagggaattgcatgaaagtgaaaaactgaatctaacagaatcattacgcatttctggtctgtccacttcaggtttttggttttttgtttgttttttataagcctttgtcagaacagttcaagtttttgatgttttaacattttagagtggttactgaattttatttcagtaagctaaataataaatttagaagagcagatggaactctgaaggctacttgatactatgacaaggcctgttttcctcactgtctttagtatgtaacccaaagtaatattttgctttatgtctagagtaacagggaccaaagagtattttttatagagtcatttcttatattgtgaacggaaatatagacaaaaattcttttgtttatcacaaaaagataatttcatttcagtaagtaatatatatcaccttgccattattttttcttttcctctatgtgttcagtgtataaaaatcagaaaaatactaattaaatgctgacatgatattacagtggtaggattttctttttccagcgtccaagccatatttcctacgccggatcctgctgctttaaaagacagacggatggaaaacctagttgcatatgctcggaaagttgaaggggacatgtatgaatctgcaaacaatcgagtgagtgtctggtttttttctattaatagccaagattgaacctgttgtggttattttattcctctttagcatgtacaagtagtacatatgcttcagacgggggacacgctgtagctatcccgtcttattgtccccaagcatagttaggataccaaagcagtttcttaagtgtatgtcatcaagaatcttaygtttttcctcctaatacagtgcactcatgtggcactttatctggttgtcctgtcaacctaaaaagtggctgagctggccgagtgcagtggctcggtgcctgtaatcccagcagtttgaaagtctgaggtgggcggatcacttgagcctaggagttggagaccagcccgggcaacatagcaaaaccccatctctacaaaaaattagccaggcatggtggcacgtgcctgttgtcccagctgctcaaaaggctgaggtgggggaatcaccagagccttggaagtcaagctgcagtgattcgggattgcgctgctggtgacagagggagaccttgtctctctcaaaaacaggagtggggtggtgctgagctgttaccagctgtgttctcttttcactagaatataatgaagtagcgacttaactgttgttcacggtagttcagattctctacataagttgaactttcctttctaaattggcaccagttcttaatgcagcatataaaatgaaactaatatctattctcagtttattttttctgttacctggtggtagttccttttttcctcatctcccttattttacttcaacaattcaaaaggcggaatactaccaccttctagctgagaaaatctataagatccagaaagaactagaagaaaaacgaaggaccagactacagaagcagaacatgctaccaaatgctgcaggcatggttccagtttccatgaatccagggcctaacatgggacagccgcaaccaggaatgacttctagtaagtgktttttgttatatttctgtttgagagaaattgataataaaatagtttctatctaaagtcattaatttctgtaagcttgtgtaactattctagagttttttaaataaccatttgcctttgcaaagaaaataactcatctactagtaaaaacagaagcagaacaagtatatttaagatgtctgggcatggtacttaacataccttgataatctggaattgtttttagagcccaaggtgtaaacttctctaatagtgacatctagaaagcaatagcctacatacagatgttcacagatttctctgagactggcttgtgtggtaagtagccagtaaatgtttgtaggctgaccaggttcrggagccctgtaacacacataatatcatattacactgtcacactttctacttgacataaaatattctaagtctaggaactctttttttttttttctttttctttttttttgaggcagagtctcactccgtcacccaggctggagtacggtggcatgatcttggatcactgcagcctccgcctcccaggttcaagcaattctcccacctcagccttccgagtagctgggattacaggcacatgccaccacgcctgtctaatttttgtatttttcgtagagacagggttttgccatgttggcctagctgatctcaaactcctggcctcaaatgatccgcccaccttggcatcccaaagtactaggattacaggcatgagccaccactccctgcctagaagcatcatttaaaattacattttgacagcttcagtttctgattatagcatcattgttgacctgatgaattaaccagatagccaagactatgataaatagtcttactcaatcgttgacttattggtasgatcaaagtagtgaaatatggagcaggcacaccattttcaggaatggcacaggctgtaagtgctgtgagcaaggctgtgataggaaaaacctgcatttactgagttaggaaatgctaatgacctctaagaagtgccaactgagccagcgggcagtaaacctcatacgatcagtagattataggtgggctgagaagttcatctctttcattcattgaagtagtaaagtagagaaccattggttaccactggcctttagcagcctcatttgctaactgaagtgtgccaggtactgttttgtaatgtgtaaaaagttgggaggagcaacattgctgaggaaatagtatacatggaggctgcccaatagtaaggaaaaacacagattttttgagtagttagaacaaattttcaggaatgaaaaagtcaagattagagttgagactgcttcagtacatgatttggacttgagtagtaactaaagattaaaaaaagtagacaggctgggtgcggtggttcatgcctgtactcccagcactttgggaggccgaggcgggtagatcatgacgtcaggagatggagaccatcctggctaacacggtgaaaccccatctctactaaaaatacaaaacaattagccgggcatggtggcgggcacctgtagtcccagctactcaagaggctgaggcaggagaacagtgtgaacccgggaggcggagcttgcagtgagccgagattgtgcctctgcactccagcctgggcaacagagcgagactctgtctcaaaaaaaaaacaagtggacatacctgagatacttggttttggtagaatttactcaagttctgggtgaagttctgagccaagtttaaagtctgtgagatattaaattgtattctaatgtcagtataaacagtatggtactgatgtaagcaggaataagtggtagtggaactgagtatcagccttaagtatatgttgacctttagctcgtactaaatctgacattttgtagaatgagattcttaccttaacctgatacacagaaaataatagaagcataaaagtggtcgggcatggtggtggctcacgcctgtaatccsagctctttgggaggctgaggctgcagatcacttgagcttaggagttcagaaccagcctgggcaacatggtgaaactctgtctctataaaaaatacaaaaattasccaggcatggaggtgtgtgcctgtagtcccagctactcaggaggatgaggcaggaacatcacttgagcccaggaggtcaaggctgcagtgagctgtgattgtgccactgcacttaagcctggacaacagagtgagatcctgtctttaaataaataaataaggtttgtaaactttgaaaaaacaaaattgaaagaactacgtagaatgttgaagaaaacataacattctcatcttcatgtttctttaacatttgtttttttgttgttggttttgtttttgttttttttttgaaacagtctctctttgtcactcaggctgaagtgcagtggcaccatctaagctcactgcaacctctgcctcccagattcagttgattcttgtacctcagcatccccagcagctggaattacaggcatgcatcaccacacctaactaatgttttgtattttcagtagagacagggtttcacaccatgttggccaacctagtctcgaactcccggcctcaagtgatccgcgtaccttggtcttgcaaagtgctgggattacaggcttgagccatcacacctggccacgtttgatttttttgttttaatacaaagaatacagttattatagaatcagagagtggcaatggcaggactatgtgtattggcctaaaaatatgcccatagtaaacttatgtaacgtgtaccatcttgaaaaaataatcccggttgttaatggagttgaaggtaggtaactctttccttattaattttttgcaaagatacgaagtttcaggaaaagctgatgacagaagtatgcatgttatagtctgagtttttttaagtgtggcatatgccctagaaaaagttctggaagaagtaaatactaatctctgaacatgggcttctgatgggggcagtggaattccaggatacttgtgttgtgtgataaagggtttttgattatttgacttaatgcatayagtttgcattaagggcatatatattgaaatgtgaaagatggacatttttgtttgtgtatattttctttacctctaaatatttatatatatacatttttgagatggggtctgtttcgcccagcctggagtgcagtggtgtgatctcggctcactgcatcctccatgcctcccaagctcaagcaatcctcccacttcagccccccaagtagctgggaccacaggcacacgccaccatgcctggctaatttttttttattttttagtagaaacagggtttctgtatgttgcccagactagtctcgaactcctgagctcaagatatccacccacctcggcctcccaaaatgctgaaattacaggtgtgacccactgcrcccagcctttaaatatttatcttaaaaaatagtatcaagatgttcctttaaataattcatcaagtttccttaaaatgacaagagctgcctcatggagcaataatagatacattcgtatctgcatcatatggggcaaatgtgggcagtaggattgcggttttatttttaaaccattttcatttgattagtctcaaatacttaaaaatcagaagattttgcatttaaaaagtctgaatttctggctgctttaaaaaaaaaaggacatgtctggcagacttgascccctttctcctacagtgacacctgtctatagctgcactcatggctgactctagaagagctgtgttttctctccacttcagtcctcaccrttctctattgttttgggtacttaaaacagttttacttggtattagctgcttggcacttgccatttagcttggaacacctatccatattgttgacttgaaaaaaaagttactcatatcttaggtgaaaacattgttttgtagatagtgtgcgtgaatacagatatgtgtggggaggaagaggaaaggtttatctcaaggtcatttgttggatcctgattcatttttctattgatttttaatttttatgtaatgagcatggattatgcatatacttcttataaagcttgcagagttacagataaaagtttatatgaataaatgttgagcatttcctctctcagttttgctcatttactaaaggttgaaatttgtctgaagggatggacatctccttagaagagcagcaggtcttcctctcctatgcctgaggcttgaatgtacagcccttgatggagggtatggccagggtggagccaggtcactacagacatctgtcctttccsagggtgctgtaaaaatattttctctgtgcactatgttgaaagtactacactagagcatgtgcagataatccaggaaaaagaccttagaatttatgtatttatattttaggttttttttgagacggagtctcgctctgtcgcccaggctggagtgcagtggcacgatctcagcttactgcaagctccacctcccggggtcatgccccgggttcacgccattctcctgcctcagcctcccgagtagctgggactacaggcgcctgccaccacgcccggctatttttttgtatttttagtagagacgggtttcaccgtgctatctaggatggtctcgatctcctgacctcgtgatccgcccgcctcggcctcccaaagtgctgggattacaggatattttatttytttaagaattatttctgtttttgtatttaagaggtacatgatatgtagtgtggtataatatgcatattatttaaaatcaatgttcacagtttatgtgcataaaaacgttgtgctacatgatcaaattcggccaccattagacatgattcatagctattatccatggagatactctgttgcatgccaaccagactcagactttgttaaacaataacatattaaatgctatgatggcctcaattttttttttttttttttgagacagagtcttgctccatcgcccaggctggagtgcagtcgtgtgatcttggctcactgcaacctccgccttccaggttcatgcgattctcctgcctcagcctcctgagtagctgggattacaggtgcctgccaccacgcctggctaatttttttgtatttttagtagagacagggtttcgccatgttggctaggctggttttgaactcctgacctcaagtgatccacccacctcagcctcccaaagtgccaggattacaggcgtgagccactgtgcctggcctataatggcttcaatagcttatttttctatcaacattgaaagcacccgggctcataaaggaataccaacaaatccacttggaggcatttttctgtattccagaaataacattttcttcaagcttctgtctagttcagagctttattttgtgattcatactcaattttcaaaggtattattaaaaatattttgtggggtttgtgtgtgcagtgagtttttgtttggttaagggaagatggtgcaaagatacttatttctcttttttactctagatggccctctacctgacccaagtatgatccgtggcagtgtgccaaaccagatgatgcctcgaataactccacaatctggtaaatagtgaaaaaaatttttttattttaaaagaatccccggtgtactgcaagataatacttgctacctgaacacccgctttatgccaacagcaagtgtcatgattacctgcccatagaggaagagggggtgaagagcaggttggctggcagatcacagggcaggtgacattaaatgatcaagtatccattaaaaaacaactgcaggctgggcatggtggctcacgcttgtaatcccagcactttgggaggccgaggctggtgtaccacctgaggtcaaagtacgagaccagcctggccaatgtggtgaaaccctgtctctactaaaaatacaaaaaaattagccggttgtagtggcacgggcctgtaatcccatttactctggaggctgaggctggagaatcacttgaacccaggaggcggagtttgcagtgaggcgagatcgcgccactggaccccagcctgagtgacagcaagacttcgtctcaaaaaaaaaaaaaaaagcagattgtaaaatttgtaaaattcagtttggagatcctgttagttgataatgtctgtttactgctactgtgaatgagacagatttatttatacttagaaggttgaaagccagtttattagtcctgatagaatcagggccaggtgcggtggctcacgcctgtaatcccagcactttgggaggctgaggcgggcagatcacaaggtcaggagatagagaccatcctggctaacacagtgaaacccccgtctctactaaaaatacaaaaaattagctgggtgtggtggcggacgcctgtagtcccagctactcaggaggctgaggcaggagaatggtgtgaacccaggtggcagagcttgcagtgagcggagattgcgccactgcactccagcctgggcgacagagcaagactccgtctcaaaaaaaaaaaaagatacagaatcagacataagaattctatcttttattattcartttcacaaaggcattcagatctaacattttgctcatattcacaggtttgaatcaatttggccagatgagcatggcccagccccctattgtaccccggcaaacccctcctcttcagcaccatggacagttggctcaacctggagctctcaacccggttagtttgacgtctttggtaatctctttggcstttacctggtattttgaaaatcctgtttgttcctactttataaattctcacagtcatttaaacagaccataactcctagttcttctgtaattcttctgtatttaactctactagaaagctgaccaaaaaacgaaaacagccagtcccttgtccctggagtgtcagtgtttagtggcctgcatgygttttcacggtcacttctcttccctgatgtctgtcttccctcctccaggcagagaactgtcttgcaaggttgatggtgcgtttttgcctggttcttgaactcggagaagagagactaggcttctcctgctccttatgcgaactcttaaccagtccatctctctaccttgaccctaaccctcctgctgccctttagagttagctggtgcctctgattcttgacccttttgggggttcctgagcattactacttctcactaatctgccattttcaacagggagttctgtccttcattttaacctataagacagatggtcttagcttatgaagtttttggcctttggtactcgagatttctttctttaaggcctgaatttgtgtagggtaattttggaaatgacatgtaacagtgctagagcatttgtggaccatgaatgctaccagattctgctacaacttgtaagattttcttgtttttacatattatgggtcttagaatttgtgttattacatcactgacatgacctcatgaaattgtgattaactctcctcacttaacagagcatgcaaagaaaattacctgctatccttgtgctaggcatatttgtgtaccaagagaatgtgtgttccatcctcttactatttcttggagtaggcctaggtaaactgtgaggctatttctctttatcttggcacaagagtcagttgttctacaactttcttccttctcctcttcagccctcttcacctatactcctgtctttggcttttctctacttaataagcctgacrttaggagcatttgatgattttagttatmgtagaataactataatgaagcagtttggtgatttgtgttttttttttttttcagcctatgggctatgggcctcgtatgcaacagccttccaaccagggccagttccttcctcagactcagttcccatcacagggaatgaatgtaacaaatatccctttggctccgtccagcggtcaagctccagtgtctcaagtatgtctcataagtggatttttcacttatttttgattcttgaaacttctcttgatgtaggtttttataggagagagtggcagcaaatagtgggtgaaaacagatgatttttwwaaaaataacaattttggacttagggtattctgaacatgagattattctgtgacatagcaatggtgttaattgttacaaagtaggaaataatttaaatggatagttttaattgtttttactagtgaacactttaaaataaatcttagaattaaacacaatgtagaaggaaatctggctgaaaagagcataggcaggccctagagcactctgcactcaattctgccatttttctgcggtggctgaggccattctgctgaatggtttgaagtctctttagttaagtactatcttgatggtgctgtccaaagatacatscccagtaatagrgtattttacacattttgaaatagacacattgctactctttgtttaatcagtttgtgtcctaaatttatatatcatgcctatgtaagtatttccttaattctgttctgaattgctgtcttgttatgtyttttattttaacaggcacaaatgtctagttcttcctgcccggtgaactctcctataatgcctccagggtctcaggggagccacattcactgtccccagcttcctcaaccagctcttcatcagaattcaccctcrcctgtacctagtcgtacccccacccctcaccatactcccccaagcataggggctcagcagccaccagcaacaacaattccagcccctgttcctacacctcctgccatgccacctgggccacagtcccaggctctacatccccctccaaggcagacacctacaccaccaacaacacaacttccccaacaagtgcagccttcacttcctgctgcaccttctgctgaccagccccagcagcagcctcgctcacagcagagcacagcagcgtctgttcctaccccaacagcaccgctgcttcctccgcagcctgcaactccagtaagtagagatttggatttaggcagaatcattagagctatactgtagtattatattacttctgggccatttccattctcttttgctttatctcttactgttttctccacaagtagaatgtaatctatttttcattagggacttttgtatcctgttttgccttcctgtgatagtacctatcgtagcaggagcataaagattttatttagctctgactttgaccattatgtttcatgttgtaccctgaggtctgaaggtacgtaaaggggtacgacaaggggacacaatccttctccttatttagtatattatttagtgcagcacataaattttacatatatttaaggaatctttttcaaacagtttgagccataaaacctagagattgaatttaaaaattgcagatttggacgggcgcggtggtgtacacttttcatcctagcactttgggaggctgtggcaggcagatcacttgaggtcaggagttcaagaccagcctggccaacatggtgaaaccctgtctctacaaaaaaataacaaaaattagccagacatggtagcgggtgcctgtaatcccagctactcgggagactgaggcaggagaatggcttgaacctgggaggtggaggttgcagtgatccgagattgcgccactgcactctagcctaggcgacagagtgaaactccgtctaaaaaaaaaaaaaaaaattgcagatttatgagtccttgtggcccaaaccaaagtttaaaaataagatgagagaattatagacccagaacaacctgtagcttccttgtgagaggttggttatgtatataataaaaatccaaattctcatctaatagttgaatccttattaatagaactttttttaagggtttagaagcttctactttgataccgatattaatatatatcggtatccaatagttctcagccatgttgatgaactgagaagttccatgagtcacagccgttttataaagtactgtacttgacggatggctggttcatcgtggcctctgatagacaaggaaggacagaatgagagaggaaccagtggatctgcttgattttattctttataaaatcaaggatacttccagaaaatactgacttctcattaagagatttcttatgacaagccttaggataaagatagggaatgccagtttatctcattagaatctagcgattcaaaacagccactctstgggacatcattatatttattgtctccttttctgtacctttgaaactttctctggtgagaaggtaaaaacaagccagtctttcttattttctttcactcatttctgtataaatgtgagctcctctgaagcagacatctttgaaatccccacacactgccagataatgatagttatcaatgaaatagttgctggttctttgatgtacaatcagccaaccagtatttacaagtcttaattctcctgttcttaagcataattaagggaggtgaaatgggcagagcaaatgaaagcaccatgaataaatataagccaagaaataggtggctaattctgctatcctgttgcttaccttacattctgattgtatcgttggcagactctgcgtgtgtctcacctacttcccttttttttctgcccagctttcccagccagctgtaagcattgaaggacaggtatcaaatcctccatctactagtagcacagaagtgaattctcaggccattgctgagaagcagccttcccaggaagtgaagatggaggccaaaatggaagtggatcaaccagaaccagcagatactcagccggaggatrtttcagaggtgagagtagggcaattactgtttgatttggttaggacctcagtataggaacccaagttttaaaaaatattgcagaaaaatattttgataattagatctcatggcatagattttgcatgagaaagggtgttcagattactgattcccaactagatatctttggaatactaaaaattcttacrttttcttttagtctaaagtggaagactgtaaaatggaatctaccgaaacagaagagagaagcactgagttaaaaactgaaataaaagaggaggaagaccagccaagtacttcagctacccagtcatctccggctccaggacagtcaaagaaaaagagtgagtctctgaagccattcgttctggaggtagctgaagaaaccaaagacccagggcagaattgcggtcatgcctcttgggcctcagaagttgccattattgtgatttcattaacctggaagccctgggcctggtctcttcattgttactaataatttttctttcttttttttttttttaatattcacttgcagcaaccaatgagttaagtcattcccctcatttcttcagggttccctgtgttrgtacaccctaaaaattgtctcatttttcaggagagagaaatgtttgtaaatagccttgactaaaatgcaggaaagaatagcaatagtaatagcatttgtcattcacctgctgtgtgctaagtatccacattgtctcatttaataatttctttctttctttttcttttcttttttgttttggaatcggattctcacttttgttgttcaggctggagtgcagtggcgggatctgagctcactgcaacctccacctcccaggttcaagcgattctcctgcctcagcctcccgagtatctgggactgcatgcgcatgccaccatgcccgtctaatttttgtatttttagtagagacaggatttcaccgtgttggccaggatggtctcgatctcttgacctggtgatccacccgcytcgagctcccaaagtgctgggattacaggcatgagctaccacacccggcctcatttaataatttcacaacagctctgaggttattggcctgaagcttagcaaagttaagtaactttccacaggttactcagctgaccctactgcctgggccaggaagcagacccaggcagtctgaggcagagtgctcaaatccagccattccaacaagtgttaattgactattttaggactagaacttttgtggctctagtgatctgcaaaaggcaccaggtaggacatacctgaggggtgagtctgctggctcttacagatgatatatattgaaaagtgttccattaatacaatgtgttgtaaaatgttgggattaaaaaattattttcattttaaaaataagacttgtatatattgaggtgttttaatatgggctgtaacaaacccagtcttactattggcaatctctctttaaaatgtgtgttccctcatgcctgtaatcccaccgctttgggaggccgagcgggcagatcacttgaggtcaggagttcaagaccagcctggccaatatggtgaaactctgtctctactaaaagtacaaaagttagccgggtgtggtggctctcacccgtagtcccatctacttgggaggctgaggcagaagaatcacttgaacccgggagatggaaggaggttgcagtgagccaagatggcgccactgcactccagcctgagtgacagagagtaattgtctcaaacaaataaataaaataaaatgtctaatttcacaagtttattcaaatagtccttatttttagcacagctaaatatgagtgacaagcatcttcgtagtctggtttccccccactccatggcaaccccccagaggtgaaaattatctgaagtaacaaatatactctmccgatgatgaaattttttttgccaattaagaaaaaataaggcccttgctgaaattgaaagctttttaaatcactggcttctcaaagaactgtttgattccatttgggacacaccaacaaatttttccggactttttgggaaatatcattgagaacacatttgaacttaatttgatcaactaagtctattattttagcaataccatttttgttctctcttcttttaaacttaaacctaacatttgtcattaaaatagtacatgtctctttttctttggctctaaaataccaagcatttgaacgaaggagtcttctcttctgtgcccctgactccttgtagtataagacaatacctgatctagtctagtttctgacttgttaaatactgatgtcatgaagaaagacttttctgttcttgcttgactgcatctccctcttaacacgagtatcttgtgcactcttttttttttttttttttttttgagatggggcctcattctgttgcctaggctggagtgcagtggcgccatctcggctcactgcaacatctgcctcccgagttcaagcagttctcttgcctcaagcctcctgagtagctgagactagcatgccaccatgtccgactaattttttatatttttagtagagacgaggtttcaccatgttggccaggctgaaacttctgacctcaaagtgatctgcccacctcagcctccaccgtgcctggtcccatggactcttatttggcaaagtctcttcataaatttttagaagcctttggattctgcttctaattgaccgagtctgtcttcactgactttgtgactgaaaagttaagctgagggtgaagagtgttttaaggtgataagacacaatgttttttaggagctgtctgaaacaaagcggggcttagaatctagaatcagtgattgagcctgtagtgatatttccatggggacagagtggttaattttgttattgattcttgagatgcttttagagcttcaggctgaatgattttttaaagttcttctgcttaattggtaactaatttcaaatgcactttttttttttaagttttcaaaccagaagaactacgacaggcactgatgccaacwttggaggcactttaccgtcaggatccagaatcccttccctttcgtcaacctgtggaccctcagcttttaggaatccctgtaagtatttggtggtacttttgattttattttttaatttgataacagctttattgagagataattcacattccaaacagtatagccactcatttcaaatttgtaattcagtgattttttttttttccccctgagacagggtcttattctggttgcctaggctggagtgcagtggcacgatcgtggctcactactgtctccacctcccgggctcaggtgattctcccacctcagcatcctgagtagctgggataactacattcatgtgccacctcacctggctagttttttgtattttttagtagagacggggtttcgccatgttgcccaggctggtcttgaacgcctggactcaagcaataggcccatctcagcctcccagagtgctggaattacaggtgtgagccactgggcctggcctaattcagggagttttagtatattcacagagttgtgcatgacactttcattttcatcatctgaaaaaaatcctttaccattaacagtcactcactattttctcccatagcaccccaatcctagacatcaccagactgcattctgtctctggatttgtctgttctacatgtttcattaaattggaacatacagtatgtgattctttgtgccaggacgttccttagcataatgttttcaaggttcatccatgttgtagcatgaatcagtagcacatacctatttatagcccaataatattccattatttttctttacctgttgatgagttgatagacatttaggttgtttacacgttttgactattaagataggactgtagtgaacattgtgtggatttaagtttttatttctccttggtatttacctaggagtggaattcctgggttatatagtttgtttacttttttgttgttgttatttgttttttgtttttttgagatggagtttcactcttgttgcccaggctagagtgcaatggcgcaatctcagttcacctcaacctccccctcccgggttcaagcagttctcctacctctcagcctcccgagtagctgggattacaggcatgtgccaccatgcccggctaattttgtatttttagtagagatggggtttctgtatgttggtcaggctggtctcaaactcccaacctcagatgatccacccacctcggcctcccagaatgcccagattacaggcgtgagccaccgcacccggccactttcgttgtttcaagagcaataggtcatagcagaaaaaaggaccgtggttagctttgtttttaaagttgcctccatatactaggctgctggcagatttcatttggtggttttaaactgttacttggccgggcacggtggctaacgcctgtaatcccaacacttttggaggccaaggcaggcagatcacttgagttcaggagttggagaccagcctcaccaacatggtgaaaccccatctctactaaaaatataaaaagtaactgggcgtggtggtgcacgcctgtaatcctggctacttgggaggctgaggcaggtgaatagtttgaacgaccctgggaggcagaggttgcactgagccaagattgcaccactgcactccagcctgggcaacatgttgacagagactccatctcaaaggtcaagtgcttccaggggcaaaagccttttaggacttttcctctcttgtatcttgctgtgatttcagatggaacattttaagttctgtgggcttagtttcctcattgtacaccccttctagtactaaaattttaaatgtctttgactttactgatctcacatgtactttcataaagaacctgaagttgcttcagtagaatatcagcctgatgtctagaaagtccatagtagttctgtttctctgccctttgagtagtttaatatctctgtaaactaatatttaaagaagtgatggacatcagtcacctcttggggaatatagacaggccagaaactaaaacactgcctggaaaattaacaatgataatggatgatactccatctcccgtaaaaatagtgagacttgagtaatgtttgatgtcacttgtctttctaggattactttgatattgtgaagagccccatggatctttctaccattaagaggaagttagacactggacagtatcaggagccctggcartatgtygatgatatttggcttatgttcaataatgcctggttatataaccggaaaacatcacgggtatacaaatactgctccaagctctctgaggtctttgaacaagaaattgacccagtgatgcaaagccttggatactgttgtggcagaaaggtaagaaatgtgtttcagatttgactttaacttttctgggatacctagaataatatagtggtgactgggataagagaatatcctgcttctggctttgacatggcttttttttttttttttttttttcctttttgacagggtcttattctcccaggctggagtgcagtggtgaggtcatagctcactgcagcttcaacctcctgggctcaagcaattctcccacctcagcctcctgagcagctgggactacagccgtacgccaccatgcctggctgattttttaaatttgttttgtagaaacagggtctcatgatgttgctcaggctagtcttgaactcctgggctcaagcagtcctcctgcctcggcctcccaaagtgctggaattacagtcatgagccacctctcccagccaacacagtctttctcttactgtgtgccacagtagtaatatctcttaatatgaaatgggctttctttaaaggcattttttcagagtggcaattgtatggaaaagttgactaattaaataatcaacagactgttaactcatctggagtaggggcattcttatattcacctgtgggtgcagattcctcagcatgtgctggctttcctgtacataccaattcacattattggttttttgtttttaaaataagactatggtcttgctgtgttgcctaagctggtctggaactcttgggctcacgcagtcttcccacctcagcttctgagcactgcaggcatgtgccaccctgcccagctattcctgttaggttctttggtaaagtgatggaaggatatgactgctaagcctacctcagcgttttgaaataatgtggtagtaaactgagaatgattttcaggaactgaattagcccatcattattaacataaatgagaactaagacaccactgacttctgtttctgacttgccattcttactgttctagcttgtccttaaggcctctgtgctttttaacaaatggtttcttttgcagttggagttctctccacagacactgtgttgctacggcaaacagttgtgcacaatacctcgtgatgccacttattacagttaccagaacaggtaagcttggccaggtgtggaccatggtccatgtgtccacatgtccagggagtgcatgcggatgggccagcacacatacagtcatggttcatgtgtatcttgcttgaagacagctgtatagcacaagttctgttttttgccttctgcctttgtttgcagaacaataaaattttctatcagagtagccttgcatcagttacctgggttcctcccaagagcttgagaagttaagcaactttgtgagttgttggcctagatgggtctatatcccaggccccacttctctttctactgtgtgtttgttgatcaccacagcctgaggcaaaactgagaagatttttaaacttttaactgaaactcgctagacagctttttggaaatatttcctttttagatgaggcctatccctaagtagttgttattagaatatatgaaaacaggattctggagtcttttctttgcctcatattaagcaaattaaaaggaaaacctcacatagctctctgtaccttacttttcccaacccagccttgtatgtgacagaggatgatttgagtctaataaacgaggcacctctgcctaattttctcctgcccaatcaatggctgtaatcacataaatctcattcactaatctatcttaaccacaatttgtctcctgttttcagtgatcagctacaagtatagcttgcattgggtgtttatttggggctctgatacaataataacaaggctggatgatattaataccctttatttgtttgttaataccaaatccatggtgttggtttttgctgaacttgtgtgttgcagatgcatttctagctttgaaaagtcacttaaactttttcttttatttacaaaaagttaggcgtgcttctaatgctttgtagacctaatgctttgattttgcagtgagtaaaaatctagctctttactcatttgaaacctagaaaaggtgggactcaagttgttataagtaccttatgtttaaaaaagcaagtaactggacatgaaacttttctcatgtttactaaaacagtagtctaaagtgtttatctttgcaccaagccatctttaatcaggtacctgcacacatcatttccttttgaaatgtatcacttgatggctgtagtcagtatttaactgcttgtgcaggcttttcaataaacagttttttttctttctttgttgagacagggtctcactctgtcactcaggctggagtgcagtggcgcaatcttagctcactgcaacctctgcctcccgggttcaagcgattctcctgcctcagccttccaaatagttgggattacaggtgtgtgccaccatgccttgcttatttttgtatttttagtagagacagggtttcagcatgttggccaggctggtctcgatctcctgacctcagatgatccaccctctcagccttccaaagtgctaggattataggtatgagccaccacgcctggcaatggttgttttagattattgttttctgcagttgtatctatagtgggcttttggggtggggggtgggggtctgtggttttttgttttgtaagtgggaagaggtgtgattcctgtatttaggtaatgagtagcagttcttctctccctggtatatttatccttcttcctccttttgattatttacatcacatagcgttaattgctgaaatgaaaggatatgggtctgtgtaattgaaacatttgcttttatttgcagtaatcatttgctacttgtgatcccatttgagatatttaatgctaatctgtgctttgccttggctttctgctttgtgttgttctgtcttgcttttatgttttttgttgtcttgcaatccctcatttcttcgtttgttttgtgtttttttttctccctcatgcttgtcgttgtctgcacttggctttgattgcaaaaaaaaaaacaaaaaaaaacaaaaaaacaaacaaaaaaaccaaaacccaaactgtggggcccatatatctgcatcattgaatgtccttgtcgccgttgatgacctgctctctgctcccgtccccctccttggcctgctgtgattggtggcttcgttgcttggcttgggctgtgttgtgtgaacggaacagttcaccccagtatggccttcttgccgacaggtatcatttctgtgagaagtgtttcaatgagatccaaggggagagcgtttctttgggggatgacccttcccagcctcaaacgtaagtaactgcattattttgaaaagtgctaattagtttgttgtccagtgattatgcacagcttatttctaaatgaacttaagctatgctgttgaatatggtagccattagccacatgttgctatttaaatgcatattaatttaaataaaaattgtttatcacatggaatactcacatttcaactgttcagtagctatctgtgtctggtggctaccatattggtcaacacagagaacatatccatcatagtagaaagctctttgagacatcaatgaattagggaatatgtcagcaatgggcaatcatcttagttctagtaaaagtattctgtataggaagcaatcagcttctcttcgaaaaattggaggttagtacaagaaaacatcattattaactgttctgagtttgagggtgattgaactgatgaccaccttacacccttctcttgtaggttaacagaagacccaagtcactattgtagtgaataatagactttaacagcatgccggggtttaagagatttgcttgtgctttgcagtctcacaagctcttaccatttggtaaatggccaagaaaaaaatttcaaacatatagtctaatagtttaatctctggccaggcgtggtggctcatgcctgtcatctcagcactttgggaggccaaggcgggcggatcacgaggtcaggagatcgagaccatcctggctaacacggtgaagccctgtctctactaaaaatacaaaaaattagccgggcatggtggtgggcgcctgtagtcccagctactcgggaggctgaggcaggagaacggcgtgaacccgggaggtggagcttgcagtgagctgagattgggccactgcattccagcctgggcgacagagcgagagtctgtctcaaaataaataaaagaaaaaaagaaaaaagtaacttaagatgtaggcagtcattagaattcaaactgggactgtctaagaaggaaaaactgttcagtgtaattttaatattattgaaagttcatatttacttctgttcaggacgttgcacaaaaatttggaattctcttgttcctagtaaaaatggggcttctgagaaaagctggttaatttttctaaattgcgttctaaagatagcagtgtctgggtgctagctaggagagtagatactaggagcctttgatccttgaaacattttgacatttggttaagccaggaaggttagctctagggtaagtttccttgatgcaggaagagacgtaagccttgtcattgaactctcaggtggcttaccaaatagtctaaaccttaaggcagtacatctctaactttgaaaagagtaggaacaagacccttcccaattctgcaggcctgtagtggatccaagtgtctatttctaactcccagattgttctggtgctgctcatcttcagattgcacttggagtagcaagacaggccattcaggaaaatgctattaacagagatgaatgaatctctaggccataactagtrtaagaaacggttttcaatgtggacatgtcctcatttttgtaaggaagtataacagaagtccaagttggtccccctaatgttgattctagttggagaatgtggatcctagttggagaatggtaagactgttagsttttgtatgtagtgaggctatgagcagtgtgttatgctgggtttcaggatgggaagccatgatacctaacaccaagaatagtaacagacaagattttaaaaggaaaagaagaaacagtatttctagttcttcctgggttctccatttctgataagaggaaatttatttactatgaagtcctatagaatattcctttacataaacatgcattttgtgtgagccaagaatacacctatttaaatgtgtattcttaaaaaacctgaatctctatatagggtgaagtttgttcctttggttagaacagcagtcagattgctcatctctatcactttttctcattgtgtcccttttctctccttagtacaataaataaagaacaattttccaagagaaaaaatgacacactggatcctgaactgtaagtacgatccccttgaatagtcagtacgctttggcttttctttttccctttsattctcttgaagtttgcatgaccaatcagatgatcctatattcttgggctaaatctacataacatacatctaatggatagtaaaaccatggaaaacactgaagtactaaggaacattatttcttaatgttaattttaatgttcttaatgttgaatgtgaaacattaaagatctaaacttctagtttgcagtgaggccttttagatcatggaggactgacatgtatgtcttctagatgttcctaaaatggatgggatggtatttggatttatttggaattttcagcaccaggaatctgtcttaaaaattagccaggttttggccgggcacggtggctcacgcctgtaatcccagcactttgggaggccgaggcgggcrgatcacgaggtcaggagatcgagaccatcccggctaaaacggtgaaaccccgtctctactaaaaatacaaaaaattagccgggcgtagtggcgggcgcctgtagtcccagctacttgggaggctgaggcaggagaatggcgtgaacctgggaggcggagcttgcagtgagccgagatcccgccactgcactccagcctgggcgacagagcgagactccgtctcaaaaaaaaaaaaaaaaaaaaattagccaggtttggccgggcacagtggcccacatctgtaatcccagcactttgggaggccaaggcaggatcacccaaggtcaagagttcgagaccagcctggccaacatggcaaaatcccgtctctactacaaatatataaattagctgtgcgtggtggtgcgcgcctgtaatcccagctactcgggaggctgaggcaggagaatcgctggaacccgggaggcaggggttgaagtgagctgatatgacgccactgcactccagcctgggcgacacagagagactccatctcagaaaacaaaacaaaaaacagccaggcatgatagtatgtgcctatcctagccaggtagctgagaggccaaggcaggaaaatggcttgagcccaggagtttaaggttgtagtgagctgtgatcatgccacccactccagcctgtacaacagagaccctatctctaaaaaaatagaaactttattaaaactattttcagttctttggtcatgaccttggctgtctttgtcagaagycatgggaaatattgcaagttttcatttggttaaggtttggggttaattttggaattggctctgctcttccaggtttgttgaatgtacagagtgcggaagaaagatgcatcagatctgtgtccttcaccatgagatcatctggcctgctgggtaagtcttaacgttgttactttctctggaatttttctttatcgtgaatattaacaagttttttattctatgcaattgactgtattatatcttcaaagttactatctttaaattgttttctttgggtttggccacgataattatagttcgctttttaaaaattaagtaacctagtatccaaaaatagatttttatcttatttttatgcattcttcttagccatataaatatattttattctgctggattgtttattaaaattatattgtagttattacacatcaaaagtaaatatttatggccaggcgaggtggctcacgcctgtaatcccagcactttgggaggccgaggcgggcggatcacctgaggacaggggttccagaccagcctgaccaacatggcaaaacctcgtgtctactgaaaatacaaaaattagcctggcgtggtggtgcacgcctgtaatccagctactcaggagggaggctgagggaagagaatcacttgaacctgtgagggggaggttgcagtgagctgagatcacgccactgcactccagcctgggtgacagagtgagactctgtctcaaagaaaaaagtaaatgcttttgttccggcatctagaaactaggatcatgctgctggcatgaataggtctggccctggtaagggtcaccatttggttagggcaggaacagcaagttataaggctgcagtcatagtgtaattgcctagtaaaagggaggggccatcgctctgtacaagaggaactaatcccagccatgttccaaaggaagcgggtatatgggacatccagtgcctctcattaagatgggatctccatctcttctgctctgttcttgggctgattgttgttcctgatttggaggttacaagaaagggcaggctaattgacagatttcacttttctttttttcaccgttattttcacatagaaaataacactaaggaaaataggtgatggtttagtggatactttattttcagtgtgacttgtcttttaagtgtgcctttttagtgctttccttaacagatttcgtaagaatgattaagagacttcttgtggttcttctaatttaggatcagtcaactgaatgaaaataatctgttattactgtgttaarcttgctttttcttaaaagtaatttatgttcattataaaatttgaatagtatgacagtttatgaagtaaaaagcgacggtctcagcttctctcttcccacccagattcctcactacaggaataacactcttttgtacatacaatcatacattttctttttttctttttttgagacagagtttcgctcttgttgcccaggctggagtgcagtggcgcgatctcggctcactgcaacctctgyctcccaggttcaagtgattctcctgcctcagcctccctagtagctgggattataggtgtgtgccaccatgcccggctaatttttgtattttggtagagacagggtttcatcatattggtcaggctggtcttgaactcccgacctcaggtgatccacccacctcggcctcccgaagtgctgggattacagcatgagccactgcacctggcacattttcttgatttatgtgtatttaatttttaatttttgtattttgttataagtcatagacttttttaattgagtctcactttcatcacccaggctggagtgcaatggtgtgatctcagctcactgcaacctccacctcctgggttcaggcaattctcctgcctcagcctctcctgcctcagcctctcgagtagctgggattacaggcacataccaccatgtctgaccaattcttgtatttttactagagacagggtttcattatgttggtcagggtggtcttgaactcctgacctcaaaagatccacccacctcgacctcccaaagtactgggattacaggcgggagccaccacgcctggctggtcatagacactcatttatgtctgctgcatttttaatggatgcatagtattctgtaacatactataatccatttatttacttggttgatgaacaagtttatacaagaaactacttaggagacaaatatcatgtgcatttgcagtagctgaatctattggttctactctcaaaatgtactttccaactagtagcatataggaaatgtcacctcttaggatttttctcccctatcacattagcaaaacctatcttgatttgtaatccttgatcatcttttcctgtgtaaaccaatttatatgcccttcatgtttcttcatgtctgttgcttgattttcaattatcttttttattcttactgatttctaaaagctctttgtgtattagttttattaactcttcattagaaatttagaaatacttctgctagattgtcttttgaattttaactttttgttagtataaattcaacggtttatctaagttgtgtaagcaaagttttggtttacatttagattcgtctgtgatggctgtttaaagaaaagtgcacgaactaggaaagaaaataagttttctgctaaaagtaagttttattcttaaaggtaaattttggcaaaacttatctgaagcctagataagaaaccatccaaagtgaattactttgtttttaatcacagtaatagagtaaaaataaaataattctataatctccttatagttgatctgtaatatattttttggtgtgaaatttattagaccaaagaaaaaaatttccaaggaacggatttgtagaatgcacaagatacgtgtttttcctgttcctatatttttccctatttggggcatttcataaaggaggaataaggtgtggaaatgattggccggaattgccatctctcagtttgtttatttattattttttattttattttttgagagtctcactctgtcccccaggctgcacagtgcagtggcacgatctcagctcactgcaacctccgcctcccaggttcatgtgatttttctgtcttagcctccagtgtagctgggactacaggcatgtgcctccacacccagctaatttttgtaatttattagagatggcgttttgccatgttggccaggctgatctcaaactcctgatcacaggtgatccacccaccttggcctcccaaagtactgggattacaggcgtgaaccaccatgcccaacccctcagttcacaccatttatatgggctaccttttggccttatgtgattgttttctactgtgccaggaggatgtcaaaaattttatcatgtaagtaattaacactaataatctaaatgtagtatttgatttagttttggggtgttttactgatctacagattattttgattcttgtaaggtttctcaaaatgctcaaccttcgttactttaaaatattactgcaatctaggcaaagtacatagagatgttcattgtttatatatttgtgtgtgtgtgtgtgtgtgtgtgtatatatatatatatatatatatatatatatatatatatatatatatatataatgtttggttggttgggttttttgttttttggaaacaaggtttcactgtgttgtccaggctgatcttgaactcctggattcaagcaatcctcccacctcagcctcccaaagtacaaggattaggattatgggtgtgagccttgtctcctggccattgttctatttctgtttgtttttgtttttttttttgtttttttttttttttttttttttttgagacagagtctcgctgtcgcccatagtggcgcagtctcagctcactgcagcctctgcctcccgggttcaagcgattctcgtgcctcagcctcccaagtagctggaattacaggcgtgcaccaccatgcctggctaatttttgtatttttagtagagacggggtttcagcatgttggccaggctggtctcgaactcctgacctcaggtgatgcgcccacctcagcctcccaaagtgctgggattacaggcatgagctaccgcacccggcccctgttctgtatttttataaactcttccaaaattggaaatttttcaaaatgagaagttggggaaaatgatatttagaaattattgagtactgtgtctgctttaatagcacatgtattaaaattagaatgatatgaagattagcatgttccctgcactcataygacatgtaaatctgcaaagtagtgactactttgctatgattttttaaaatttcaccaagttatcctgtttgtattgaaaaaagtacaaatgagatttgaggttgaaccttaagactaacaacagtaaatttgcacctcagtaacttttaacttttacattcctagggttgccatctaccagacttggcacctttctagagaatcgtgtgaatgactttctgaggcgacagaatcaccctgagtcaggagaggtcactgttagagtagttcatgcttctgacaaaaccgtggaagtaaaaccaggcatgaaagcaaggtatctagtcatttcacttttcttctcctcgtggatccaaaattgctcatacatggttactattggtgattccagtctgaatgagttatgttgtggttcccccancatctcaattgtataggtttgtggacagtggagagatggcagaatcctttccataccgaaccaaagccctctttgcctttgaagaaattgatggtgttgacctgtgcttctttggcatgcatgttcaagagtatggctctgactgccctccacccaaccagaggtatgactagctcacagtggctagctccrgatttgtgtgggagttccaacttataataggtggaaaagcataacaggcaagaaaatgtttagtgtgtttggtttggaaatgcaaaatctcaagtgtccagtaattttaaagtgaaacagattaaaaagcaaacccccaaacaaaataaccgctcaatactgctcttctgtggtcatagtaataaaggatatgaatagcaacctgaaattggaatttgaaaacaaacgtactactcttcagaaaatgagcttaaatctggattaagtagctatgtgaaaatatatcatacaaatcgggtgggaatttcttttctccaaaaatagtataaaggcaataataaaaacrtatagggatcaccaaatactgattgatgtgtatgtgccaggcactgctagttactacaaatagaaggaaaccacaggctcactgaacttccctgaagggttcacggcggagtcgcctacctgcctgtgatgagcttcacaaataacgatgtgagcaaagagcctgggagagtgagagggtgttattaggcacatggagtaaagaactcattatgtgacctgactttttttttcctcttcatttctcttcattttgtataggagagtatacatatcttacctcgatagtgttcatttcttccgtcctaaatgcttgaggactgcagtctatcatgaaatcctaattggatatttagaatatgtcaagaaattagggtaagcatattttgataatggctttttttctttaactagcatggcattctggtgagatataggttaaatatgcaaatatataactcttggcctttttttcctcattttagttcttacgtaacaattctcttaactttgttggagcccctttgaagttaatgtcagtagagagaaatggatatgttggccctagtttcacccatccarcattagttttgtttgtaagctaagccattgggtccactttgctttgaagtttgatttgtgcccctcatttgagggcagaattttaactgcatttgatccttttacaacctgggtatgaagaccaaaaacagttctggagatacttcttacctttagagtatgtatgtcattggaaacattcactccctcatcttgaagtctgtttctctgaacagtgtgccttttaatttagctcttgttaaatgggtccattttcctttgcagtgtaatcttcatttggtcttaacatgcagacttagggtttttggatccagggctaagtcacccacttcgtggctgagattcgcaacatcccaccatggcctccaaaaataagtaggcaatatgagatccattgttactactgtgagttatgcctaattttggcctcacaatgttaatctcattctgggttatatatacactgtgttatcttgggaaaaattattggtatctatatcaactccaacttgtggtttaaaatgtagccttctagaatagattatctcttttccttaatgttctttctctttgtattgttagttacacaacagggcatatttgggcatgtccaccaagtgagggagatgattatatcttccattgccatcctcctgaccagaagatacccaagcccaagcgactgcaggaatggtacaaaaaaatgcttgacaaggctgtatcagagcgtattgtccatgactacaaggtcagttgggacataggggycaggtgctgacaatagatctggaaatgcactaatgttgctgctctttgttctgtcatttaacttttttttttttttttttttttttttgagacggagtctcgctctgtcacgcaggctggagtgcagtgacacgattttggctcacttcaagctccgcctcctgggttcatgccattctcctgcctcagcctcctgagtagctgggactacaggctcctgccatcacrcccggctaaatttttttgtatttttagtagagacggggtttcacygtgttagccaggatggtctcgatctcctgaccttgtgatccgcccgccttggcctcccaaagtgctgggattacaggcatgagccaccgtgcccagccttttttttttttttttaaacaaaagtcttgcttgttctacctcttgcatgtaattcctaaaaatgctaatttgattgcttttattttgtatattcaaaatttttcaatataagaaaaaccaggttttgaagagcggtagatcaagaaatccctgttttaaacatgtaaccaaaattttattttatttatttttggggggagggtggggatagagttggggtatcgccatgctgcccaggctggacttgaactcttggcctcaagcattccaaagtgctgggattacaggcatgagccactgtgcccggccttaaaatatatctttttgttttggttttttgttggtttggtttgggttggttagggttttaggggtgtgggtgttttgttttcagaaagggtcactctctgtcacccaggctagggtgcagtggcatgatacccgctcattgcaacctgtgcctcccaggctcaagccatcctcccatctcagcttcctgagttgctgggactaggtgcacactacgagagctagctgatttttgtatattttttgtagagacaggatttcaccatgttgcccaggctggtctcaaactcctgagctcaagtgatctgcccacctcagcctcccaaagtgctaggattataggcatgagccacatcacccagccaaaaatatattctcccttttttttttttggacggagtttcaggctggagtgcaatggtgcagtctcctgggttcaagtgattgtcctacctcagcctcccgagtagctgggattacaggcatgcaccaccaagccaggctaattttttctatttttagtagagacggggtttctccacattggtcaggctggtctcgaactcctgacctcaggtgatccacctgcctcggcctcccaaagtgctgggattacaggtgtgagtcactgcacctggccaaaaatatattcttaattaacagtattatgttattcataaatataggttgtctcatgatacagacttgtcttcctcaatttagtagttcaactaaataaagaagttttccyaagcagcccagcaaatcattctgcagcagatactatttccagtatttgtagttttggtcattttgaacaaagctgtcagtaaaagctgctgaaattccaaggatgggtgtgaggagggcatgcttcataccacatattctgtgataaggagtggtaggggccatggcatgcatgatggtgctaccaccctgacgttgatcctgkcaggataattgccacttggttatataaaggcagataagctccctgtttttgtgggtagaagaaatagaaaaccggaaatattgactttaggccaggccttttcactatttatttttctaaatactccctggcttacggcttaggtataaagtctctgccagctttcaagacattttaagctttcatgtttcttgtcagccatgattattctgtataatcaatgctttaaaagaacatagaaattcctanatgtacatgcatgttttcacaggatatttttaaacaagctactgaagatagattaacaagtgcaaaggaattgccttatttcgagggtgatttctggcccaatgttctggaagaaagcattaaggaactggaacaggaggaagaagagagaaaacgagaggaaaacaccagcaatgaaagcacagatgtaagggcattgagtttcctttgaaacttctatcatgattctaatatttaatccagaagtgcacttaaactttcaattgggttttaaagctttcaggtgtaaaagagctctttaagttggacaagaaatattggcttagagaggttattagggttctgtttcagtggtattaaacttttaaagcatcagagccccttttaaaatggcatctcagactttgagtaatgtgaaatgataaaagaaactgaaggaaatcctgaaaaactgatagaagattacttatctgaaggactaggttatgaatattataggccttgtgggtcacatatctctggcatattttctgtcttttaaaaacacactctttttaaatgtraaaaaccattcttagctatacaaaataggcctgagccagaatttaagttactaagcctggcttagtaacctcaccagttatttccccatagcatatctcgaattacctccattgaatttaacttaacaaaaggcacccttaaatagtctgttaacaaactcttacagccttgtcatttagtatttgtaggctcataacattttagaatatgagtggaaggaaataaaaccaaggtcttctggctccccactttgatacactcttcactaccccaaagtgccaccccttccttgttccctagccccaatctgggatacattcaatcaatctacagggtctgcacattctgtggcctcttctaggcaaaaagctaaagggctgccattgccttaaagatcactgggagaaaattaggtcaaataacaactttaaggagaaagaataagtgaagagaacagctagtaaaataagttacaggcataagattatgatatctagtttcaaagaagggagatattctgtgctattcccaaattacttaacaaaaaccttattttcttgtctcntttgtgctactctgcaggtgaccaagggagacagcaaaaatgctaaaaagaagaataataagaaaaccagcaaaaataagagcagcctgagtaggggcaacaagaagaaacccgggatgcccaatgtatctaacgacctctcacagaaactatatgccaccatggagaagcataaagaggtaagatgcagccacccagagttggggaaaaacrgcaagatttctggccaggcatggtggctcacacctgtaatcccagcactttgggaggccaaggcrggtggatcacctgaggtcaggagttcaagaccagcctgaccaacacggtgaaaccttgctctactaaaaatacaaaattagctgggcatggtggcacatgcctgtaatcccagctactcaggaggctgaggcaggagaattgcttgaacctgagaagcggagattgcagtgagccgaggtcacyccattgcactccagcctgggcaacaagagcgaaactccacctcagaaaaagaaataagaaatgaataaaaacactgactgttcgctgggcgtggtggctcatgcctgtaatcccagcactttggaggttgaggcaggcggatcacttgaggtcaggagttggagaccagcctggccaacatggcgaaccraaaccccgtctctactaaaaatacaaaaattagcctggcgtggtggcacacacctgtaatccttgggatgctggggtgggaggatcacttgaacctgggaggcagaggttgcagtgcacttacagcctgggtgacagaacgagactctgtttcaaaaaataaaaagatttaacctttctgaaagtgaattagtaaatagaattggagaaaagttaaacttccacatatggacttacaacccccttctcaaaactttttgagttatttcatcatttacattgtttagttgttcttgcagtcatttgggaaaataactgggtaaggttttttttttctctctttaatatcatataattgataacgaaagccrggagaattgaagagtaattcctctcagggtttgtccaatggtagtaatctcgattgttcagtcagactcctcattttactatctcggttctcagacatataatcaagttcttayaggaagtggtaattaagttgagagggaaatgaaggcttgatttcaggttgtaattccgtacctaaaaattggttaaacagtctctttgggagagaaatagttaacaaaatcttttttagagaggaatttgttataatgatgttatcatggtgaacacctatatacataggtgttcaaagtatcttttcccccactgctccccccatcaccaccccttttttgttagcctagaataatgggctacgatgtaataatggtaataaccattatctcagccatgctagtgaaatggaaggattcctgagttctaatacgttaggtaatgattattaacaattaatagttactagctatttcaagcagtaagtaatgccacagaatcctaggcagttgggaaaagcccttagaatatattgtaataggtttgacttaaattgtggacacattccatggctgtttaaatttaggttgtaaatccaagtattggcctggttgtagggtgacagaagcagcgaacattgctggccagagacactgtgagtgtggctgccagtgtgcacagatgttgaataatctgttatcagtacagcagtttctcacaagttcctaatttcttaaggggatgttttacattttattactttaataggtgtttatagttatatactaattaatgtcaaatacatatgtaataccagctttttataccttttacactaatggttatgagaattgatggttgttacaagttttttcaaacttcaatgaacaagaattttattgctttgtcaacaaagactaagattttttatccattccattcccttccaaacctgtaggaaaagttacacaggaaagttgcataggggaccttcatgagtccaggccagttgtttttcatactgtctccatatttggatttgtctggtttgttgtaattagattgaggttaaaccatggattgcatcttaaagtagactgccttgaggcaaaatgtccactgtgcatggtgctatacctcacccagaccattgttactctgaaggagttactgaatgaaggagaaaaaaatcacaggatgtgcatttcagttctatttatagtcagtctcaagagaccaaagaggtaaagcaggaaaaggaacaggaggcgtatggtggtgaaactaactcagcattcgccagtctcattggtgctcagcctgctgtacctgctcacacctgtaatcccagcactctgggaggctgaggcaggcagatcacttgagcttaggagtttgagaccagcctgggcaacatggcgaagcctcgtctctacaaaaaatgcagaaattagccaggtgtggtggtgtgggcctgtggtctcagctattcaggaggccatggtgggataattgcttgagcccaggaggcagaggttgtagtgagccaagatcacgccactgcattccagcctggatgacagagcgaggccctgtctcaaaaaaaagagactgtctgtttttcaggtcttctttgtgatccgcctcattgctggccctgctgccaactccctgcctcccattgttgatcctgatcctctcatcccctgcgatctgatggatggtcgggatgcgtttctcacgctggcaagggacaagcacctggagttctcttcactccgaagagcccagtggtccaccatgtgcatgctggtggagctgcacacgcagagccaggaccgctttgtctacacctgcaatgaatgcaagcaccatgtggagacacgctggcactgtactgtctgtgaggtaggcaccrggttgtgggaaggaggaggtgagctccgcagggttgttctgaggggccatgcagccacgtattttatagaggcctgtgggatgctaggggcttggcctcgtgtttgaggggcagagctgaagaggctagtttttgttctacgaaaggggcttttctagcccaaacaatatctaaaatacttttgaatgacttaaatcttggagagtttacgtgcacctcctgttttttccctaggattatgacttgtgtatcacctgctataacactaaaaaccatgaccacaaaatggagaaactaggccttggcttagatgatgagagcaacaaccagcaggctgcagccacccagagcccaggcgattctcgccgcctgagtatccagcgctgcatccagtctctggtccatgcttgccagtgtcggaatgccaattgctcactgccatcctgccagaagatgaagcgggttgtgcagcataccaagggttgcaaacggaaaaccaatggcgggtgccccatctgcaagcagctcattgccctctgctgctaccatgccaagcactgccaggagaacaaatgcccggtgccgttctgcctaaacatcaagcagaagctccggcagcaacagctgcagcaccgactacagcaggcccaaatgcttcgcaggaggatggccagcatgcagcggactggtgtggttgggcagcaacagggcctcccttcccccactcctgccactccaacgacaccaactggccaacagccaaccaccccgcagacgccccagcccacttctcagcctcagcctacccctcccaatagcatgccaccctacttgcccaggactcaagctgctggccctgtgtcccagggtaaggcagcaggccaggtgacccctccaacccctcctcagactgctcagccaccccttccagggcccccacctgcagcagtggaaatggcaatgcagattcagagagcagcggagacgcagcgccagatggcccacgtgcaaatttttcaaaggccaatccaacaccagatgcccccgatgactcccatggcccccatgggtatgaacccacctcccatgaccagaggtcccagtgggcatttggagccagggatgggaccgacagggatgcagcaacagccaccctggagccaaggaggattgcctcagccccagcaactacagtctgggatgccaaggccagccatgatgtcagtggcccagcatggtcaacctttgaacatggctccacaaccaggattgggccaggtaggtatcagcccactcaaaccaggcactgtgtctcaacaagccttacaaaaccttttgcggactctcaggtctcccagctctcccctgcagcagcaacaggtrcttagtatccttcacgccaacccccagctgttggctgcattcatcaagcagcgggctgccaagtatgccaactctaatccacaacccatccctgggcagcctggcatgccccaggggcagccagggctacagccacctaccatgccaggtcagcagggggtycactccaatccagccatgcagaacatgaatccaatgcaggcgggcgttcagagggctggcctgccccagcagcaaccacagcagcaactccagccacccatgggagggatgagcccccaggctcagcagatgaacatgaaccacaacaccatgccttcacaattccgagacatcttgagacgacagcaaatgatgcaacagcagcagcaacagggagcagggccaggaataggccctggaatggccaaccataaccagttccagcaaccccaaggagttggctacccaccacagcmgcagcagcggatgcagcatcacatgcaacagatgcaacaaggaaatatgggacagataggccagcttccccaggccttgggagcagaggcaggtgccagtctacaggcctatcagcagcgactccttcagcaacagatggggtcccctgttcagcccaaccccatgagcccccagcagcatatgctcccaaatcaggcccagtccccacacctacaaggccagcagatccctaattctctctccaatcaagtgcgctctccccagcctgtcccttctccacggccacagtcccagcccccccactccagtccttccccaaggatgcagcctcagccttctccacaccacgtttccccacagacaagttccccacatcctggactggtagctgcccaggccaaccccatggaacaagggcattttgccagcccggaccagaattcaatgctttctcagcttgctagcaatccaggcatggcaaacctccatggtgcaagcgccacggacctgggactcagcaccgataactcagacttgaattcaaacctctcacagagtacactagacatacactagagacaccttdtattttgggagcaaaaaaattattttctcttaacaagactttttgtactgaaaacaatttttttgaatctttcgtagcctaaaagacaattttccttggaacacataagaactgtgcagtagccgtttgtggtttaaagcaaacatgcaagatgaacctgagggatgatagaatacaaagaatatatttttgttatggctggttaccaccagcctttcttcccctttgtgtgtgtggttcaagtgtgcactgggaggaggctgaggcctgtgaagccaaacaatatgctcctgccttgcacctccaataggttttattattttttwtaaattaatgaacatatgtaatattaatagttattatttactggtgcagatggttgacatttttccctattttcctcactttatggaagagttaaaacatttctaaaccagaggacaaaaggggttaatgttactttaaaattacattctatatatatataaatatatataaatatatattaaaataccagttttttttctctgggtgcaaagatgttcattcttttaaaaaatgtttaaaaaaaaaaaaaaactgcctttcttcycctcaagtcaacttttgtgctccagaaaattttctattctgtaagtctgagcgtaaaacttcaagtattaaaataatttgtacatgtagagagaaaaatgactttttcaaaaatatacaggggcagctgccaaattgatgtattatatattgtggtttctgtttcttgaaagaatttttttcgttatttttacatctaacaaagtaaaaaaattaaaaagagggtaagaaacgattccggtgggatgattttaacatgcaaaatgtccctgggggtttcttctttgcttgctttcttcctccttaccctaccccccactcacacacacacacacacacacacacacacactttctataaaacttgaaaatagcaaaaaccctcaactgttgtaaatcatgcaattaaagktgattacttataaatatgaactttggatcactgtatagactgttaaatttgatttcttattacctattgttaaataaactgtgtgagacagacaccctgactttgtttcacttgataacacatctttgtcttggagtacacccgttttaagtgcctaatgcttaggattcagaggaaaaagtgaaagcattagcttatagcctctttaatctactacgtataatgtattcacaagtagatcttggtgaatttatccaaagttctgggaaaaagtactgcaggtaccagctaacagtcaaggtggaagtgataacctacttaacaccttgatacaggaccccttaaggatgacctcatggtcttccaatcaccttcatcttacagggatgagaaggaggacctaagaagacggatcatatctgcctaagtcccaagtaacttcttggaaaaaacaagacttgccaggcatggtggctcacgcctataatcccaacattttgggaggccaaggcaggcagatcacgaggtcaggagttcaagaccagcctggccaatatggtgaaacccccatctctactaaaaatcagcagggcgtggtggtgggcacctgccgtcccagctacttgggaggctgaggcaggagaatcagatcctggtggaggttgcagttagccaggatctcaccactgcactccaaagactccgtcttttaaaaacagagaagatgaagctaggggaacactcctgtttgctaactgaatacaaagaagtcagttggaatcgggttgaagggaaggaaaatgtgtggaaataaaacctagaaggctgagagagattacacatgagtccagtaatatgctagatgctcaaagaatggagagattattgatcctccatctgaacattgcagtagctgtgaacaagttgttaaaacaaatgtgttagtacactaaaaagtactgagctgctttggtatcaattccagatctttcttttatcacagagatttacactaaccatatatgactgctaaaggatttcagatacgttgacctgttgctactattttagtctgaaaacaaccagcatcttttttttttaagacagtctcgtcacccaggctggaatgcagtggcacaattgtagttcactgtagcctcaaactcatgggctgaagcagtcctcttacctcagcctccctagtagctgggactcaaaggtgtgtaccatcatgcctggctgactttttaaaatttttatagagacagggtcttgctatgttacccagtctggtctcgaactcctggactcaagtgatcctccaccttggcctcccaaattgctgggattacaggcatgagccaccttaccagcatcttaatgtgaggtgaactcactcagcattaatcagagccagccccagaaaatgtatctagtatcaagcatccagcatccacctgcttcagctcagtgaccccgcagatatccatggagcagctacatctgtgccaggccaggcagagcacacatgaacagcatgcagccctgccctcaacctaaccagcttaaggtctagaagacagcatgacaaagtacaaagcaccaagtgatctatgcaaggaatgcaagagggaatccatgaaagaaaacctagctgatgggaattggaaatgtttctggaaagggtagcatggaagctggatgttggaggagagataggaagaggaggagaggaggcggcgcccagaagagtgcaccacattctgctagggagcagctccaggtctacttggctgagacccgataaacggaagtagtgaacacctgttccagaaatacggccttccagctccctaagactaggggcccaggattcatgtgaataaaccctcaaaagggaaatgtttagaattccatcccatttccaagcagtaaattcccaggtttcaaagctctgcctctggctaaagacagccgggttgaagtgttagaccagtgcattcttactgcaatgatgaaagcaggaagtaggggcagaagtcattaaataggaaggaggctgggcacggtgactaacacctgtaatcgcaacactttgggaagccaagatgggtggatcaagacgagcctggccaacatggtgaaaccccgtctctgctaaaaatacaaaactaggccccgggcacggtggcccacacctgtaatcctagcactttgggaggctgaggcgggtagatgacctgagttcaggagttcgataccagcttggctaacatggagaaaccccatctctactaaaaaaaacagctgggcgtggtggcgggcactggtaatcccagctactcgggaggctgaggcaggagaatagcttgaacccaggaggcggagattacagtgagccgagatcacgcccttgcactccagcctgggagacaagcaaaactccgtctcaaaaaaaaaaaaaaaaaaaaaaagaagggcggggggaaaagctgccctttcccagatcagaaatagtgttatggaggtagaagatacggattaatccagagtcagcaatataataagatgatttcaacgtttgtagttttttggatgttcacaatgaaaagttaggaagaggccaggtgcaggtttccacctgtaatcccagcactgtgggagactgagggaggaaggattacttgaggccaggagtggggagaccagcctgggtaacagagtgagaccctcatctctacaaaaaataattaaaaaaaaaaaaaaaaaaaacatggtggcacacacctgtagtctcaggtacttgggaggctgaggggggagaattgcttgagcccaggaggtcgaggctgctataagccatgattgtggcactgcatttctgctagggtggccgagtgagaccctcctgggctgttacagcacatcaatctatgaaatgggtccagtgtgctagcagtgccccaggtgctgtcattcacttcgcttactgactcctcaataacagccccactcaacaaatgaaaaacaagctcaggtgaaataaggtcctcaagatcacatagccagtaaaaggcttaccaggacaatggcctgttggactccaaagccattcctttccatgtcctttatctcctttacagcagagaagccccactggtggctgcaaattaaccagcagatgtgtcatagggacactcaagcagactcaaaatacagactaaacactgaaaagtggaggggaaggggacaactaaggaagcataaaaataatctccctaggcttctcattttacaaccaaggaaacatctccagacagtattatgttcatgatgaggtcatcctacttaaagacagaggacaaaggctggcatcaaaaagaaaaaaattggccgggcacagtggctcatgcctgtaatcccagcactttgggaggccaaggcaggcagatcacgaggtcaagacatcgagaccatcctggccaacatgatgaaaccctgtctctactaaaaatacaaaaattagctgggcatggtggtatgcacctgtagtcgcagctacacaagaggctgaggcaggagaatggcttgaaccgagatcttgccactgcactccagcctggtgacagagcgagactctgtctcaaaaaaaaaaaaaggaagaataaaatgttaggaataattttttttttgagacgtttcactcgttacccacgctggagtgcaatggcgtgatctcagctcacctcaacctctgccacccgggttcaagcaattctcttgcctcagcctcccaagtagctggaattacaggcatgcaccaccacgcccagctaattttgcatttttagtagagatggggtttctgcatgttgttcagtctggtttcaaactcctgacctcaggtgatccgcctgccttggcctcccaaagtgttgggattacaggcggagccaccgtgcccggccaggaataaatgtaacagaagcgcaaaaaacttgtacattgaaaactagaaaagactgttggaagaaattaaggacctaaataaatggaaagacattcttgtttataaatcagaaaaccttatattgttaaagcaatactcctgggccagggtcagtggctcatgcctgtaattccagcactttgggaggccgaggcaggcagatcatgaggtcaggagatcgagatcgtcctggctaacacggtgaaaccccatctctactaaaaatacaaaagattagccaggcatggtggcacgtgcctgtaaccccagctacttgggaggctgaggcaggagaatcccttggacctgggaggtggaggttgcagtgaggccaagatggcaccactgcattccaacctaggtgacagagtgagactccgtctcaaaaaaaaaaaaaaaaaaaaaattaacaggctgagcacagtggctcacacctgtaatcccagcactttgggtttgggaggctgaggcaggaagatcacctgaagtcagttcaagaccagcctggccaatatggtcacctctactaaaaatacaaaaattagctgggtgtggtgacacacgcctgtaagtcccagctactcgggaggctgagacgggaggactgcttgaacccaaaaggcggaggatgcagggagctgagatcacacgactgcactccagcctgagctacagagtggaccctgtgtcaaaaattaaataaaataaaaaacaaaagcctatttaaaaaatttttttgttttcagacagggtctgtctccattacccaggctggagtacagtggcacgatctcagctcactgaaacctccacctcctggtctcaagtgatcttcctgcctcgggaagctactcagcttcctgagtagctgggaccacaggcacatgccaccaagcctggctaatgtttcttttgttttgttttttgttttgtagagatgggattttgtcatgctaatcttgaactcctcccaaagtgctgggattacaagcgtgagccaccatgcccagctgaaaggctgaccctaaaatacatatgaaaatccaaagaagccagaacagccaaaataatcttgaaaaataaaaacaaatttggagcactcacacttcttgatttgaaaacttaccatgaagctatagtaatcaagactctatggtactggcataaggacagacatttagatcactggaatagatctgacaatccagaaataaatccatacatttatggtcaattgattgtttataaggttgccaaaataatccaatggagaaagagtaacatttttaacagatacttctggaacaactagacatccacatctaaaagaataaagttggccgggcatggtcgctcacgcctgtaatcccagcacttttgggaggccgaggcaggcagaccacgaggtcaggagatcgagaccatcctggctaacatggagaaaccccatctctactaaaaatacaaaaaattagccaggcgtggtggcaggcgcctgtagtcccagctactcgggaggctgaggcaggagaatggcgtgaacccaggaggcggagcttgcagtgagccgagatcgcgccactgcactccagcactccagcctgggtgacagaacaagactctgtctcaaaaaaaaaaaaaaaaaaagaataaagctggaggccaggcacggtggctcacgcctgtaatcccagcactttgtagggcagaggcgggcagatcacttgaggtcatgagttcgagaccagcctggccaacatggtgaaaccccgtctctactaaaaatttaaaaattaccatagtgatggggcctgtaatccgagctactcagatggctgaggtgggagaatcacttgagcctgggacacagaggttgcagtgagctggatcgcaccattgcatgcctgcctgggcaatagagtaagcctccatctcaaaaataaataaagttggacccctaccttataccaaatataaaaatttactcaaaatggatcatagaccaaaacataaacactaaaatattaaaatcac

SEQ ID NO: 96050 - DNA, 13101 bp, Homo sapiens
gctatgataaagcggtactgccttgaatgttatgttttctggagggaaaaagagatcgtgggcaagtgactttatcagcttttccactccttgcctatgttcttttgccggttattacaattccttgaggtcttattttttcccccttttattttactttttatttccatgggttatcggggaacaggtggtattggttacatgagtaagttctttggtggtgatttgtgaaattttggtgtacccatcacctgggcagtatacaccacaccttatttgtggtcttttacccctcacccccttcccaccctttccccctgagtccctagagtccactgtgttattcttaagcctttgcatcctcatagcttagttcccacttatgagtgagaacatatgatgtttggttttctattcttgagttacctcacttagaatttgtctctaatttgcagaagaggaaaaccaagagcttggggagattaggtggcttgcccaagatcacagagagaagggaagagtcaaaccttagagtcagatcttttgactcgtgttcaattctacatctttatgtgattctaggaatcatgaatttgataacaaagaaagcaaatacatttttccactataataaatctgtcacaggtcacagagattacaggtgtatatctaccttacactaatttctcatctacctactatgtgccaaacactgagttaggtgccaagacaaaaaacaaaacaaacaaaacaaacaaacaaacaaaaacttcatccgatcatccattacctcattaattgagaacattgattacatgttgcttgcaggccaggtttaccatttgctcaccatgccagaatgcaatttgaattaactctagaaaggggtaggagttggccaggtggaggagcatcccagataaaaggtagagcacaagcaaaggtatgctgtgaaaggggtgtggtggcgtccttgggtatcagggagcagtgcagaatgcatccggagggccagaaactggctcccattgggaagagttggtccatgaggcaaggaaggttgacctgggttcctttacctcctctatccagtagtgaggctgttttctctctctgccctttctttctttgccatatgccatgaccccaaaaatcaaatgactgtaggctggtaacattaaaaagcaaagcagggggctgggagtgggatagactgggaagggtcttgaagaaacttcctggtgcatatttccagaaagccagtaaccagtgatgcaacaacagttatattaaatgcctattgtatgccagatactatgctaagctagtattatcacatttaaggttcactttagcctactgatataggctccatttttagctccgttttacagatgaaaaaaagaggcaccaagaggtgagacgcctgcccaaggcctcactgccagagggartgggtgccaggaccagaagacagtctgatcacaaaacacgtgctctgaatcagctttgctttgtggcagaagtaacacactggagtgcacctgcaaatgtttcacttgaccattggcataaattgtttcttgtcatttaaacatcagaaaaatgtaaatgtttacatttaaacgtcatgtaaaaatgagaatatctggcaacaccaaacctgcaatcacaagccaattaacaattacagccaagtaggagagacctatgcccccgagttcactgcagtccccactactccctattgtcttagcactggattcctaattcgcaattcttcccagcattatgaaaaatgttgagcatacagaaaagttgaaagaattgtgcagtgaacaccaaatacctagattctaccattaacattttactctacttgttttattacttacctgattatcttcccatctctccattcgctcatattctttttgatgcatttcaaagtcattaacatcagtatactttaccttgcaacacttctgcttgcatgtgtccatctgtgtcattcattagagctcaacatttgcttagtttcttttcttgagatgagatttatatatagtgaattgcacaatcttaagtgttaccatcctatgagtgctgatgaatgcaaacgctgataagcccagacccctccacgatatagaacatttgcctctcccggaagtttcttcatggcccttcctacttcatcccactgccacctggagctcccttggcctgcctagcataagcaaaggcatcctgcccttctctaagtgcccccactgctgggctacctggagagagaatacaggttacagagagtgtgatgcaatcagtctgtgggtgatgggggctggggcagccttgagcaaggagggagggcagttctgcacccccatccagacatccactggacatctagctgaatgaccatcaagtcatgcgtgagccatgggaggcctctgagcggggctctcctccctttagatataagaatttctacaatttccctcaaaagacatttctaatcttcttggcttttttcaccaccctcttttagtcatgcaggtttgattcaaatgttttgagtggtaccccttatttgccccaagcacatggtttaacccagcccacctggacacagcatcctctcattttcctttgagccaccgaacattttctgtgtgcagaaaaagggtcccggatgctggctaaccaccgtcatgcccatgatcagccctgggaagcctggctgagccctgcggtgttaagcctcatcccagcttaggaggtgagatgaacggaggtcccacacgttgccaaagagctcagagcaaggccagagagaccagggagcatctgaatcacactctggactattgggacaacagcttctgatgtctcaagtccatggatatttctctgtgcaagatcctggccaaagacaggttcacaggtatcagagatggagacacaaaaaaaatgataagttgcctcaagagccttaaggtattccccttccccatctccaacatcttccccaagccgtccttgataaaaagaaaatccaggtaaaatcagcatgcttacataataagtataagacaattcctccaacccccactcccagtcagctggtcatttctaaaaccctcctataaagaaattctagaatgacctctgtgaaagacccttgctggtttttgagaccagggtatgaaaactccccaaaaccaaatacttccaagatcaggcagacaatattaatgatggaagctgatgggttcttaccatagtgaatttcatattctgtatgttgtcatctatacagatacttgcttcattcattcatttattcattcattcattcatttctacatgttaaacacataggaatgctctttgcttaaaaaaacacccctgagatttgtctttaaagatacaaccttctaggtctaggttttgtcatcctattttgataggcagtagatacaagaaatatttcacttccctctttgttataacacaagtgtgatacctcatgacagaggacaagtagtggctgcacagcttattgagggtcactacagagtggtgagaagtgcagtgaaccggagctcgtgtgtctgtccagggaggcagctgctacccacacccagatggttgctgccgctggagtattcagtccagtagcgctacagcttcttgtgtttatttttcccgcaagagaaaccagaagtaaggattttttatgggccgggcatggtggctcatgcctgtaatcccagcactatgggaggccgaagcgggtggattgcttgagctcaggagtttgggaccagcctgagcaacatggcaaaaccctgtctctactaacaayaccaaaaattatccagacgtagtggtgtgtgcacctgtggtcccagctacttgggaggctgagctggaaggattgcttgagcctgggaggtggaggttgcagtgagccgagatcgtaccactgcactccagcctgggcaagagagtaagaccctgtcttaaaaaaaaaaaaaaaagtgtcaaatcttcttattttaaatttgtcaactattttaaattaaaatttaaaaaagaaaagaagctaaaataaacaatgtctgcaggccacatctagcctgtgggccaccactgtagttcattttgtaacacttgacggaatttttaactacagattcattggatggttgacttgcttacctggcaccctgtttgattttaaggagccacagctcccagttttaatcctttctctgccatcactcatgggcgaggggggtcttgattaactccttacgcctctcaaggccttagggttcccatttgttagggggaaaaaacaagattaggttagtctgacttttccaaactttcctaatcagaagaatcactgagtcacacagaaaaggggttacaaattgctcttaaatatggggaaaatgttcagtctcatcatcatgaggaaatgcacattagcttggtggagatagctaaaagttgataacgtggagggtgtgagagcagcggtgcgtctcatctgttgctgtggaatgggcatggttcccgcctctcagaagcaatgtggcaataccactcaaaacaacaaaggcacaggcttttgacccagtcaggccacttctaggaatgtttcttaatcatgtacacatgtgaagagatgtaggtacaaaattgcttctttcagcattgtttgcattggcagaggatcagaaacaacgtaaatgtccatcaacaggggattgattaaatacactattgttcatctatacaatagattactacacagccattaaaaaatgtgaagagggtaaatctcttggtaagtattcttgctacaaacatgaaatgaaatagaatacaataaaatgaaataaaagagagcactttatctagtggtgtgctggcaaatgtttaacatccagttctctagctggggaggctggggtggggttcactctgactgcagcatttgcttgtggtttagatacttccaccatggtcaacttcaagcaaccaacatgaggtcactgaacttgaacttgagaaaagattcatctctgttgactctagcccattactgcctttattaactgatatgaaaagatctccaagatgtattgaataaaagaaaaggcaaaacacagaacagtatacatagtaggtattattaacataaaaaaagaggagagggtaaaaaatatatacgtatataaatactggcctgtgtatcacagatttcactggaagaatacacacacagacacacacacacacacacacacacaagtacacacacagagagccactaattttgtaattggggatgggaaccaagaggctggtggtggggggcaaagtggatggaaatgctttattatcactcatgtatactctgtcaaagatctatgatatgaatgtctcacatctaaaagattgttaagactgccatgtatcacctggaagatttattgagtgctaattccatggcctctcccaggagattttaacctgacatccttggtgtgatgctggaaaaatcagtttttaacagatttctcagatgagtcttaaaattaggcaaatttgagtggcactgtctagcccaacctttccatttgatgagaaatgcagtaagtgtggggattttacatggcccacagaggggaagggcctgacctccaggcaccaggggagtcagggctgaacccaggrctgacacgcagcstcamccccttgcctgggccatgccccgtgctttccagggctggagcctgggcatggtcttacctgcagcactgagacccagaaagagatatggcctgtctgggctcacacagccactgcccaggaaaattctacccaatatacacccacaagaacaatccacaggagttctctgctcctcccgttcgacagacagccacatcttctcatgcatcaccagccgcatccctgagacaccacrgtgaaggtgaaggctggagtcaatggatttggtcgtattgaacacctggtaaccaagcctgcttttaactctggtaaagtggatattgtcaccatcaatgaccccttyrttgacctcaacaacatggtctacatgttccagtatgattccacccatggcaaattctgtggcaccgtcaaggctgagaacaggaagcttgtcgccagtggaaatcccatcaccgtcttccagggcgagatccctccaaaatcaaatggggtgrtgctggtgctcagtacattgcggagtccacttgtatcttcaccaccatggagaaggctggggctgacttgcagggaggagccaaaagggtcatcatctctgccccctctgctgatgcccccatgttcgtgatggatgtgaaccacgagaagtatgacaacagcctcaagatcgtcagcaatgcctcctgcatcaccaactgcttagcgcccctggccaacgtcatccrcaactttggtatcrtggaaggacccatgaccacagtccatgctatcactgccacccagaagattgtggatggcccctccgggaaactggcataacggccgtggagctctccagaacatcatccctgcctctactggcactgccaaagctgtgggcaaggtcatccctgagctgaacaggaagcttactggcatgggattctgtgtcctcactgccaatgtgttggtcatggaccygacatgccatctggaaaaacctgccaaatacaatgacatcaagaaggtagtaaagcaggcatccaacgccccctcaagggcatcctgggctacacgagcaccaggtggtctcctctgacttcaacagcgacacccacacctactcttccaccttcaatgctggggctggcactgccctcgatggccactttgtcaagctcgtttcctggtatgacaatgmatttggctacagcaacagggtggtgaacctcagggcccacatggccgccaaggagtaagacmccctgaccaccagccccagcgagagcaccagaggaagagagagaccctcactgctggggagtccctgccacactcagtcccccaccacactaactaagaatcacccctcctcacagtttccatgcagacaccctgaagagggaggggcctagggcgccccaccttgtcatgtaccatcaataaagtcccctgtgctcagccaaaaaaacaacaacgaaaaacaatccacaggtctccaatctacatcctgagcaactggactcaaacccactagtcaatgtcaatcaaggctttatcctcagaggatcagaggacaacactgccccagcaccctggcaatcccttcagatgaatgacctgggacagggcagaagacccttttgtgtgagctctggcatgtaaagtatcgtctcttaccttgccggcattcgtcgccagctgctgtctcacaaagatgagaggtgagctggggaggggatagagaaaagaaaaagaaagaaacaaaagccgtttctccccaagtgctttgccattgatagctgatatgcttggctgccattcagtccctcgctgtctcctgtgtctctgtacctgccttttgcacacataattaattgtgtgttttcaaaaatggcacatcattcckccatatacaacaacaaactcagtccagagacaaattgaatcaagttctctgggtgtttttttttctcacttcaattaacacgaagactggcatatatcagaggtgcaaatctcctagcgttatgtgaccacaagcagggatgcagcagaatgtacacccccaattatgtctttaagtgctcattggagacacttgtaatcatgttttattactggtctcctccccagcataatgaactttgatgaaataatgaaacagccctggcgcctgagcagtcaggctggcggccttgccagctaagacctcccatgagtacaatagcctgagcggggcgcccggctccagtggcaatggggcggaaaacctggctccccgccctcagctccccgcctcctggctgctgggcctgcccctctgagtcaaaaaaatgccacagccaattggaaatggggagcaggccaggaaagctggggctcacagagcctcagaacagaagtactggacaggagttaggtggaggacatctcttccaacccaccttgtcaagatggggaaactgagtcccagagagggaaaatattctcactgaggccacgcagtggcagagaagggactcaaagaggggactcgaaagacctctccaaatcctaggtatttctttagtctctacaggattctcttacccagtgtctcccagccccaaagaagctttgagaaatctcagattccatggtcccacccaggaaatactaattcagtaggcctatgggcaaagccaggcatctgtgcttcccaagcaattctgaacatcagcagatgtggttgagaagttgagattgacaggaagtttaaagtcctcctggatgaaggttgctatttctccttgcaactaaaagtaggggcacagcctagcagcactggcatccccaggaggtcctcaatcagaattctgcatcttggcatgctctccagcttgaggagcactgctatatcccctcagtgcatcccagagggtctcctgaggatctgactccatcatgatagataaccaacacctttctgcagagagcctgggcaataacaccgtctgccatgagcccagatgctgacgccccacaaagagccgatattatccccattttgcagttgaaggaaccagggctgaagaactgacttgaaacttaaaatccaaggccttccacggcttcttttttccccctcctaagcccccttccctgttgtatatgtatagataggaaaagataacacatataaaatctcagctacaagttgtgttttctagctgatttgtctagatgccttttgaggaaaatcccaaagcttctctggtattgggattgtataaatttattactttaaaagctcatatagaaggttggacgcagtgactcacccctgtaatcccagcactttgggaggccaaggtgggaagattgcttgagtctaggagtttgtgacccgatctcaaaagaaaaagcacaaaatgcagataaaagtgtttaaacctccttgggaaagaaactatttatttgtgttacattgtctataagttatttttaaatgcattataagtagtgtgatgcatatatgttaattttttattttataaataactgtattgcacattttacacatcattcacttgtttcaagtgcacaattcaatgacattttagtacatctacaaagttgcataccatcacagtaaatcaatttgggaacatttccatcaccccaataatatccctcatgcatatttactgcaatccctcacccccatcccaggtaaccccaattttctttctgtctctatagattccatttttctggacatcccatctgaatggagtggttggtctcttatgtctggcctctttcactgaagagtcttgtttctgaggttcatccatgtggttgcttgtatctgtgattcattcatttttattcctgtatagtattctgttgtatggatataccacattttgtctttccattatatgtgaattaattttatctacacccagaagtagttaaaattcgaaggacctttattaggaatccatgtccacagggtcttcaaatatccagttgcttatctagaataaagaatgttggagatcatttttctttggtgaaatgagtgttgcccaagaactgaaggggggcagatagactgtacagacaccgaggtcctctctgtctggtgcatttccagccacctggttgtactatgaggtcagttaaatttgccatgagaatatgctgcatacactgtggagtgaatctttccagaaaaatacttctcatgacagacagctaggacttcacttattttataggcactcataactgtttgcgtctgtttgttattaagtgaaatcctccccccacccatttgctaacatatgtcgtacatgtagcaaaattcaatctgtgactcattttccttataccctactatccagtagtgaagctgtggagggagaaatacatagttcccacctccccaatctccccccgatatttaccaaaagaaacttgtaattggtgaatggtcagattgtcttagatcagtttgcaacacttccaaaattatgcattgcatccttcagtactgggttccagatacgtaagtgtggaagactttactaccaccagcctttgacgtttggcatggccatgcgactggttctggccaaggagttgtgaggtgaagtgacaggtgtcacttccattccaaagaagttcattgctggtctcaacactccacccctcctgtagtgagccctgaagcatggcattgagaagctgcctaagaaggaggcagatccatcagcctgggtgcccgactgattaccctgagcagagctccccagcccacctgtgatggacgcatggagcttgagcaaggaataaatattcgttgctgtaagtcactgggactgggaggttgcttgtggttgtagcataattcagcctgtcctgcttgactgcaaaagtaagcacattcaagcatggccctcgactcagaattgccagtcaagtggggaagttcagccttaattagaccataaaaacaaaaataaaaagaacaattgcaaactgattgcaaactgatgataatgcatggtctgggtaagtcagagaaaaatcaaattcaggtgaaaacccgcaaagagatggtggtttctctggcagaagcaacaccaatgcaatggcccgggagcgcaaagaccctgtggggtgttcatccaccaatcaccgggtgcctctgcccttccagccccactaaagtgaggaaacaagggccgtaggagaagccacatctgcctgagacccctgctgtctggggtcctgggtgcctgggctctagactgtccactccctttgagcagctcatggcctgagaggtggccccaaagccctcgcacatctagtcccgcaggatcctgctcctgcaagttttcactgagggaactctgccaatgtaatagttttaactgcaacagaaagttgttatacatatatgataataatagtacttttaataatagtacttttctttgtgctttcaagtttacaaagcacttccatctatttaaaaaacttttgcagtattaaataccctccagcagcttcctagcttgtttagaataaaatgcacattcctgagcatgacgcaggaggccctgcttcccctccccccccgccatgtgggctctgcttccccaccgccatgtcctccgctaagacagggctgccttgctgttcctcaccccacccgcctaccccatgcatccacccagagccttcctacgacatccattccgtacacattgcaggatgccctttgctcttctcctttggctcaaacctcatttcttcaaagagatgtttccttgccatgaaattaagttattcccccattccaatagccctctctacaaatcccctattgcatcattttcatcacagttgccaccatttagtgtgaatcatttatttcttgattggttgcttccctgacagagctgggaaataatgaagacttatttgtttatttatttttgagatggagtcttgctctgttgcccaggctggagtacagtggcaagatctcagcttactccatgcaacctccgcctcctgggttcaagcaagtatcccgcctcagcctcccgagtagctgggattacaggtgcccgcaaccacgcccggctaatttttgtaattttaatagagacgcggttttgccatgttgaccaggctggtctcgaactcctgacctcaagtgatccacctgccccagcctcccaaagtgctgggattacaggcatgagccactgcacccagccagagatttattcttataaactcaatgcctaggatagctcattggactgtcaccctttgagggatatatttatttccatttttgcttgtggagaaagtggagtgaagaagtttgagcaaggtcctagggctaacagtagagcggaagtgattccagatcttgcagcccctgagcctgtggcttttccccacccagccaagtcaagccaagccaagtcttgccatccagtgtgcttctgtgtcacagagaacagcagacagccacattgcaagggggctgatgaactaactaattcacactcaaaggtgagtgtctaaaggtcgcttttctgcagcccttcccaggaggaactgggattttaacaaaggagtgagaggagcagcgtgggcctcagcatagaggactttaagcctagttctgacaaagtcactttcaaagtgagggtcattgttacctgggagccatttcatgggactttaatcagtgcccaggtcagagcagtgacatcctggcctgtccccgaaaagcctgggtggcctcaaggcccagactgctcacccaccaaaggcctccaatttagactcctcagcaaacacaacacctgtgtcacatggattatacgaagaggacgcccacttcaaagttttcattcagcatcccccatccggatcacacttcatatttccaaaaagaaagctactccttttcttacgcatagtacaacttgattacactgtaatattcttggctattagcatgcattgtaaattattatcaccgtatttgtaactctgatttggcatctcttcactttttaatatgcccaggctcttaaaaagtcactccttttctgcaaggaccaaaaagaaaatggaaaagtggaatatgaaatgatttggggtgcccccttttagtctttgtgaaaaatccctgggcatctggagtgagaaatgagcatgcattttatagaggggcggtcaggcaggccccacccaagaagggcttgttttacatcacaggggaccaagggccaggattagaacccggcctcactcgaacccttt

SEQ ID NO: 96051 - DNA, 79419 bp, Homo sapiens
  misc_feature (1)...(79419): n = A,T,C or G
tgccactgcatgtcagcttgggcgacagaacaagcttccatctcaaaaataaaataaaataaaaactctttgcattgatggtccagattctggcctggcacagtggcttatacctataatcccagtattttggaaggctaaggtgggaggatcacttgagcccaggaatttgagatcagcctgggcaagatggtgagaccttacctctacaaaaaataaaaaataagctgggtgcagtggtgcatgcctgtagtcccagctactgtggaggctgaggcaggaggatcccttgagcccaggagttccaggcagcagtaagctatgaatgtgccactgcactccagtctggggaacagagcaagaccctgtctctaaaaacaaaaacaaggccatacatggtggctcacgcctgcaatcccagcactttgggaggctgaggtgggaggatcacttgagcccaggagtttgagaccagcctgggcaacacagggagaccccatctctacaaaaaattaaaaacaaaacacagagtccaggtcttctggatcactttcatctcacaggcattttttttttttttttgagacggagttttgctcttgttgtccaggctggagtgcaatggcccgatcttggctcactgcaacctccgcctcccaggttcaagcgattttcctgcctcagcctcccgagtagctgggattataggcatgcgccaccatgcctggctaattttttgtatttttagtagagacgggggtttttccatgttggtcaggctggtctcgaactcccaaccttacttgatcctcctgcctcggcctcccaaagtgctgggattacaggcgtaagccactgcgcctggcctcacaggcattttaaaatgtgcatattagcatcactgaaacaagatatgtacacttggcagaataaacaccagaagaaaataacaattaaagtcattttatatttaatgtattgtttgctaatgaatttatgaataaacaaaatgccttgtaataacaaaggaggacatataaaattataagcaaaaaataaagaatagagactaaaagaagcaagttaaagaaaataacatgtagtaaggctgagagtgagtgtgacttaggaaccataaacctggtgttccttccatgggtcctagtttcaacatatctctcaaaacatgagcatctcaccacctggagcagaatttcagagcttaaagataagccacacttttgccttcaaactaaaactaaggtttcatttcatcaggtgctcaaccccagaaatcatgatgagtccaagtttaatattgacggaaaccagtgaagctggacttccaaggggctatgttgccttcagccttttcgggggcttctccaaggcaattttgactgcatgggtttggctctaaatgctggctttttgtttgtttgttttggtttttgttttttgttttttgttttagctagagtctcactctatcgcccaggctggagtgcagtggcgcgatctcagcccaccacaacctccacctcccgggttcaagcaggagtgtccctaagcactggctttaaaatacaatgcctgaggaaactggggacttcatattgtttcaaagctagatagatcccagcttgtgaatctttgagtctcaggcctttggaaaggcaaagcatcttgattatgagagagcggctctcattctcatcgacaagaggcaacccgtaatcttttagacattggagcataagcccaacgccggcagtgtgtatatgtggggtggaggcaggaggatcacccagaggcattgaatgcttttgtgccagcatgagatgctgataaatacacagcaactgggctctggggaaaagacatggttccagggtgccctgcagaggttctaaagagatgagccttcttagagccaaactgccacgacagccaatagcctgggtcagatacttaggatcaacgaatgctttgtgaagcctggatccccagctaggaacaataatactacacccttccagcaggagaagaaaacctgcccacttacttttacttcctgcccactgccgagccactgccttctatcagtgtactagaaagggtgagagagacctgagtttgcattccagctctgacaattaccagctattatccttggccaaatcaaattacctgctggagcctctgtttccacatctgtaaaatgggagtaatgataataaaacaccaaaagcttggagagggtaaatgatcagcttgaatataataattataaggtgtttagcacatagcaagcacctgaataaagtgttttctgtggttgggcatggtggctcacacttgtaatcccagcactttgggagtccaagacaggtggatcacttgaggtcaggagttggagacgagcctggccaacatgaagaaatcccatctctactccaaatacaaaaattagccaggcatattggcgcatgcttgtaatcccagatactcaataggctgaagcaggaggactgcttggacccaggaggcggaggttgcagtgagccgagatcacaccactgtactccagcctgggcaacagagtgagactctgtctcaaagaaataaataaataaaataaaaataaataaaatggtttttaaaaaaattttaattaaaaaaaaaaagtagagacaaggtctcaccatgttgcccaggctggtctcaatctcctgggttcaagctatcctccctcttcagcctcccacagtgctggaattacaggagtgagccattgagcctggcctaaagtgtaattattgacataacatcaacctcatcctcttgaatgtcagagctggaaagaatttttggatcaatgtgtattatgctacatctattcttcctgcttttgataaatattcttcctgcttttgataaaacctcttaagtactgggttttgcctagatgctgggaagataggttggggaggaagacagaagaggtatctgctctaggtgttcccggctgaagatgcagacaggaggaatgaattattttgtctgccttcaaagtcacatcaaattcctgggctgcacagtctggtgtctggtccaccacgatgtcctgaggggcaattagccttcctcaaggaggtgacagacagattgagacctggaaaggttcactgagctaggggtactgagagaagtcccaacctagacaacaagacgatcattctgatcctcctccttagcctctcaactgagatctgccaattctgtcttccaaacctctccggaaccaaaacaccccctccatgcccacatcccctctctgggttcctgaattatttcaacaccctccaaaccagtttctgcctgtttcttcttcacacagcaccagagggatctttgcagaaagtcaggctccccatgcccttcccctgttgaacaccttccctgtctctccatcactgcaagagaaaagccccgactccttcccacagcccacaaagctctgcagcatccagccctgcagacacctctgatctcttctctcacctccaccacatcctgtccactctgcacttcatgcaaggccccaggctcgcttccttcctgctaggcctttgcacctgctagattctgtgaccagtgcactcttccaaggatccccacccatgcctctggcatgtatacacacgcctggccctccctccctggaccaggttaatctctgctgctcctgcctcatcagttacaggtgctcactttactgtgaaggcttgttgaaggatctagcttccccaacttggacctttgtccccctgttagctgctgaatctgtgcctagcatagagagctcaggaaatgccattgctagaatgttattaaacaaatgcccccattcacacctcttcctctgaactccatttttttcatccacaaaaggacattataaaacaccctgctggtgtttaatctatgtgtctatcaaatcagtcatatgaagtctctaacatgcacgcaataaacactatgtaatgttgttgtattgtttccagaccagtaatggctggctccatggaggcagctttatcagtcccagcattttccataaggcaagcactaactatttattggacacatgaatgaattaatgaatgaccaatgaatgaacatgtggctggccatgggcaaattacttaatatctgtgtgccctagtttctgtgtgtgtgtgtgtgtgtgtgtgtgtgtgtgtgtgtactcacccaggatggagtgcagtggtgcgatctacactcactgtaacctctgcctcctgggttcaagcaattctcgtgcctcagcctcccaagtagggggaattacaggtgagcagcaccatgccctgctcattttttttttttttttttgagacggagtctcactctgtcgcccaggtgggagtgcagtggtgcgatcttggctcactgcaacctccacctcctgggttcaagcgattcttctgcctcagcctcctgagtagctgggactacaggcatgcaccaccatgcccagctaatttttgtatttttagtagaaacagggtttcaccatattggtcaggctggtcttggattcctgacctggtgatccacccgcatcggcctcccaaagtgctgggattgcattttttttttttttttttgagacagagtctcacttgttgcccaggctggagtgcagtgcaatctcagctcactgcaacccttgcctcccaggttcaagcgattctcctgtctcagcctcctgagtagctgggactacaggcatgtaccaccacacccggctaatttttgtatttttagtagagacagggtttcgccatgttggcctggctggtctcgaactcctgacctcatgtgatccacccaccttggcctcccaaagtcattttcgtatttttattagaaacgaggtttcaccattttggccaggctggtcttgaactcctagcctcaagtgatccgcccgcctcgcctcccaaagtgctagaatcacaggtgtgagccatgcacctgacccagaaatttattttaaacagataatatatacatatggcaaatagaaagttaaaagagaacaaagaaccaaagttcacaatgaaaagtaagcctgcatgcctaccctaccttttcttcaggtattcaatgcacaagcatacgatgcatagatagctctattatttttccaattttacacatgaagaagcagaagcactgaaaggttatagaacttagactgtgctaagatttatcagtcaggagttttgtttcatttgtgtatatcagggcttcacaacctttacgctattcggcattttttgcagggttttttttgggggggtagtggcagggctgggggtggaaagggtgtcctatgcaccgcagaatgtttagcagcattccaggcctctactcactagatgccagtatcgcctctccacttccccagttatgacaaccaaaaatgtcttcagagattgccaaatgtcgtggtggtggagggatgtcagggcaaaatccctgataaatggagagaatgtggtatatccacaaaaactccctccaaaaccactggtgtgtatgactatacatcagaccacccctttcttttttctgtgttttacacaaacagtagcacgaatacaccccgctgcgggtctacttttcttttcttacaccactttttggtgatcattccacttcattgcttacaggcagaaaggaacttctcttaaacagaactgaccgggagaagtggtgagctgcccgtcctaggggtaagccagcgagcagacaggggcttccagggcggcggggcggggttcccggggcgagcctccgggaaacttcccgaccagcctctgctcacctcgcggtcccgaggcgcagtggaggggatggggcggggcggggcggggccgcgtatcgggcccgcccccgtacgtcacgtcgccgcggccccgcccccgcgcgggcacctcccccttccccggctggggcggctggagagccgggagtcgctgggtgcgtggggctgcctcgccgcgtctcgccacggtaggtggccctggggcggcagggggtggcctcgggttgcaaccgggggcgcgggctgggggccgtgcgggtcggcctcgggcgcctggcagccctccgtcctggcggctgcctccgggcccggcgcgactgctcgggctccggggctgggagctgggatctgggaggcaggcaggcggcgcgggcgcgcggttctgggatccgcacccgctcggcgtcccgagcgctttccgcggggtgcggcatccaccgggcccccgttaccacgcttcccgcttcggacccagcgcctgggagacgctcagcgtctgttggcggggggactgggggggagggcggcgcgtccccgcctccggagtccccaacctcgcccaggcgcgcggggacccccaggcgggcgccagggcgcgtggaagttaacttgcagcagccgtggagttgcgaggagcgtcagaagtggaggcgttgggggcggaaatcgtcggctggggaggtgggcgctgggagcactgggttggggagccctagtgaacttggaggtcactggtgaggagtggagaggaatttgacccgaggatcccaccccaacccccaacctccctccgtaaactccgcttctcggtgtgagctggatgggaggtgcccggaaagccgggactgggactggtagcaggggactgggagcatgggctcagaggctgagcacgcctgacctggcagagtcgttgttagatgggacagaggtcgaggtctggcattcccactcaaaggcccgttccctagggaaggaaccatccacctcagcagagtcattagaaagaaccgtgcctaacctcttgcccccttccccttttacagatggggagactgaggcttggagaggtcacctgcccgtgaccctaggattcacagctaggatgtggcagagctgaaactcactcacaggcctcctgacttaatgtccttggggatgttgaggaggcgggctgttgaactcctacttatcctacagaagccccctcaagcagcacctcctccgggaagccttccctggcattctcctggtattgttgggtgcttcctgttttgaaccccacagagttagccagccctttttctcacttcccaacagacattcccttgcatgtctgtctgccagactgggctgtgggtggacacctctccctagcctccatgtgataaccctttcatctcagcagggtggtctgctggcgagggtaggcttctggatttgaacagatctgtgacacaccggatttagtagtgatgtggcccgggcgacgcattttccttccgatctagtctcagtttccataactgtaaagctgggtttatttcattgtcctaaaggaactgttgggtcatttctgaatccccccaccccactgaaccccaattgtactgttgtttacttaatatacatctttgtatcacctgatttttaaaaatctcatgcaaactttttttataacagctttgttgagatacagttcacatgccgtacaattcacccttttaaagtatatgtttccgtaatttttaggatgttcagagttgcatagtcatcaccactgtctaattttagaacatttttatcatgcccaaaagaaaggctgtttcatggtcactccccaatcctttcttcccctatcccttggcaaccacttactgactctcaaattctctatgaatttgcctgtgctggacatttcatataaatgcagtcatatactatgtggcctttggtatctgatgcttttcacttcagagaatgtttctaaggttcagccccttgcagcctgtatcagtacttcattccttttttttttttttaagtacttcgttcctttttatggctgcataatattctattatgtggatataccacattctatccatttgtcagctgatggatgtttgggttgtttctaacttttgactattatgaataatactgctatgaacattcatgtacaggtctttggacatacattttcagttctctcaggtatatttctaggagtggaatgattgggtcgtaaggtaactttaggtttcacctttaaatatttttttaatttattttattatttatttattttgtagagataggggtcccactatgttgcccaggctggtcttgaactcctggtctcaagcgatcctcctacctcaggctcccaaagtgctgggattataggtgtgagccactgcacccaggtttaacctgttgaggacctgccagactatttttccagaacagctgtaccattttatattcctaccaccagtgtatgagggttccaataatcttaaatacatttagtgttctctgaagcagtcataacccttgaaatcactggctttgatgtgttagttgtaaactattttcaggccgggcacggaggctcacacctgtaatcccagcactttgggagctaaggtgggcaggtcacctgaggtcaggagttcgagaccagcctatccaayatggtgaaaccccgtctctactaaaaatacaaaaattagccaggtgtggtggtgcgtgcctgtaaccccagctacttgggaggctgaggcaggggaatcgcttgaacccaggaggcagaggttgcagtaagccaagatcaatcacaccactgcactccggtctaagtgacagagcaagactctgtgaaaataccgaagcaaggagaggcagtgtaggacccagtggcttacagagcccaccccaggagctggcacacagtattaggagggggtgaaaggaaggtggaagctgctcggatcttcccatcccgggccagcctggagcccccttgccagctgaggctttgtggaggccagggagaccctccatggctctcctagaccataactgaaggggaagacttgtcccttgaccccaaaattaagtctggtcctgcccacaccctatctggaaccccccacgctactctgaaggtgacttctctgggtggccaccggagtgtcctatgtgagttgctgcttatttcaagaggggccaccccccaggcctgagatgagcagtcctgagttacagacgcttcatctgtgaacattctgcacacacagacatcttccccctcctctcagcaccttccccacccctaggaccctgtgtttcttccttcacactctttgcttcagcaagaggctgcaccggaagaactcaggtcagaacccagcgttttcacagaggaagagttccttgagaaggtaggtagttcaccccagcttgaacctgtactctgctggttcaggaacttagaccagcacttatctgcgtgttccagtttcctgacaacttggttcatctgggcagctgctgtttgggaatggtgttaagaccacgcctcccagccgctgtatctggcacctcgtgactttattcttttttgcatacttgcctttccttgtccttttaaaatcctgagttcctgtgcattaagaaagcagcctaggccgggtgcatggctcatgcttgtaatcccagcacttttggaggctgaggtggatggattggttgaacctaggagtttgagaccagcctgaataacatagtgaaactccatctctacaaaaaatacaaaaattagccaggcgtggtggtgcgcgcctgtattcccagatagccgggaggctgaggtggaaggatcgcttgagtagaggttgcagagagctgagattgcaccactgcactccagcctgggcaacagggcgagattgtagggtattaggtcagtacataaaaatcaattaaatattaaaaaaagaaagaaagaaagcagcctagggacatggagacggggtgggaaggctccctaggcaaggaactgccgctctctgggtgtcagtgtaccctactgaggaatgggcatagaccattcagaactaagatgtggtggtrccttgggatcggttaggctgttgaaatgtattattatgatkattattattattatttttgagacggagtttcgctgtgttgtccaggctggagtgcagtggcgtgatctcggctcactgcaagcyctacctcccgggttcacgccattctcctgcctcagcctcccgagtagctggaactacaggcrtatgcctgactaatttttttgtatttttagtggagacagggtttccccgtgttagccaggatggtctcgatctcctgaccttgtgatccgcccgcctcggcctctcaaagtgctaggattacaggtgtgagccaccacgcctggcctgaaatgtattattgatgtgactttgtgggtgtatttgtagtaagagtggcagatcagatgtagcttcacrgcctggggttggtgaccagaatgtactttcttggaaaaatgcatgtggcttgtgtggctttgatgccccacgtggcaccagggaagcttctctgggtagcagcagctcctgctccccgacttgctgcctattccgattgcttgcaagtccccgtgccctctgaggacctgcatgtacccggtctggggcccctccagagatctgggatgactgtcccctcccgtcacttctcaggtctcccccaccctttactgcagccagaggaggatttgtgggaatgattcattcagagctgcttgagatcttggccagcccccagaaattgcagggaaggacctcagagggcagtgcccacaggccctagggaacgtctggggctgatggcccagggagaaacttcttatcctatgtgctcagatggcgggcagccagcccgtctgccgagtgactttgtatcagtaagacttttgactggggcttctgcagccagaaagcaggcaggcagcccagaaagcaggcagtgtgatagggagctagggggcactggcctgtattagaatccaggtgctccacatctttctggggctgttggctgtttctctatgctttggttttctcatctgytgaatgcaggtataagtaggacctatcttccaggggtgctggatggaagggaatggtggtaaagcacttatcttggtaccaggcaaaagctgaggccctggggttaaacaggctctttggaattttgaacatgttcgtttgtgaaccttagttcctccgtctgtcaaaaggcaacaattataaatacagccaatatcaacagggcttactgggtgccagacactgttctaggcactgtatgtggtttaactcatttaattcccccaacagccatatgatgtgaacaggctgaggctcagagaggtgaagtaatttgcacaaggtcacccagctaggaagtgggagacataggatttggatccagaatctttcttttttttttgttttgggtttttttgtttgtttgttttgagacagggtcttgctctgttgcctaggctggagtgctgtggcacartcatagctcactataaccttgaacttctgggctcaagcratcatcccaccttggcctctcaagtgctggggttacaggcgtgagccaccacacccagcccagactctacactctgaattctcattcttactcctccttgatatcccatcttaaggcctagcacatagaaaacacacagaaaacatcaggtgttgttataactattctgaataaatattgatccgctctccatccctctgtccacactccttccctgatgatcagaacatgcagggctcttggcctgtaaagtccagattcccacccactcctccctactcgctctgttcctcccactcccacactctcatgcacagcagagcttggaagcagccaagtcccaactcttcctccaaattgctgtgtgacattgggcaaggagcttcccctctctgagccccagtttccgtacatgttaaatgggtgagttcaccctgctgcatgttttttgttgagctcccatgctaygtgtgtgtttttaaaattgagtcaacattcaaacatttctagagaaaaattctgatttctcatttctcttggaaacccaggagcttaggccaaactggagtggcctgaagctgccccttaggtggcctggactctcccagtcactgtggttccccctactccccattgtcacgtaagtgcggcttttcaggggatctgaggatgccttaggcctgcctcgtgccacctgaataagcagttccattgctttaaaaacaattttttttttttgagacgaagtctcgctcttgtcgcccaggctggagtgcaatggcatgatcttggttccttgcaacctccgtctcctgggttcaagctattcttctgcctcagcctcccaagtagctgggattacagtcgcatgccaccacgcccagctaatttttgtatttttagtagagacagggtttcaccatattggccaggctggtctcgwactccgcctgccttggcctcccaaagtgctgggattacaggtgtgagccatcgcgcatggcacaatttttttttttttttgacacgctccaagagcccttccagctctgtgtttctaggatattggaggttgtctgaggcctcctgataccctgtctgccattttaagccctcaaggcattttttttttttttttttttgagatggagtttccttctgtcgcccaggctggagtgcagtggtatgatcttggctcactgcaacccctgcctcctcggttcaagtgattctcctgcctcagcctcctgagtagctgggattacaggtgcctactaccatgcccagctaatttttgtatttttttggtagagacggggtttcaccctgttggccaggctggtcttgaactcctcacctcaagtgatctgcccrtgtcagcctcccaaagtactgggattacaggtgtgagccactgtgcctggccttttatttgttttgttctttttttttttttttttcctttttgagatggagtctcgctctgttgcccaagctagagtgcagtggtgtgatctcggctcactgcaacctctgcctcccaggctcaagcgatcctcccacctcagcctcccagagtgctgggactggaggttgtccccattgcatactccctgtgtggggagttcctgtctctgggcgctagggtgccgtgccaccttacctggtacaggcccctacctaactgttgttccccacagtgagatatttgttattgaccacgccatttcccagaagccaaggcttggaaatagtcactttcccgaggtcacacaggcctgagattcagcaccaggactcaaagcccatctgcccaacttcagaggctgtcagtggaagtcatgccttgatcccagcactgcacggatagccactgagtgacgtcttccactagaataaggacacatgagaaccctcaactggatgttggggtgcaagatttaagaagcaacgaggtcctagttgtcctggagtttacgttctggtggaggcatcaggcaagaaaaagtaacccacatctctgacgtgagatgtcagcctatgaagttgagtacccaggcctctcagatcttaacatgcatatgatccccttggggaacttgttaaagtgcagattctgtgtttttggttgtttttgtttttgtttctgtttagayggagtttcgatcttgttgcccaggctggagtgcaatggtacaacctcggctcactgcaacctctgcctcccgggttcaagcgattctcctgccccagcctcccaagtagctgggattacagacacctgccaccatgcccggctaatttttgtatttttagtggagacgggatttcactgtgttggccagcctggtctcaaactcctgacctcaagtgatctgcctgcctccacctcccaaaatgctgggattacaggcgtgagccacagcgcccggctaaagtgcacattctgattagcaggtttggggcagagactaagactgtgtttctaaccagtttccaggggcctctgatggtgtttgtctaaagaccacatttggaatagtgagggtctggatcagaaattggcagattaccactcataggccacatccggcccgctacctgtatttgtaaataaagttttatcggaacacagctatgcttatttattgacattttgtctgtggctgctgttgtgtaacaaaagcagagtggagtagttgtgatagagaccagagagcccacattgctggcctttgaagagaaagtctgccagttgcttttctaatcatcttttgagtccctacaagttataaaactttgatttggtgagtgttagatgctgataaaaatagtaatgattgcagttaagacttgggtgctttctgggtacttagctctttacgtttatttttcttagctcaattctatcataggcaatactactgtctccactttacaggcgagaaaactgaatagaggctgggccattggcccagagtttgtggaccaatgagtaggtgaggccaatttgagtcaagttgactgattcttattggacaggagcttctgcctagaactttttcccagagcacagagagggtttagtttagatttccttctgtcccagagtgttctggtgccttcatttctttctcaatccatccttctgtttactcaacaaatacctgtgcaccctgtgctggaagtttggggaccatgctgggttctgagaggatgtggggactaggatggggtcccagccctgcacattccatggggttggcagggaagcaacaccagaagccacacrggatgctaagcaccttgggggatactggtacagggacaggaggcagtcagggaagacttcctggaggaaggggtgcaaatgatgccagtaggagttagctttgtagaggaggtcaggaaaggttttccaaggagagagaatcacaagtgcaaaagtttggaggtgtgagactctgtggcctggtatgtttggtagagttcagggcacaaagactatagtgtgtgtgtgtgtgcgtgtgtgtgtgtgtgtgtgtgtgtgtgtgtgtgtatgtatgttgagggttgggggaatcggtggtgttataataaaattggaggtcagcaggagttaagtcacaacagagcctcagtgcgatgccaaaggacttgaattttgccctggaggctgctgttgcctagtatgaagtgctaaatcacagagcgaaagtcttcctccccaccctctgatgactttccggagaaagcctccattaggtgctaacgcgtctttagtgcttctccccagactcctcttgtttaacaaagatcggacacaaccggctcctttggggatccttccttaggctggcggccgtctctagccagaaggcataaaaaaacattgcttccttcgattttatttttgcattaattttttaattagggcatgttttaaatttaatccagtggattatagtttcccttgaaaatatgttttaaaaatattgratccattgaacaaaaatgaatacgattaaagggggttctggatgtaattaacattgggaaggtagtgttcagaagcttggaatttggagagccccacaacaggtgagagggctggagggggctgggccagtagtcacctctctctcaacattccccttcttccctggatacccagrggccttgactgaagggcgggatggctgtgtagctaagatgtgggtgcagggatgtaggtgcccgttgatggtgtaggagctgaggttcctgttccaggctgctgctagtgctcatctctctccttctctgtctggtgattttcttattcttcttttctttctttctttttttgagatggtcttgctctgttgcccaagctggagtgcaggggcagcattgcagccttgaactcctgggctcaagcaattctcctgcctcagcctctcgagtagctgggactacaggtacagaccaccacacctggttcattttttattttttgtagaaatggggtctcactatgttgttcaggctggtcttgaactcctgggctcaagcaatccacctgcctcagcctcccaaagtactgggattacagacgtaagcctctgtacccaacttgtcttggtttctatttttgtctccctgcctctctctccctcccacccatccccccaactcacgtctttccctgtctctgtcactctttctgtcttactcccatctttgcctctcctctgactctctctccccatctacatcctctgtctctatctccctctgtctctgcctctgtctgtttttttctctctctgtcttcttccgccccaatctgcaccacttcccccttccttcccgctgccgaccccaagcccacacaggtgccagcacggcccttcctttctctcattaaaaacttttcatcccacttgctttggctggtggctgacatcctgccacagaaccatccggacccttgcagagcccgggggctcagccagaaacctttggaggtgtgagaaagtggtagyagctacttcccaggtggaagacagaggccctgtggagtcaggcacctggcaaggccgccctacaaggccatggtttcctctcaacccacaccctttccacgcccccagggccctcccttccccaccgggccccagggctgtggggaagaagaggaagcctgggctagcagcaggacggcagatgctgtttttggtttgatttggtttggggtactgggggagtgtcggctacccttcctctgagcactgctggaagctgcatgcagtaggtgcctttgcccttcattctgctacgtggtcattccttgctcaagtgcacagtagaccagcagtgcatatttgatggctaagagttttgggaagaaaaacaaggttagaaactgagtcttgcctccaggctgggcacagtggctcacacccataatcccagcactctgggaggccaatgcgggcggatcacttgcgtgagctcaggggttcaagaccagcctgagcaacatggcgaaaccctgtctctacaaaaaagtacaaaaatcagccgggcatggtggtgcatgctttattcccagctactttggaggctgaggtgggaggattgcttgagcctgggaggtcaaggctgcagtgagccaagatcacgccactgcactctagcctgggtgacagagtgagaccccgtctcaaaaaaaaaaaaaaaagaaagaaagaaatagggtccagctttttcttttcacagatggggaaactgaggcccagagagttgaggtaacttgttytggatcatgcaaatagcttggaaataatggggtctgggtcttccatgcctcagaaactgggaacagtgcacccctgtgttgagctggtggctgctttgacatccctcagcggttgttgtgtagacaccgacttctgagagatgggagattctggttcgaggcctggtttgctctcctctacctactgcgggactctgggcaaaatcttccttctctgaggaccttggggtccccaggcatagtccccatggcacagtcctgaggatcgcagagcgtggtcaggtttgcagggtcggaggttgctgacctcaccgtggatggagggcttcttcaacacaggttgctgtaccccacttccagagttcccattcagcgtggtctccttgagccctgataatctgcattttgtgtaggttcctaagcgctgttcctgctggtcagagaacccacgttgagagctggggtagtagaggtgcagcagacgaagcacacgggcgctaaaacctgctgtgagatctcaggcaacgacttcacctttctgtgccttggcttcctcagctgtaaaatgsaatgacagagcactgtcctcatagattagttgtgaggattaaatgagcgattgggaggcggagatgcgcggatcacctgaggtcaggagttcaagaccagcctatataattgattttaattgaaattccttttggtaattcttaaagataataatacattttgatgtttactcatgaacattactgatattccttcctccagctacatgataatgttttctctcctgtgggtgagatctaagaaatgaaactcggccaggcatggtggctaatgcctgtaatcctagcactttaggaggtctagacctcctcctgaggtcaggagtttgagaccagcctggccaacatggtgaaaccccatttctactaaaaatacaaaaattagccaggcatggtggctcaagcctgtaatcccagctactcaggaggctgaggcaggagaatcacttgaacctgggagatggaggttgcagtgagccgagcttgtgccactgcattccagcctgggtggcagacagagtgagactctgtctcaaaaaaaaaaaaaaaaaaaaaaatggccgggtgcagtggctcacacctgtaatcccagcactttgggaggccaaggcgggcagattacaaggtcaggagttcgagaccatcctggctaacacggtgaaaccccatctctactaaaaaaatacaaaaaattagctgggcatggtggcacacacttgtagtcccagctactactcgggaggatgaggcaggagaatcgcttgaacctgggaggtggaagttacagtgagccaagatagtgccactacacttcagcctgggcgacagagcgagaccttgtctcaaaaaaaaaaagagcaaatatttgtaaagtgtgtagaaaaccccccaggcacacagtaagcactatatgcatgttcacttttttttttttttttttttaaagacagggttttgccctgtcacccaggctggattgcggtggcatgatcatagcttgctgcagccttgaattcctgggctcaagtgatctcaccctcccaagtagcagggactacaagtatgcaccaccacgcttggctaatttaattttcttttttttttttttttttgcaacagagtctcgttctgtcgcccaggctggagtgcagtggcgcaatctcagctcactgcaagctccgcctcccgggttcacaccattctcctgcttcagcctcccgagtagctgggactacaggcatctgccaccacgcccggctaattttttgtatttttagtagagacggggtttcactgtgttagccaggatggtctcaatctcctgaccttgtgatccacccgcctyggcctcccaaagtactgggattacaggtgtgagccaccgcgcccggcctttttttttagagacagggtcttgctatgttgcccaggctggtcttgaactccttgtctcaagtgattctcccacctcagcctcccaaaatgcttgggattataggcatgagctactgtgcccggctttgtcttactattattgttgttattcttattgccatgattatttaccttcccctcctccacaaagacaattctgttcacagtgaattccttgccattctccaaatttccagtgtgctttcacacttctacccgctgctcgagctgttccttctacttgggacgcttcctctaacttctgcacgtgttaaaatgctggcattcttttcgactcagctcagattccttcctctgatgtctgtgatgacatgacttgcttcccctaaccaagctcttatttcattctgtgaattatcctgttacttgggtgtcaatctcctgtgctgaccctcaggctcctgtagatctgacttggggctttgctggtacagagagtctcccaggaatgttactttcaaagtccagctttgatggtgtttcaagaagaccagctccatcgttgtcagtggcagctgtcagagaagccttccaaggcatatggggtggagccccattgggacgtgggatttccttaattagtaagagtgtgaacttagcactccacagtcccaggttcatgtctgtgttttgccatttagtgtgatgcagcctcggataatttccttaaatttttttgtgtgtcctttgcatcttcattttattttattttattttattttatttattttttatttatttacttatttatttattttgagatggagtctcgctctgtcacccaggctggagtgcggtggcacgatctcggctcactgcaacctccgcctcccaggttcaagcaattttcctgcctcagcctcctcagtagctgggattacaagcacacatcaccaggcccggctaatttttttgtatttttagtagatacggggtttcaccatggtggtcaggctggtctggaactcctgacctcatgatccgcccaccttggcctcccaaagtgctgggatgacaggcgtgagccactgcgcccggcctgcatcttcattttaaaaggatgccatcatcatttacagcagcgggtttttgtgaggattcagtggggtctcatttctgcagcaaatatgagcacctcctgtgtgcctgctctatgccggatgccgggaatccagcagtgagcaggagagaccctgttcctgccctgggagagctgatattttagatggacacaaggggaggtatagaaatgatagtgtcgctgtctccggaggatgcagcaggaaggagatggtctttgagaagtgttctgtgcgtggtcttgcaagtaggaggcccttagcaattggtaagtgtgatgattactgttattgccgtaattatttgggagaggaggcaaaaggggaagggaggcattgtgggaagagggaatagtttcagtacagggtcaagaaggcattcggtgtcaaagtcgtaatattcacagccaatgtttatggatgccctagtgtgtgtcaggtactctgctaaggacttcctaggtgcaaattcatctcaacctccagggaagtgctgtgttatccccattttccagatgaaagacatagggcacgggggaactgaaccacttgtctggggaagtggaggggcgggagtcaaacctagattcttacccctgcatctagggtgtgtgatgggaaatgagactgagtggggacaggtcctcatagggagggctcaaatcttgactgtcctcctgctggagtcccttagatggtcccgggatggacagggtggggaagttcatggcacatctcattttatggtccagaaagccagtggcatgcagcccctccaagagtgggtaggaaaggatggctcctcctggaccccttctagttgggttctcctggttggtggcaagtccctggyggggctggagttgtgggaggtgataggcacagtgcagcccatggttgggagcctacattctgggtggtgaggatgctggtgagtgctccttcattgcaaggatgcagttgctcactgtcgccttttcctcgtttctgctctctgagaccctctctacttaggactgggcatgaggggagcccaggagaaaagcagataatgaggatccaagggacttgtatttgtctccagccagtcgcctcccaaatacctatggcttgctcgttcctgggcaaacaggtgcctcaggcagtatctttatcttttgtgtgtgtgatgccattggaacctcacagtgacccgtgaggcaggcatcaagagaaggcctgttgttgtgggatgatagcaactctcaagtcagacacacttgagttagaactccagctggcttatgcatgagctttgagaccttgctccagacacttctctggtcctcagtttcctcatctgtgcaacagggatcataataatgattattttgtgggtgacagataatagttatatggcatctaatgcatagaagtgctcagtaattcatagcaacgaaaattttgttgttcttcacccattttacagataaggaaactgaggctcagagaagttaagggactctccccatggcattttgcttcctggtaatggccaggcaagtttgcagatggaaatactttccataaaacccaggtcccccaaagccctgcaccattaggaaaaggctgttccccaattgtraatctgtcccccaaaacagtgaaccatgagatcatgccccttctctctcgtgggtttctccctgtgatgttttaagtgttcatactctgagcagctcttaaagcctttgcaattcttccggttcttcctgcttctaggagtgagtgaaaacgaagaagrtatcacagtctgtccaggaaggaaacagaggagcaggtgaatgctcaggaaaccggattcgtagtatgcactaccccagaattggggctggcaaattctgctcttaaaacccccacctagagccaactgctgcccctaataatatgcccaaaatattaccaggacgaaggcctcatgcttcctggatgarccacaaaaaaaaaggttgaggccatcttgttgaggaacattacatccagcaagtatttatttattgcttgctttgttcttggtcaagccttttcactttttggccatcagccattgcaaaacctccacaacaaagaagtggaaagtcatgcaatcagaaaagccataaactacagctggggccaggggaagagggaagttagctgaagactttgtaagcagaaacatcaggaaaccttctgacatgttaataaagatactctagagtcacatcttgtgtggaaactcaaatccgcattgttggggcggaagtcggagtcagtgactggccccagcygtcaccccgagccttcagataagacggtggaactaggcagggcgccgtggctcacgcctgtcatcttagcactttgggagrccaaggagggtggatcactttagcccaggagtttgagaccagcctggacaacatagtgagacctcatctcgacaaaaaataaaattagccaggtgtggtggtgtgtacctgtggtcctctctactcgaggggctgaggtgggaagattgcttgagcagtccctggaggaagaaggtagagccaggaackatcattaattaaacacttaaccagctctaatatggtagtaaagcccttatgtgtatttagctgctctcccgattcacagatgagaaaaatgaggcccagagaggttaagtgatttacctgaggtcacaaaactaataggtggggaattcaaactcaggcgcatctttctgcaaaacgcattcttttttcactactccctgatatctgaggaaacttattgatgagcaaaatgacctgaaaaaaataaaatgtgaatgcctctcagtgtcaggctctgtgataagtgtaggaaaaaaagaaaaagaagaagaagaaaaaaaacccaccagactgcaatgcctcccagcccgtgagcactcacagtggaatatgggaaacagaagggcaaacagcatttaccatacagaatggtgagtggtaggcagaggggactgtgagacataggagggtagagcttaatctagtcggggtattcagggaaggcttcctgaagaaggagatactttagctgaggagataagcagcccaagataaggtgggaagagggtatggacmcatctattagctaggactcttgataaacagagacagaaacccagcttccatagcattgagcaaaaaggtaaatttattggattatgtaagaggtgagcctcaggtatggctagatccaaggactcaagtaattttagggatttgtgtctccatctcggctccaccttcctaggttggctttgctctcatgccagctttgcaggtggtgactagagatggccccacacctccagccctataccctacttgcttagcctccccgcagaattctgtaaaagtctccagttgagtttcmttgacctagattgggtcaaacgtccatctttgaaccaacactgcagtctgggaatgaaatgctgtgattggccaggcctaggttatgtgtctgcaccaggggtcgaaggtggactgagaatgaaaataagaaagccagggatgcatggcacccttggggctgatagaaggtccatggggctggagaaggggtctgatcatgacacccctctaagccacgtgaagaaattgcatactgaagacagtgggaagctttgaaagtatagtgaaggcgggggtgacatgccaccatatggggacaggcaggggtggaagcatgatcaggtggcggacagtggggacttggactgggctgctggtgatggagagaaacagttggatcctgggggtgttgagtgtaatgcacaggactcagtggtgattggatcaggggttcatggggaggaagaggttcatgatcttgggtttctggcttgttccaacaggcaagcctggaagagaaaccaagctcaggagatcctattaggagtttaggttgattgtgttgagtttgaaatgctgtcaagcatccaagtgacagactagtggagaattggccatttcacggttgctatgctgagaggggccggtcaggattctgtggccttaggagaaggggtgcagagtgacaactctatctagtaaatattaattgaccacctactgagctgcartgctccggaaacagagcattcaaggctcccagacaatgaatgcagaatatgtaagtcaatcatatgatgtgttagaaggtggtgagtgctgggggaaaaaaaaaatcacgcagggtgagggcttcyggagtgccgtgttggcggggcaggttgcagcactaactggttgatcagaagaggccttgaagaagtgcgatgtgagagaggacaggagggtgagagagtgagccaagtggatgtttggggaaagggcatccgggcagcgggcacagccagggcactggcccagaggagggagggtgcttgtgtgtttgagtgacagcaagggggccagcrtggctggagaagaggcaagggccagtggggttgggggcagaaaggtaaggggtggggtcaaacctgtaaggcaaatgaggactggtttttcctgagtaaagtgggagccatgggaggatgcggagcagaggagggccatagcctgacttccgttttcctraggtcactgtggctgcttgctgaaaatcaactgatgagacaagggcagaatcagggaagctagtgatgaggtggcttggaccagagtggtaagaagtgaacgcctgaaacaaacgtctggcagtgcgggtggtgagaaatggcggattctggctctgttttaaaggtgaagttaacaggagttgctgctggattggattagggtgagaaagaagaatcaaagctgccttcaaggtttttggcaccagcatgaaaggatggagctgctaccagctgcaggtggggtatgctggggaaaggaccaggctcaacacccaggtgcagggaggaagagagtgggcaactgtgtccaagtgaggagagagatttgggctcaagatgacaattcaggagatgtcagcctgtggggagcatccaggggcgctagtatctcctgaactggagggaggagagagggccacagtagccaagtgtgacctcctgatacctgtgccagaatggctgggtttggccccgcataaggaaaaaccctgtaaacgttttcatggggctgtagagaaagaggaagacaagcagacataacctccttggcatctgatcaaaagccaccgtggcctggctgctcatttattgagtgtgggtctgggaggtgtccatgccaggagccggggtgtgggtggcatgatcagaggctgaagctcaattgtccttgaagttcctggcgcccaggaccgactagccctgggagagcgccgtcctgcaagtgttgattgaatgaatgcaaagagtcttgtgtgttcctctgcagcagccgggaaaaaaaagtgtgtggggtggagtggggcgggtagcataccccagccagcaacaccattcctcagcatttgacaaagtgtgattaattaatttttttctctctttcttttctttctttctttctttccttctttctttctgtctgtctttctttctttctttctttctttctttctttctttctttctttcttttctttctttcttcctttttttttttttttttgacagagtcttgctctgacacccaggctggagtgcagtggcatgatctcggcccactgcaacctccacctcccaggttcaagcagttctccctgcttcagtctcccgagtagctgggattacaggtgcctgcgaccacgcccggctaatttttgtattttttagtagaaacagggttttaccatgttggccaggctggtcttgaactcctgacctcaggtgatcctcctgcctcagcctcccaaagtgctgggattacaggcatgagccaccgtgccaggccattaattttctttttttttaggagacaaagtctctctgttgcccaggctggagtgcagtggtgtaaccatggctcattgcagcctccagctcttggccttgaagtgatcctcttgcctcagcctcccaaagtgttggtgtgagccaccaagcttgctgaaagtgtgattcgttaagactatttttattcaagtctaacgtgtatacagaaaaatgcatatttcatacgcatacagctcaatgaattttcaaaagacgaatgtgtctgtgtgmccagcacctggatcaatagctgaacgtacatagcacccctccctgccccaggacaccttgctccccctgcagttaccccttgccccaccggggtaaccaccatcctgacatctccccctagaatttcacctgtttttgtactttgtatccatggaactgttactggaacggggtcccgatccagaccccaagagagggttcttagacgttgtgcaagaaagaattcagggtgaggctgggcgcggtggctcacacctgtaatcccagcgctttgggaggctgaggcgggcggatcacgaagtcaggagatcgagaccatcctggctaacacagtgaaagcccgtctctactgaaaatacgaaaaattagctgrgcgtggtggtgggcgcctgtagtcccagctactcgggaggctgaggcaggagaatggcgtgaacccaggaggcggagcttgcagtgagccgagatcgggccactgcactccagcctgggagacagagcgagactccgtctcaaaaaaaaaaaaaaaaaagaattcagggtgagttcataaagtgaaagcaagtttactaaggaagtaaacaaacaatagaatggctactgcatagacagagcctcccagaggactgctggttggctatatttatggttatttcttgatcatatgctaaataaggggaaaggtgtgggcagttcccagaactgagggttcctcacctttttagaccatatagggtaacttctggcattgctatggcatttgtaaacgtcatggcgctggtggtgggagtgtcttttagcacgctcatgcattataattggcctataatgagcagtgaggatgaccagaggtcacttttgttgccatcttggttttggcggttttgtccggcttctttattgcatcatgttttattaatggggtctttacgacctgtatcttgtgaaagcagtcctgctgacttcctgtctctgtgacaaagaatgcctgacctcttgggaatgcaacccagcaggtctcagcctcatttacccagcccgtactggagagatggagttgctgtggttccagtgcctctgacagaaccacgcgttatggtctttcttgtgctgacttgtttcgctcatcacaggtgttgttattgcgtaaggttctggcttgttctttctcctggctgtttagtatatatctgtttatttgtatttacttgtttatccattctattgccaatgggcatttggatagtgtccagttgggggcaattacgatcatgccaccgggaacattttgatatgtgcccttcggtgaacagttgaatgcatttctcatggatgtataatcagcagtagaaatgctgggttgtagagaaggtgcacattcaggctttgtctcagttaagccagagttttccaaaggggttgaaccaggtttccctcctgccagcagagtatgaaagttctggttgcattacatccttgccaacacttggtatccttttctttttttagttatttagttatgtaatgatcccacaatgtactttaaatttgcatttgtttccccgatggatatgagtttgagcacctttcatatgcttattgaccacttagataacctcttttatgaagtatgtcttcagacgttcccatttttctgttgtgttgcctgtccttttttaaattgatttcacagaactctttatatgttctcagtataaatatttgtttgagatgtattataaatatcttttttcatgcatgacttcatttgatccataagaggaggaaccgggaattttaagcctcaaggtcattggaatccaggacaagcttcacatgtgtgagcctcagtttccctctctaaatcctgtggatattagctcattgactggtgtatagatggaactgtgactgatattagcaycttttgctgggatgaggaagccctgaattaaaatgggcaaaactggccttgcatggctttcaacctaagtcatccctgtttctcaggtctgtataccaacttccaggctaggccttgaaaataaacagtgagcaaggcccatttcctacccttggaggggactgcaccagtggtgagcgcagggggctgtgggatcccagcagaaacactaactgggctaaggcattgtggaaagcttcctggaagaggtgagtctcagggtggagtaagcctcttctgttcaggtacaggcttgggcacctttgtgcatcaggcactggacaggtacctgggagatggaaagaatcggcttagtctcaccccctcttaccccgcaatagaccagtgttcttgatggggatgactgcasccccagggggcagtcagcaatgcctggggacatttttggttgtcaggactcagggaggggatgctactggcatctccttggtagaggccggggatgcggctaaacatcctacaatgcatgggacagccccaccccatactaccacaaagaatgatctggtccaaatgtctatagtgcagagactgagaaactccaagatggacaattacaatacgatatgagcgggggaagagaggagagcagagggattgggagtgttgtcctggccttaaggagtttgtttgtttgtttgtttgtttatttactgactttgagacagagtcttactctgtcatctaggccggagtgcagtggctcaatctcggctcactgcaaactccgcctcctgggttcaagtgattcttctgcctcagcctcctgagcagctgggattacaggcgcctgctaccatgcccagctgatttttgtatttttttttctttttctttttctttgtctttttctttttttttgagacagagtcttgctctgtcaccaagttggagttcagtsgcgcgatctcagcttactgcaacctctgcctcccaggttcaagtgattctcctgcctcagcctcccgggagtagctgggactacaggtgcgtgtcactacgcctggctgatttttgtatttttaatagagacggggtttcactatgttggccaggatggtctcgatctcttgaccttgtgatccgccttcctcggccccccaaagtgctgggattacaggcgtgagccaccgcacccagcctaatttttgtatttttaatagagacagggtttcaccacgttgtccaggctggtctctaactcctgacctcaggtaatctgcctgcctcagcctcccgacgtgctgggattacaggcatgagccaccgtgcctggccaggagtttattaaccttcatgcccaccacgtcaaccacaaaccacgtgtggctgcagagccctcgaartgtggctgctgtggctgaggaactgaatttcaagtctttatctattttaatttcagaacagatactcattcccattcttggaaaacttttaagtgtgtgtacaacagtttgggtgtgtggatatactttgttcaactatcaattttatgaaatctctgtacagattagccatttctactgagaatttagcatccaaattgagatgtgctgaaagtagttttaccctgggtttcaaggactaagtaattaaaaaaaaaagactataaactatctcagtaatgtttatattgattgatgataatattttatatatattgagttaaataaaatgttattaaatttacttctgtaacatagctactggaaaactgagaatttgaagtgtgtctcacactgcatttctattgggtggcgctgttacaaactacaggaaggagctagaattctgtggaaggttttaggcaggggctgacatcctctggccaaaatgacaagagggaattccagagaccagggcaagtctggccacagggagactgcatggcctaggagacctgagccacagccgccaagagaagccctgattccccagagaggaggtgcccgctgccagtccacaggtgagcaacaagactggatccagaagagggaggagcctttaggagaggcaggcccatcgcaaggctgactgatccttcaaaggagcctcccagctaaaagccagcaggagagagaccttggccaccaagggtctgccagctcctggtggtccccactccagccacctgccagctcgagcctgaccctcgcctccaccctggctgctgcctgtaccgctctcaggtttgaaacctcatctcttgctgcttggctctgctctctactacttaccagctgtgtcaactagagcaagtggctttccctctctgggggctaccagctttgcatggcctggcccatgttgcagctagagctcaggaaagatcagagatgcccacaggtgacaggtcttcctgggctgggtgttttggaggtggcattatgaagtctcagtggggggtctgcagacagtattctctgtttgcagatggcttcccctctccactctgtgtgttacgtcctcatttcactgctgagaaagtggaggctcagagaggtgaagcagtttgcccagggccacacagctccacagaggcagaattcagatgagtaatgctgactttgcaggtccaaggatacccctyccatgrctataactcagtgttcgatcaagggcagagcactgcacctctctgggcctcaatttccccatttgtcaaatggggagaataacagtgccagtcrgctgctgtgaggctatagtaagttgaataaaagtaacagakcaccggcccaaggcaaggcttcaggtggtggctgctgtttgttgactgatctgtgcataagtgttcactgcagccttctgcagtgagtggtaggagcccatttttaggrgaggaaactgaggctaagatgtgcaactggtgagagcaaagttggggactcatctggcttcttggcycyggagcactttccctcctctgctcggccctccggcgttacctgttattcatgacggggcaaggcttgcrctgtccccagcctggtcctccgtcctgcatgactggacatgaaggggcatagsagcagccttgccagtggcgctcacagatgtccagcccactaagcctgctccctccctcaggaactctgcttcctttgctgggtgagctgtaacctttcctccttcctgctccaagcagctactgagagtgagagtggttgatcaggaggctggtacgaagacacctaggctgtggccagatcctaaatgtcagaactgggagaggccttagaggtcattggcccctggcgctggttgtctagacacctcgttcagcctcagtctccatagttggaaaatgggaggaatcgtcagcttggcaaaaacggcaacctccggcaacacaaagttggtgcagaaggggaacatgcagactgctggcaggagggtctttgggagggcacttgcagtatctgctgaaatataaagggagagtggcccctgagcccgccgaccccctacaggtagctacctagagctgtgcttctcaaatcgtattgtgcatggaaaygcctggggtctggttaaaaagccggttaagtaycttctaaggcatgggactagcagcctcccaggtggccttactgcttgcaagaccctagtgaggccctagggcacctttcatgcatgggcacaaggaggcatggtcctttgtgatggtatgtcattgcaagaagatgaaagcagcttacatgtctgtcagaaggccttggctaactgaatggtgtgttgttcctgctgggatgctctggaacaattaagaagagggagggagggccgggcgtggtggctcacgcctgtaatcccagcattttaggaggccgaggcgggtggatcacaaggtcaggagattgagaccatcctggctaacacggtgaaaccccatctctactaaaaatacaaaaaaattagccgggcgtggaggcgggtgcctgtagtcccagctacttgggaggctgaggcaggagaatggtgtgaacccgggagacggagcttgcagtgagctgagatcacgccactgcactccagcctgggctggagtgagactctgtcttaaaaaaaaaaaaaaaaagaagaagagggagggaaggaggtccatcaaggtgttgcatgttgatgtgtcttttcttctggaaggatatcagtgccctctggaggctggggctttgtcttgtttactgatttggccccggtgctagaacaaggcctggcacccagtaggtgctcaagcaatgtttactggatgatagaacaaacatgctgacacggaaagacctcgtgttcagtgaacccagtcagtttcaggaggctatgtagaatccaggacttcttaaccttggcactagtgacatttgggactggatgattctttgtgctggggattacctgggcattgtaagatgtttagcagcatccgtgggctctacccatgagatgatccctaattgtaacaccaaaactatctctggacattaccgatggttccctgaatggcaaaatcgcccctggtcccagcactttgggaggccgaggcgggcagatcacttgaggtcgagagtttgagaccagcctgaccaacgtggtgaaaccttgtctgtactaaaagtacaaaattagctggacatgatggcacatgtctgtaatcccagctacttaggaaactgaggcaggagaatcgcttgaacttgggaggcggaggttacagtgagctgagatcgctccattgcactccagcctgggtgacatagtgagagtcagtctcaaaaaaaaaaaagaaaagaaaagaaaaagcaagtgtagatggctcccctccaaactaatcaacagcagttacatcttagaaaagggggaagaacataggattggatcttttactccaaagasacttatgccttctccctccagtttgtaatatagaggttgtaccaatgagttgagcaattaggtgcatcttaaaagtagaaatggcacrtggactggcttgtagagctgtgagggtttagtgaagttacacacctggaatgttcagcacagtgtctggctcatagtgggggtgctgccaaaggacaccattgttgttttattgtgttgcatctctccagcagcccctaagcatacagaagcagataagtccttctcgcatatgggcagactggagctcagagagggaaagggactctcctaaggtcacacagcaaaggaggagctaggcttgccttcatgactccaaaataaggacagtttctcctctgccaccctgcggcccccgccgggccgctgggcctcctggtctttgtatctgtggattgaggctgtgtgggctgcttcaagtcccccagcttgttgactgcttggtgttcaccagcccggctggcacccaggaagcaaacaaggctggaaatgtcacggggtgtagcctgtgggagttgtgctctggctttgcccagcagcactgggaggactgccagggatttggagcctgcgaggaaggaccttggcaaagatgttccctgtaggtgggtactggactggcggccagccctatgcagcttcaaagtcatgctgctcacccactgctcaaayatctgccrtggctccctagtacctaagcctaaattttccttcctgtgcctgctgggatagcattccatgtcctacaaaggactctccgtgagatgctagattccagatactaataatagtaataatgatgataagacctagagcacctgctgtttgctaggtgtggaactaagtgcttcacatgcaatatcttttttttctaataaaaaaattgtatttacttagaagcattcagaatgtcaacaaaacagctgcaactttttcttgcaacaaaacactytgcaattacagagtggtattcagttaacagaataattatttcrtataagctgcatcagagacaactgaagatgaaaaaactatcatccccatatataactaatttgtgctgtgcaccaacaagaacccgctttaaatttccatgccaatttacagcccccatactgtaccaggcaaggttagcggctattgaaaataccatcaggacagggctatctaaagacacattckgtagtgtgttaactatacaaaaaaagacactgtacagtttaaaaacaaatcttacacagccttacatttcaatttttttctttaaaaggagtgagttgtgtacaggggggttaaatgctttatagacaagaaaaaaaaaactgcgctrgaaccaacttattcatcatcttcttcatcttcatcttcttcatcttcctcctcctcatcctcttcrtcttcctcatcttcctcctcttccttctttttcttgcttttttcagccttgacaactcccttttttgctgcatcaggctttcctttagctcgatatgcagcaatatccttttcgtatttttccttcagcttcgcagccttcttttcataaggctgcttgtcatctgcggcagtgttattccacatctctcccagtttcttcgcaacatcaccaatggacaggccaggatgttctcctttgatttttgggcgatacgcagagcagaacaggaagaaggccgaaggagtcctcttgggtgcattcggatccttgaacttcttttttgtctcccctttgggagggatataggttttcatttctctttcgtaatgggccttgtccgcctttgccatatcttcaaattttcctttctctttagcagacatggtcttccacctctctgagcacttcttagaaaactctgagaggttgactgaagcatctgggtgcttcttcttatgcgcctcccgacaagtttgcccaaaaaatgcatgtgatgacattttgcctctcagcttcttaggatctcctttgcycatgtttagttatttttcctcagcgaggcacagtcgcccagtgcccgtccggctctcacttgccccggcgctgtctctgtggagctcagtgtactgcaatgcrcaatatcttatttaatccttacaaaagtcatatggcactgctgcaatatgattctcattttacaaatgaggaacctgatgaccacagaggttaagtgtcttgcccaaagtcatgtagctctgtagccagcatctgtagcctgactccggagccacactttaaccaggagaccatcctaccgtatcttgttaggagagcaagccagcatgatgccagcagagaaggcctctgggtacatgggaagaacccagccaggtgttcaggcctggcygtgccattaacttgctgtgtgaccttggccacactctcctttctgagctcgcccaggctttctccgaggccactgctggctctgcattcccgagctcaaggacccaaagttatgcatcaaatctagaaatcatcttctcttattttatatcgtattacagcattgatatgtatatgatacatatacattgatatgatatgcttctatacccggtctgtcacaccrtgtggatttcctcagaggctcctagaaggccctgctgtccasgctaggaggtttctggcagccccaagctccctggcttctgcgtgaaggtgtgaatagaaccatgctgttaagtgggggtttgcagaaaccagggtttgacctgggagagccctaggcagcaggggatgatcaagtgatcaagataatattttaatgcaaaatttgaaaaatcaaaactaacggatgaaccttgaacagagtgtgctaagtggaaaaagctggtcattaaagaacatgctttgtgtgattccatttttatgaaatgttcagaataggcgaactcatagagacggaaagtagagtagtggtctcctggggctgggaggagaagggagttacagtttgatacgtaagggtacgaggtttctctttgggtgatgaaaatgtagcaaaattgactatgactatacgaaaactctgtgagtgtactactctgcacatactagaaacctgtgaatatattaaaccctgtgattwtactaaagaccattgaactgtacactttatttttttattttttttgagatggagtttcgctctgttgtccaggctggagcgcagtggcgcrattttggctcactgcagcctctgcctcccaagttcaagcgattctcctgcctcagcctcytgagcagctgggattacaggcatctgccactgcaccctgctaatttgtgtatttttagtagagacagrgtttcaccatgttggccaggctggtcacgaactcctgacctcaggtgatcgcctgcctcggcctcccgtagtgttgggattacaggcgtgggccaccgcgccgggcccatgaactgtacactttaaataggtgagttatatgatatgtgcattgtccctcagtaaagctgttatgaaacaatctaaatgcaaaaatatccatgaaaaacaacatataaaaattgtaaataatgtcaggatcagtattactgatttttttctttctgccttggctccagtgtggcttagcacagcgcaacatcacttgtcctatttaaacactttatattttttgtttgtcatggatttttttccactaatctaaaaaagattgcattgaaacattattgatcttggttactgagttttttggcacccccttgagtttttgtgytcaaggacaatgccctgcttgcctcaccctgttcctgccctgccaggcaaggcttttgctctccctagggtggccagggtctcccccaccactctgtcccttccttctctctgtctccccatctgacggctgagaccagcaagcccaccccaagagaagctatgatttgtctgtccagccagtgagtcatgtgtgaggaccacagtagggggctctctccacatcacatcctcctcctgcccacagtgtctcctttgctgctttctcccttctctcccatctccctcctttttaatttttttgttttgttttgtttaaggccaagcacagtggctcatgcctgtagtcgcagcactttgggaggccgaggcaggcagatcacttaaggtcaggagttggagaccagcctggtcagcatgatgaaaccctgtctttactaaaaatacaaaaaaattagccagtgttgtggcccagtgcctgtaatcccagctactcaggaggctgaggcaggagaatsacttgaacctgggagatggtggttgcagtgagctgtgattgctccattgcactccagcctgggcgacatatatatatgtgtgtgtgtgtgtgtgtgtgtgtgtgtattatatatatttttatataataatttttatataatatatatatataaattttatataaaatatatatttttttgagacggagtctccctctgtcaaccaggccagagtacagtggtgtgatcacagctcactgcagtcttgacctcctgggctcaagtgatcctctggcctcagcctcccaagtagttgggactacaggagcatgccaccacacccggctaatttttaatttttttgtagagatggagctttactacattgcccaggctggtcttgaactccagagctcaagcaatcctccctcctcggcctcctgaagtgctgagattacagacatgggccaccacgtctgaccccatctctcttctttgagatggctccctgggtcccccagcagctatcacttggcctccagcccttgtcttttcaggcatcctacaccagagagagcctgtgtcccctcccaggtcacaaccagaccaatgctcacaatttcccaccgtccccaggataactccaagctccttacctggcattcaaagcctggcacagtctagagcttgccaatctcctttccccacttttcctgctcaccactgctgatttctcatcggtagattcagatgggactcacagttattgaagagctgcaaggcattagccacacccctctggtctttcccttattaagcccctatctcacttaatcctcacagcagcatcgctagtaagaattattgggcccattttacagatgaggaractcaggcccagagagtggaggtgatgctgccaagggtctggggtagatgcaggtgcacgcccagtctggctggcagcatgggactctgaccacctgcctgtgcctcccctcatccactgcggatgtttgctttccctcagggccatgtgtacagtgcctctgccagggtcacccccactttggtccctgttggccttcacactgctaacttagtagccaaggtcacatgccagtgtgtgatgccagcgtggagaggagccatggttcttttataacagttgccatctcctacctacttatatttggggcttgctatgttgatagccgcaggctgggtctcaaattcctgggctcaagctgtcttcctgcctcagctttgtgagcagctgggatcacaggcatgagccgctgctcctggccacttttacttcttaaaataaaatcagaacatgcaaaccatgctccacaatatgccatcaagtgtttctggtgcaaatccctactgctcttgtgtttgatggtggggcgaggaaacgggcaggaatgggaaggaaggtgaatctagactcctgaggcaggaccatggctccctggccctaacagccatagattttgtgtccataacggagccagatgctggcagcgattcttaattggggttccaggctgcattcgggggcctaggaatttggatgaggggaaaattacatctttattgaccctagtttaacatttcctccaggtgacaacataggtgataaatcacagtagtagtggcagcactcgcatcaccagtagaaaccacactttttttytgagatggagtttcgctcttgtcgcccaggctagggtgcaatgacrcgatctcggctcactgcaacctctgcctcccagattcaagtgattcacctgcttcagcctcccaagtagctgggattacaggtggctgccaccacgccyggctaatttttttgtattttagtagagacggggtttcaccatgttggccaggctggtcttgaactcctgacctcaggtgatccgcccacctcggcctcccaaggtgctgggattatagacatgagccactgctcctggcccatatttttatatcacattttaggtgccacagatgtgtctgcttgcagatgacagtgattattctgtctgctactagatcttgttattgattgctttaataaaggagcagataggttacagataatatttcacagcaatttttgtaatcacattcttagccaaagtttactatgttggtttccttttcatcctgtatattttattgtattccatttaaaagcattattctgggaaggggcccatagatttcaccagatggttgaagagatccatggcacaaaatggtggaagaacccattagacctgggtttgagtcctcatgctgccctgcacctgctgtgtgagtgtgagcagagtgtgagcagcccattccgcctctggatttcttattcatgatccagccagagaggggctgtctcccccacagggttgccgtgggaggcctgcagtgggagtcgatgccactttgttgtggtgcctgtctgttgggtgttattaggtcttctgggcaggacgtgacactgggtgctccagcgtgccctgaacgtgttcccaccgcctcctgcacaccccagtctgtctgggcatccatcccactgggttgattgtctgccggctcaatggccgtgacaytcattatgggcaggactgtgtccgtcctaataaataatggtacagaattgtagctgatgcctctgagctcacactctttgccagcttcacaacagctccacaaggtaggtgccgttttcagacttattttggaaatgttaaacgttataacaggtgagtgaggctcagagacaagaagtcactggctcaaggccactggtgagtggccacaccaagatcgcctgggtctgtccaactttaggtctacactcctgacccctgcactccacgaygattgcattcctgagcctggcccaggtgggcagccagtgaatagttagctggtgcaaaagtaattgcggtctttggtattactttcagtggcaaaaactgcattacttttgcaccagcctactagaacgctsagttcagtgccttaagcggtgtttcacagagagggagcaaggggcagcgcttgttaaaatgcaaattccctcagctccacgttaaaatgcaaattccctcagctccaccttgcctcttccaaatcagaatatttgagggcaggccccaggaaatctgccttttaaagttttgggctattcagaagcacaccaaagtttaaccactaccctaaagggaaggaataacagtcaggtagtaacaaagctctgttctgagtgctttatgtgagtttatttattgtgagacagagtcttgctgtgtcacccaggctggagtgcagtggcgccatcttggctcactgcaacctcctcctcctgggttcaagcaattcttgtgcttcagcctcccaagtagctgggattacaggcattcaccaccacgcctggctaatttctgtatttttggcagagacggggtttcaccatgttggccatgctggtcttgaactcctgaccccaggtgatccgcccaccttggcctcccaaagtgctgggattacaggcatgagccactgcaagtttatttatttagtcttcayaagtgttaatggcctccccatttcacagatgaggaaagtgaggcacaaagtwgttagataacacctccccactgacccccaacccagggctgcattgctaggaatcagccaggtgtggaggattcctgcccctatgctcagtcccctacctctgacagcttctggacagaggagtagagacgggatcccatggtgggtgggggtgagggctcaggaagcactggtccctacaagatcacgctggccctttcctgtttgccttgtttaccaggcaggggccctctgtgtttctgggcaggaagtcctgagcaggggctgtgccaggtgtcaggggcaagactgggagatggtccaggagtctgagccgggcactactctgagcagctgtctgacctggggcacatagcttccccatctgtgtatggggtggggtcgagatttggaagaggtagttaagagcttgggttccggcatcagatagacctgagttccagatcaaactcagccacttatcatctgtgtgatctccaacaaagcacttcacctctctaagcctcagtttccccttctgtaaaacgtggctaataataatagtgcctaccctccaagcctgtcatgagggtcaaaatatattgttggctstccgtcttcttgggttctgcatgcggggattcagccgacagtggatcaaaaatattcgggaaaaaatgggtggttgcatctgtactgaacatgaacagagcttttttgtcctgtgattgttctctaaacaatacagtgtaacaactacctacatagcatttagattgtattaggtagtataattgatctagcactgatttaaagtatatgggaggatacgtgtaggttttatgcaaatattacatcattttatataagggacttgatgtatactggtattcgagggatattctgtaatcagtcccttatgataccgaggggcgactgtatataaaactgccagccaggtgcagtagctcatgcctataatcctagcactttgggaggctgaggtgggaggattaaactcagactggcctgggcaacatagtgagaccccgtctccacaaaaataaaaaattaactgggcatggtggcacttgcctgtagtcccagctacttggcaggctggggcagacagatcatttgagaccaggagtttcaaggctgcagtgaacagtgatcactccactgcactccagcctttgagacagaaggagaccctgtctctttaaaaaaaaaaaaaaaaactgccaggcatgcacaagcctctctgctagtccttacgtggcaacagacaggatgctggatgattccctatgcatgagtgtgcacttctttttcttttcaatcaactatttgttttcccgaattgtacatttttctcttaccaaaggctggccacctgggtcctcccacagtccctactgagaaaagtcccagaaccaaaackggcttccacctcggctcactgtatttgtgctttgtgagtttgcccaggttgcactgagggcaggtgctgctgatagtgtctttttttttttttttttttttttttgagatggagtttcgctgttgtcacccaggctggagtacaatggcacaatctcagctcactgcaacctccgcctcccgggttcaagcagttctcctgcctcaggctctcgagtagctgggactacaggcgcccgccaccaygcscggctaatttttgtatttttagtagagatggggtatcaccatgttggccaggctggtctcgaactcctgacctcaggtgatcckcctgccttggcctcccaaagtgctgggattataggcgtgaaccactgctcctggctgatagtgtcttttcgtgatatagaccagggggttggcaaactatgcccaygggacaaatctagctgaccgcctgttttcgtaactagtcttatggaaacgcagccacttgccttcatgtatgtgtcatcttggttgtttgcattacagttgcaaastcgcagtggagctcttgtggcccacagagccaaaaacatgggttttatgacttcacagaagcttgcctacccccaagagagatgataaagcagggtcgtcraaagttggggaaacagtttgggttctggcatcagatagcctgagtttcagttcaggctcaaccaattaccatctgtgtgacctccaacaaagcatttcaccgctctaagcctcagtttccccttcggtaaaacgtggctaataatagcgcccaccctccagggttgtcattagagtaaaaatgcacagttggccctgtacattttgactctaaatgacaacgaacagggagaagaagtcacccctgatcccacctgaccggaccacgcgttccttagtttgtgtgtatgtccctgccagtctttatccatgtgctgtaatgactgatcctaacatcaaaaggcggccaggcgtagtggcccatgcctgcaatcccagcactttgagaggcctaggcaggaggattacttgagcccaggagtttgagaccagcctggacaatgtattaagaccccatttctacaaaaaataaaatattagccgggcatggtggtgcactagctacttgggaggctgagatgggagaatgtgcttgagcccaggtgtttgaggctgcagtgagccatgattgcaccgctgtattctagcctgagcaacagagcaagaacctgtctcaaaaaaaaaaaaaaaaaaaaaaagaaaaagaaaagaaaaggaaaagaattaaatggtaatagttttcttatgctggctctgcctggcttgatggaagttacatagttcccatgacactcttccaggtgttattcccatttctcagatgagaacactgaggctcagagagctgcccaagattgacccaggacacscagcctttgagtgggggagccaggatgtgacccccagcctcatcagtcccyacccctggctagtccctaacagagtgctgaactgggcctctgaacgggagactgggacagtgtgtgggaccctgctttgatggttttaggtaaaaaaaaatgcaaagcaagacagggaggagaacacaggctctggaaagagagagacttgagttttccttctagctcccctgcctcccagctgcatggccttcggcaggttcctttacgtctctgagccccaggaaatggatggttaataagggagggtcaaatagggtcaatggttaagacaaaatgcaatgatatatgtaaaacccttagttcagtgcctggtatataataagggctctaagtctgaactaatgtttttttgtttgtttgtttgtttgttttttaggcagaatctctccctgtcacccagattggagtgcagtggtgtgatcttggctcactgcaacctctgcctcccaggctcaagccatcctcccacttcagcctcccaagtagctgggactatgggtgtattatcatcaagcccagctaatttttgtaragagagggttttgtcttattttccaggctggtcgcaaactcctttgctgtagcaatccatccccctcagcctcccaaagtgccgggattataggcatgagccaccatgcctggcgtgagccactgtgcctggcctgagctaatatttttaaggctgcatgccagcctccctgccctttttccctcttgaaccactcttcatgctttttatgctcaagcagtgtccagagcttcagaattatttttcccttactcacaccccattggaatctggagggctttcttggctggcttccccccgcaataggtcagaggtccctgattcccagggaccctgcccaagagacctgcgtctccccagctctgcagaaggttgaggcgtggtgggtgggaggtggtgtggtcagcgtggtctggtagggttgggaatagccatggcaatggaatgttgggagctggttcccatggggaggaattgcagggctgatggctgagcctgagcacgtgggcactgggccctgctccagggccactctgtaagtgcagtgacctcctgagctggctttgtgcactgccagctccccgctgttgtcccctccctgcccccctgccgcttttctcttgggaacctcctgatctgctgagcttggagaaatgatgatttagaaagttcctatagatttgagccaaaattcagtgtggtctcaatgcaaatgtcactcccttctttccttctttaacccctggggaatgcctccacctctcatcatgggcatttgcttctgagcctttatcactggtgtcattgtctcacatactggtttcttggctccccactggaatgtcagctcyatgaaggcaggaacctttgtctgttgcccttgatgtatcccagtatcttgagcagggccccgcacatggtacttgctcagtaaacattggtggaatgaatgaatctgagtctaaggggatctcttagattgattagcccctcccttccagggacatttcagggtcaatggaaagagggagcaaagtttcctcccatggtctcctgctgcccatttgttttttttgtttttttttttgagatggagtcttgctccatcacccaggctgaagtgcagtggcatgatctcggctcactgcaacctctgcctctcaggttcaagcaattctcctgccttagcctcctgagtagctgggagctcccaagcgcgatcccccacacccggctaatttttttttttttttttttttagtagagaggggggtttcaccgtgttagccaggatggtctcgatctcctgacttcgtgatccacctgcctcggcctcccaaagtgctgggattataggtgtgagtcaccacacctgctgaaatgaaaccccrctgtttccaacaaccgattctggcttaatctgattattttttttttcttttttctttttcttttttttttttttttttgagacggagtcttgctctgtcgcccaggctggagtgcagtggcatgatctcggctcactgcaacctctgcctcccaggttcaagcgattcctctgcctcagcctcctgagtagctgggattacagccacgcgccaccatgcctggctaattttttgtattttagtacggaggagatttcactgtgttggccaggatggtctcgatctcctaacctcgtgatctgtccaccttggcctcacaaagtgccgggattacargcrtgagcccctgtgcctggctgctgcccctgttttatgagccgcatgacaccacgctagggttggcaccttggaggcagaaccgcatttggaaactggcctttcctcttacttgttgtttggcttctgctaatcactccatctcttggagcttcaatttcttcacttctcagatggggataaaaatctccaccatacaaggatttgctgaaaacaagagccagcaggcaggtagcacttgctctgggccaggtgctgttccgacatgccctaatttatttatacctcccagcactcctgcaagactagtttctcatttgcrctaggcacatttcaaagtgcccttctaggaggtgttacaggctgcgtatccctttatctgaaattcttgggactagaaaggttttggatttcagatttttttttcttttgaggcaggggctccctctgacaccgaggctggagtgcagtggcatgatcatggctcactttagccttgacctctggggttcaagtgatcctcctgcctcagcatcccaattagctgggactacaggcaagcaccaccacacctggctaattaaaaaaaaatttttttttgtagtgatggggtctcactttgttgcccaggctggtctcaaactcctgggctcaagcgagcctcctgcctcagccctcaaagtgctgggattacaggcatgagctaccacacctagcttgaattttttccgagtttggaatatttgcatcatactaatcagttcagcatccatactccaaaatgctctgatgagcttgcttgcttgcttccttccttcytttttctttctctttcttctctctttctctytttctttctccttccttgcttttcttctttttcttccttttttccttccttcctttcttctttctttctttttccttttctttctcctttccttacctttcccctttcctttcccatgccctacctggtttcatactcacatcagcccaatcaggcgggtggtgccatgtcctcccccttcccctcccccgcctcctttccccctccctctcccctccccttccctttcctttcaagatggggtctcgctgtattaacagcccaggctggtcttgaactcccaagcttaagtgattctcccacctcggcttcccaaagtgctgggattacaggtgtaaaccaccatgccccacatccgatgagcgttttctgtgagcatcatgttggcactcaacaagttttggattttggagcatttcagattttgaaattttggattagggctacttgacctgtattatcatccccattttacagacgagaaaaccaagtctcagagaggctaagtgacttgccaaggtccttcagccagtagctggtgcagcagaatgttgaacccaagcagtctgggcccataacatgtatggcatacaattcaaaaattactagtcactttattattttatcatatggaaagacaataagatgacaccatcaagttatgtttttaggagaaaaatatcacctaccacccgagtaccacccctggtagcaatgttttttgtttctttgttttgaggcagtctcattctgtcatccaagctggagtacagtggctcgatcatagttcactgcagccttgatctcctgggctcaagcaatcccccaacctcggcctcccgagtagctgggactacaggcgtgcaccaycccctgcttggttaactggtagcagttgagtcatatttccttcttgtcttttttcttaagtgtggtttctatttgttggcgattttgctgtgtggtagagtcgtgctcaccctgcacccacgtgggcctttcttagcttaaaatggagaacatgccaccacctgcctgactgggctgatgtgagtatgaaaccaggtagggcatggaaagcccttgctttggtgttaaatacacaggggtgctgtgtatttaatatattcctcctacaagaaaaggaggggctgggtgaagtggcccacacctgaaatcccagcactttgggaggcacaggcaagagtattgcttgagtccaggagtttgagaccagcctgggcaacatagcgggactccatctctacacaaaaatacaaatattagccaggcatggtggcatgcacctgtagtcctggatacctgggaggctgagatgggaggatctgggaggatcgcttgagctcgaggaagtcaaggctgcagtgaacgaagatcatgccactgcactccagcctgggctggacagagtgagaccccatctcaacaaaaaaagaaaaaaaggagagctctttgactcctacctctccctctcatttgccctctaatcagcactgcccagcagaacactctgcagtgatgggaatgttctagtgcagaggtcagcaaatttctataaatgtccagatagtaaatgtttccaattttgtggtgttcatgtggtttctattgccattgctcctcctcctctctctcctcttcctcttcccttcaccctcttcccttgataaaatttacaaatcattcttagttcaagagtgatttgaaaacaggccctgggttggattgggccatcattggcctaccccatcctaaatgtgcactgtccagtacagtagccactggtcacatgtggcttctgggcacttgcagtgtggctagtgcaaatgagaagctggattcttaattgtatttaatgttgcataaggtgagttcaaatagttacatgtggctggtagctgcatgttggatgcacagctccaaatgactgacagccctgacarccctgttccattgctctgaaagggcctgtgttccctggagggggatggctgggctcgtgggccatgggagctgcctggctggcaggcctcttgggctcgctggcatttcaagagctgtctgagggcagctgggcgagccatcctgcctctggaagagcttcaagtgcctggttcctaattggttttgtttattccaagagagcaggcctcacatcattgaccgcccatgtcccaggagtgccggggcttgagtatctatagtttgggggtggcctgctgtgggggggtctagttgctgtggttacaccttggttcccttttccatctgggtttagatgtcctaattggcctgatatttcaggaataggaaaatggtatggagaaaaggagtgagtgaataggaaggaatggaggaccaagaaacgcagtcaacaccctgcagccggtttattgccatcatggcacaaataataaaagctgagttttttttttctttttttttttttttgagacgtggtcttgctctgttgcccagactgtagtgcagtgatgcaatcacagctcgctgcagcctcgacctcctgggcttcagcaatcctcccatctaagcctcccaagtagccgggactataggcaggtaccatcacctggataactttttattttttgtagagactgggtctccccatattgcccaggctggtctctaactcctgggctcaagygatcctcctgcctctgcctcccaaagtgctgggatcacaggcgtgagccaccaccccmggcctggctgagatttaaaaagctgacattttaaagtgttgttaccctggttaaaatctcctgtttacagaataggaaaagtctgagaggagtgatatgtatactcaaggagttggccaactccagagctgcattccaaactacccacctcctgaaacaggactgacaggtgggaggtttagcttcagactcagtatgtgagtctgtaaaatgatttttccttgtgggcctcagttgtcccatctgtaaaatgggggaaggtttgaattggactaaaaatcttccctaccctaaatggtaaggacacagcactgggagatatatactccctgccctaaagctataaggatccccttgattccactttggcctggttctggctacatgccaggactcatcgtggacacagcctcgttcctgtaaccatgggagattaagtgttaggaaggtcttacagatctggatggtgaaactctttccatccattccttgggtaagttgctcttcstcttggtgtcatgctttctcatctgtaaaattgggaycatcacactttccttttattggggtttaaatgacacaggtatttgcgtggtcagcatttggtcagtgttaggtggtgacagtaggatgttgtgttcaattccaggaagcagcatattccttgtaggctgggcctgtggtaccatttggaattgtgcagtccacaacctgatcaaccatacccagccatctcaggtggcaatagtggtgtgtagtggtggttgttgttgcttattgttatatttacttttcctggagtccaaggtccctaggccaagaggaggggagaggcctggttggcataaaccaggggctccctaaggcagcggcgccttagctcagacttcagctcacacctctctgcctaagaagtgagccagttcattccctgtaggagtagataagttgagactccagctgtggtatcttgagctgaagcagcctcccctgcattccagagtccttctcccaaatgtcactgtccagtgctcttgggagcctaaaccctcactctgcctctttgaaggcttggcccctctccacagtgcccatccctgatgcaatatctcctttgcctctccagggctctgccagcagacagccttggcacacaggcacaagggctggagcccagagatgagagtgcccaagggaggtaagtgcacctagaaggaacttcccctggagtcctggcccctcctgagaccgccctccaaaagtcccctccatgcccccagcctccatgattgggtgcctgggcaaactcccctggctggttttcacctttctgttcagcyagcaggttggaaatctggtactagaaaaagctgcatcccagcaagcatcatagagagatgagcatcttccttgtctattaggaagacgattctccaggtgataggagagagaaggctgagtcccaaagtgggcgggggacttgcccagtgtcacggagcagattcaagccagaacccaaacgctgttgtgtcccgttctcctaatgttagtgttttaggtatgctttctcagyaccccacaggagttccttggccttctgaatagcttccttgagaaaagggtattattattccttttttggagaagaaagtagaagctcagagaagtgataccttttgtccagatcaccagctggcaagtggcagcagaagtgagatttgaaccttggagtgtagtactccaagttagaagccctcacctatcatcctcactgcraggatgccaggatacctcccttgccagggtccagcagggtgatgagggtgttgggcaggcctagttccctgggctgggccctctagctccttccacagtggggtccctagctctgggtaaccaggaagctactttctgctttgtgggttccaggctgctttctgtgtcccaagtcaccctgctttttcttcttaagccatcgtgcaggtcrttgctgtcttctgctcacttctgacttgcctgctttgagctgttttcttcagccttggcctggtctgatccaggattcctgccctggccatgcaaccttgggcaagctgcttcatctctttgagcttagatactgcagggaaaatgctttagcagagtttatgctccataatttcgaacacctttgctgaacataaaatgctgaagctggccgggtgcggtggctcacacctgtaatcccagcactttgggaggctgaggcgggcagatcaccttaggtcaggagttcgagaccagcctggctaacatggtgaaaccccatctctactaaaaacacacaaaaaaatcagccaaggtggggatgctgtcactgaaatcctaataactgacaggattctggtcacaggtctcaggggagaatttcactgagcacctgatgaagacaaagggtcgttgcagggatttcggaatggcttcatgtcctgttcagcctgcctccccgcaggaagtagctctgaattagctttctccatcacagaccctgaatcgagggtacaaatgaagccccaacctcttcagcagaacttcatcagcacgtttttctgaagagagggaaattatccaatgcacagagaggccggtgaccccagcctgagatccatctctggtttgtcagctgcttctcatattttcacagcagcctctgaggtcagtggatccaccctgattttgcagctgaagagactgtggctaagatgagggaagtgactctcccaagccacatggccaggaagtcctagcctcttagcagtttccaccccaggcctgagactgtgttccctccgctttgatgtttattttccacttgctatagcctaagaaggcccaggcagcccaagcccttgcaggtggataggcccagctgcagactgggcccttgggtggttttgggtggaacctcacatccaaagaggcatgctgtcttcccactggcttccaccaaaccctccgttcactaagtcacttgcagttccccagtcgtgctgcatcctttcctgcctgtggctctgcgctggctattccctttgctggtaacatccttgtttcccttctccacctgcctgtttcctacccaccactgaaaattctgcatgaaggctacctcctgcaggaggccttccctcacctacgcaggtagaacccatcaatctctctcaggcacaggtccatggtaagagtagactttggaggctgaggctcccagcacatagcaggtgctcattaaatgttggaataagtaaataaccaatgattatgatagaaatcactaatattcttgggccagatggggtaactcatgcctgtaatcccatcattttgggaggctgaggcgggaggatcacttgaagcgagaccctgtttctaaaaattagccaggtgcggtggtgtgtgcctgtagtcccaggtacttgggaggctgaggcagaggattgcttgagcccaggagtccgaggccgcagtgagctatgatctctcaccactcaatgcactccagccttttttttttttttttttagacggagtctcgctctgtcgcccacgctggagtgcagtggcgcagtctaggctcactgcaagctctgcctcccaggttcacgccattctcctgccgcagcctcccgagtagctgggactacaggcgcccgccaccatgcccagctaattttttgtattttagtagagatgggatatcaccgtgttagccaggatggtctcgatctcctgacctcatgatccgctggaccgggtggctcatgcctgtaatcccatcactttgggagacaggtaggaggatcacccaggcccacgagttcaagagcagcctgggaaacatggtgagaccccatctctttaaaaaaacaaaaaaaattgaaaaaagtgcccagcagggtgccaggcacacagctagtgcttatgaaaggtgccctctgcattcatgtcagcagcctcttgtttgcagttatagggctttgcagttattggagagctcacagctcacagacctccctgactatgcatgtccccctctctccccagatgtgagcctggcgggctgcccgctaacctgtcgctgaagccccagaagcgggccctcaggccaggcctaccctgcctccggcccagcatgcgcctgtcggtgcggagggtgctgctggcagccggctgcgccctggtcctggtgctggcggttcagctgggacagcaggtgctagagtgccgggcggtgctggcgggcctgcggagcccccggggggccatgcggcctgagcaggaggagctggtgatggtgggcaccaaccacgtggaataccgctatggcaaggccatgccgctcatcttcgtgggtggcgtgcctcgcagtggcaccacgttgatgcgcgccatgctggacgcbcacccygaggtgcgctgyggcgaggagacccgcatcatcccgcgcgtgctggccatgcgccaggcctggtccaagtctggccgtgagaagctgcggctggatgaggcgggggtgacggatgaggtgctggacgccgccatgcaggccttcatcctggaggtgattgccaagcacggagagccggcccgcgtgctctgcaacaaggacccatttacgctcaagtcctcggtctacctgtcgcgcctgttccccaactccaagttcctgctgatggtgcgggacggccgggcctccgtgcactccatgatcacgcgcaaagtcaccattgcgggctttgacctcagcagctaccgtgactgcctcaccaagtggaacaaggccatcgaggtgatgtacgcccagtgcatggaggtaggcaaggagaagtgcytgcctgtgtactacgagcagctggtgctgcaccccaggcgctcactcaagctcatcctcgacttcctcggcatcgcctggagcgacgctgtcctccaccatgaagacctcattggcaagcccggtggtgtytccctgtccaagtgagtggagcccctgatgcttccactcagmctctggccctggagtcagaggcgccaggcaagaaaatcagcactgcctttcttgagctgtgtggccttgggcaagtcactatatctctctgagcctccgtttcattatcccaaaaaatgacaacaattactcctctcctttctgagagaatctgcaaacttcgtgggctgtttgtttgttttttgaggcagtgtctcggtctgttgcccggctggagtaacagccgccacctccctgttcaagtgatcctcccacctcatcttcctgagtagctgggactataggcatgcgccaccaagctgggctaatttttgtatttttggtagagatggggtttgccctgttgcccaggctggtctcaaactcctggcctcaagcagttcttccacctcagcctcccagagtcctgggattacaggcatgagccaccacacccagcctagaatctgcaaactttgaatatgctttgtagtaaggcaatagtgggtaaaggttaagagcacagattccagaacaaggatgtctgggttcaaacctcagctctgccacttcttagctgtgtgaccctgggcaaagcgactcaacccctgtgcttccattgcttcatctgtaacatggaaatataatttgcctaccttatagatacctgtgggcatcaaataggttaataaatgttaggtgctattattactattttagtgttgatactgcttttattgatggagtacccatcctcaccattgtcatttaatgartgcctactgtatggcaagtattgggttaagcccccaacaagtttatctcctttaatcctcacagcaacctgaggacataggaacacctcttatccacattttatagaccaaaaaactgaatctcacagaggagaagttactggcctcaggctacacagctaacaaagcatggtgctgggattggaacccaggtctgttttttggggtttttcttgtttttgtttttgtttttttgagacagggtttcactctgttgcccaggctggagtgcagtggcacgatcccagctaactgcagcctcgacctcttgggctcaagcaattctcccacctcagtctcccgagtagttgggactacaggcgagcakctccacacccagctcattttttttttttttttcctagtagagatgagatctcagtatgtcttccaggctggtctccaacccctgagctcaagccttcctcctgccttggcctcccaaagtgctgggattacaggcccctggcctattgtgttcttaaactccccatgtccagaactcctcccatcctccccttcactccccctcatcctttcctttccttcctccctctgtcccttgctccctgccttcttccattggaaaagctgctgtccctatcctgagacccagagcactttgaacaatgctggagcagaatatgcagtttccacgctttcccatcctgatcaggctctggatagcctgagagctcagtgaaagggtggtccttcccatggctggtccttcccatggctggtccctgctgggccccttcccaggcccagagcagagctagaggctcgcagctgctctccgctagcaacaaagttcctacatgccgggtaccccagccagttggtgctggagctaggattttataaattattatgacaaaaatattagattaccaaagtaatacatcttgactatagaaaattagaaaagatacaccaaagaagaacggagaaacaacccatgatctcaccacccagatcttgatgtgtggcctactgcaccattttcagggcctgttgatgaaactggagtccaacgaaacatactcctctgtagcctttttccacggtggtgtgggagcccttgccagtggcagccagcactctttggtagcagcatttttgttgttgttttgttgttgagacggagtctcgctctgtcacccaggctggagtgtagtggtgtgatctcggctcactgcaacctccgcctcccgggttcaagcagttctccctgcctcagcctcccaaatagctgggattacaggcacccgccaccacgctctgctaatttttatatttttagtagagatggggttttgccatgttggccaggctggtctcgaactcgtgacctcaggtgatctgcccgcctcagcctccccaagtgctgggattacaggcatgagccaccgcgcctgacctgcagcatcattttgaatagctgtgcgacaggctgctacacggattgccatattcgacttcacattccctattgttggacacttcggttatttccagttttactgatatgtatcaagcattgccctcattcatgttctgggatgtgtccacctcatttctgcaccataaagtcctagagacacaaggattttggcaaaagccatgcacatactcaagatttttgacatattgggtagagttaagatttaaatccaggtttgcagcctctgaatctgtgttctacccaccagtccacaccctttcaccttcccctgttctcctcacctcacgcccggtcttgtcttccttttgctgcctctttctgttctttcccaagtcacctcttagttgggatgaaaacatttagaactaggcccttgatcctgggggttccccaccattcatcctgtcaggcccctgagttataattggtaagatctgcatcattcaggtggcttgggaagcctgttacagggagagttaggaagcaggttgaagatgatggttattccatggtagctgtgaaaagttggaaacaacctaaatgtctgtcttcaggggaatggaaaaataagtgatggaggaaggctacatagctggcaaaaagagtgaggtattgagtggggaaaaaaaactagcgtatttgttttacagctgcagacgcgcgtttgtgtgtgtgtgwgagagagagagcgtgtgcacaggagagagagcatgctaacccttattaaaaatttacaatgtgttggccaggcacagtggcttatgtctggaatcccagcactttgggaggccgaggcgggcagatcacttgaggtcaggagttcgagaccagcctggccaacatggtgaaaccccgtctcttctaaaaatacaaaaattagctgggcgtggtggtacatgcctgtagttccagctacttgggaggctgaggcatgagaatcgtttgaacccaggaggtggaggttgcagtgagccaagattgtgccactgcactccagcctgggcaacagagtgagactccatctccaaaaagaaaaaacttacaatgtgcctacgctcttctaagcactttctttgtattaactcatttactcttcagacaaccccagtgaggtaggtactactatcattgccaattacagaagaggaaactgaggcccagagaggtgaagtaactttcccaaggccacacagctggggaacagctggcgtctgaacccaggcaatctggctccctggtttgctcttaactactctacaagaaaaggttagagaaggtggtgtgctccacagtgcaaagactgagtgcctgtaggaagccgatgggctggcagtgatgaacacagtggctttcagctttatcattagtgttttataactttttttagggacaaaatattcatgttagtcatacacattaaaaagtgtttcttttttttttgagacagggtcttgctctgttgcccagtctggagtgcagtggtgcaatcacagctcaggctcactgcttcttcaacctcccgggctcaagcaattctcccatctcagcctcctgcgcagctgctgggactacaggcgcttgttaccatgcccagcttatttttgtaatggggtttcaccatgttgcccaagttggtgtcaaactcctgagctcaagtgatccttctgccttggctttctgaagtgctgggattacaggtgtgagccactgtgcctgacctaaactgttgttattttttaagctggagaagaaagcagaatgtatgtaccaatggtgtatactgctagtactttcttctgacttctcactgcatgctgtgttcccattgtacaaaggaggtatgaggaggcaaaaatgactcacctgccatctcacagttgatggggcagagctgggtggaggccaggtttctccagtctttcctgctgccccagagtggctgagcagggaatccgctcaggcgccatctgggtctgccctaccctctccagcgtctcctctctccccaggatcgagcggtccacggaccaggtcatcaagcctgttaacctggaagcgctctccaagtggactggccacatccctggggatgtggtgcgggacatggcccagatcgcccccatgctggctcagctcggctatgacccttatgcaaacccccccaactatggcaaccctgaccccttcgtcatcaacaacacacagcgggtgagtgtgcacctgtacttgtrgaagtgtactcttggggatatggggcttctgcagatgtggaaactccagccacctgaggaaatgttcagtctctcaattcytggtcatctgatttgttcctgtctgatggacacagtgaactacatgattgcttgtatttccattttgcttgggctgcagggaagctcaaagccaactggtagcctgtctctcatactctaacatctaacagcaggccagcttgtacactaatttcatcttatttctctaattttatttacatttttacccctatttccctggctatttgtttatctgtttgtaaggcacctcaagtctttgttgagagggggtataaataaataaactattggtccctttcttgtcttataaggtttaatgtggatttctcagacaaatgtgagtttagggctgtttaaattatgcttaaaattctccttagttaagatggtgaagggaaatgacttttttgttttgtactgttttgtttgaggcatggtcttgctctgttgcccaagctgggtgcactggtgcagtcatagctactgcagcctgatacttctcggcttaagccatcctctcaccccaggctcctgagtagctaggactgcaggtgcacgccaccatgcacagctaattttaatttttataaaggcggggtctcgctacgttgcccaggctggtctagaactcctggccgtaagggatgcccctgcttcactcttcccaaagtgctgagattacaggtgtgagcctccagtgactgacaaaatgcttttgaagtgttaaagtaggctaacacccactgggtaaaagaacagttaacaagttgatggccttatttatacgtttccattacagcttctagtttactttaagtgctgtgttctaacttccttataggcaaatatttgaaaatgggacccaggcctgaggaagagctttcacagcccttacttcattaagacccagagtctttaatttaagctaagctcagcatttctgagcrtgtgctgattttaggaaataaacagttatcgtattgaatcacaacggaaaaaagttaatcgtctcttagttccgtaactcttcagttggctcaagaagaaagtttccatttggtgctaaaaagtcattaccacctctctagcactcactgatctctctttaacaaagagaatttactaacgctgagctttgggggctgtgcccttgtaattgaagtgtaagctttgtctgtgggtctcgtgagttcctcttcctcttgacattagttgattttgcagacatctatttatggaaatactcagagattcaacgtacataccagccgacattgacaggtgaatggctgcaacccagatgtggtttgttatttttattataaatattattaatttttattttattattctttaataatagtaatctttaaaccctacttatgtgttttacatacttttatctgcctgtgggttgtacatgtattatcaaaataaaaaattaattaactggattaaaaagatggtagtgatctcacaatccagccccaggtgcttctcagaagcagaggcgagggccggctggggacactgcagtagtgggctggatgttgcttacttcactgttctcagccaagggcccagcagyggctcctctggggtctccttaaaaggtggctcgctgcccctggcttgccccaggctatgggtcggacgttcctggagtaaagcctgactttatgtattttataaaacacaaataattttcatgagcactggtggttaacatcaactctttggagctttttgtgtttgtttatttaaaatggaagctgtctctcattttcatccaaagagatttcttccctggggcggtcaacaagtcttggcaagtgctagatccctggtttagtttttgccatagcttggctgttactgcaaagaaaagtcctctcactaagccctgtgagtttgcatgcatgcctgtgtgcttctgtgagtgctgtggaccctgtgtgttccaataatggatcctggggctcagtaaacacagtggctaaaaggacatctaygctgatgaaatcgtctctgcctgcagtgtcccatacggtagccactagccatgtgtggcccctgattctgtaacaggaggctagtccaaartgagaggtcctgttaggtgtaaaatacacactagattttgaaggcttaggacaaaaaagtatgtaacgtttcttattagtcacttttatataaattacatattgaaatgttaatattttacataggctggacatgatggctcatgtctataatcctagcacttttggaggccaaggcaggcagactgcttagcctaggagtttgagaccagcctgggtaacatggtgaaacctcatctctactaaaaatattgaatattagccaggcatggtggcacgtgcctatagtcccagctactcagaaggctgaggtgggagaatcacctgaggctgggaagtggaggctgcagtgagccgtgatcgcaccactgcactccagcttgggctatgggagtgagaccatgtctcaatagaaaaaaaaaaaaattagctatatcaggttaaataaaagatattgttagaattaatctcccttgtttcattttattttaaaatgtgactactagcggaaaggcctgaaatgttgtggttctaacttcagggcctttgctctgttgcctctgcctggagtgctttttcttctgagcttagcctacctatttttccttgtcgtttgggtctcagctcaaaggttatctatttcaagaggccctttttatttttatttattcactttcttagagacagggtctcgctctgtcactcaggctagagtggagtgatgtgatcatacttcactgcagcctcaacctcccgggctcaaccaatcctccagctgaggctggagtagctccagagcagctgggacgataagtgcatgccaccatgcccagctaatttttaattttttagaaatggggtttcagtgtgtttcccaggctgatctcaaactgctggactcaagtgatcctcctgccttggcctccagaagtgctgagattacaggcatgagtcactgcgcctggcccaagagtcccctcttgaccacccactcaaaagaagccccctggttactcctaatcccacctctttactgtacttttttcacaacagttcccatggtttgctatgtccttgtttatctgtgtttatttttcttgtatgttatctggtgccccctctagaatggtagctccaggggaacaggaatttccattatctggttaacatmatgtcaacmagacacaatgcttagaataatgcctagaagaagaggagcttmagcmatgtttgttggatggagggatgggtgggtggcgaggtggatgggtggatgactggatgtgttgggaatgactaaattttattttttggccattttcataatagtgatatttctttttctcttccttaggtcttgaaaggggactataaaacaccagccaatctgaaaggatattttcaggttagaaaccccaaggggaattccgaattctgtctttctcagctataccaccatctggctgtatgcccttagatgtgtcacttctccactctggttgatggttttcccattataaaaagggggatgtgagctggctgcctgtaatcccagcactttgggaggccaaggcaggcagatcacgaggtcaggagttcaagaccagcctgaccaaaacrgtgaaaccccgtctctactaaaaatacaaaaattatccgggcgtagtggcacacacctgtaatcccagctacttgggaggctgaggcaggagaatcgcttgaccctgggaggcagaggtcgcagtgagctgagatcacgccgttgcactgtagcccgagcgacagagcgagactccatctcaaaaaataaaaataaaaaataaagggctgtggggatgcgtgctggaccagagggtctctaagcactgatccagctggggccacatctcagtggcccttctgccaggaagcagcctctcacttcgtcttccggcttgaatgcagttggagggacttcgtggggactttttcttgggctttctttcttgttgagactggagtgcagtggtgtgatcatggctcactgcagcctcaatctcctgggctcaagcaatcctctcacctcagcccctcaagaagctgagactacagacacacaccatcatgcccggctaatttttgtgttttttgtagagacagggttttggcatgttgtccaagcttgagttgtattatttataataaacaggtagcagttagtaaagtgttttccctagtgtcttgtgagctgttctagtgaattatcaaaccagagtgggggttgtgggaacctccagatttgaagttggctgggaagaagtgtggatagcctgcgcaccccattgcagctggcatctaaagtggggcagtcgtggaactgggcccttaatctgtggcagctgatgctaagtaagtctgggagctggtgtcagaactgaactgaattgttgaacacccagttggtatccagataatcagagaattggtcactgatattggaaagcacccataagccaatatctgaaggattaaaactaggtctgccacacaaagatctggatagaaaaggcttcccggcagagggaactgtaaacgcctgaaagtggggagtgtggccgaaacctctggagtgcgtatgcacttttgcattcgttgcaattatatttttctttgtttctaccccaatgtgatttacaggaatgttcattgcaattttcatgttcaaactgccttgttttgctttcttaatattttcctatcttttgagtttcaccggcaccattttggatggctacgtagtgttctgtggaatgcatgtgctaccatttactaaacagcttcttcaagaccatttccagtttttacracatccagaatgacattatgtgcacagtggaggacagtagggagatgagggttggaaatagaggcttgacaaaacttatctgcagggcagccctcctgagcgtgggggtatgccattccttcatattttgttcctaaaagcaacaaaaaccagtcccaggtcagctagacatcttgcatatgtcatacacggcaggaagtataaactggcccaacccttttgtttttgtttttgtttttgtttttgagatggagttttcctcttgttgcccaggctggagtgcaatgcggtgatctcggctcactgcggcttctgcctcccaggttcaagcaattctcctgcctcagcctctcaagtagctgggattacaggcaccggccaccacgcctggctaatttttgtatttttagtagaaaggggtttcgccatgttggccaggctggtctcgaactcctgacctcaagtgatccacccacctcggcctcccaaaatgctgggattacaggcgtgagccactgctcctgaccccaacccttttgtaaaacacttttagccttgttgttcaagagtcttcaaaagatctgaacccttccacctgctcctgctgattcctttttttttttgagatggggtttcactgtgtcacccaggctggagtgcagtggcgccatctcagcccactgcaacctccacctcccgggttcaagcatgattccattttttagaagtgaattctaagggaatgattcagtagagcttcagtacccaacagaagagaggcagaatcaggatgtgatgtcatttaaaatactgcaaaaattggaaccattcttaggtaagcagtcagtaaacggtggtacatgcactccacagaatatctgtagccatccaaaatggtgctagtgaaacccaaatgatgaaaaaatagtaagaaagcaaaacaaagcagctcatactatacaattgcaactaatgtaaaaatgcatattcaggtggacaaaaaaaggcaacacgcaggagttgggtgcagtggcatgcctgcagtcccaggttctcaggaggctgaggygggaggatcgctggagcccctgtctcttaaaaacaacagcagcaacaacaacaacaaaaacgaaggcaacgtgcaaaaatgagaagtttcagtttgtggataatyctcctcatccccactgtgttgttctgcctacatcatctttttggttaaaacaaatactaaattagtgctcactaattctggctactttcttgacgtcagcaaaagatagatctctgattcccacaaagggagtgggacctctccccaaacaaccaggaaatgctcaaaagccatggtccctagctctcagatcgcattaattttttttttttwaattcaaggccaacacagtgagaccccatctccctacaaaaaagagaaagcsttagctgggtatggcacatgtggcacatgttcgtgccactgcactctggcctgggtggcagagtgagaccctgtctcataaaaaagaatacaactcaggtacagtcaaatgcaagaagcgtagggtgaggtatgggggatgggtcacagaacatccatgccctttcccggcatgacaccctcccagcctctcaatgtgtttaccaaccaggaagctttccaaattctgtcatttagagatttcatcatagaggcatgactgattaaatcatgggtcatgggygattgcccaatctccagctcctagcccctagaccctctcccctctcccctcccaggaggtcagggaggggagaaggcaggtggggcttaaagttccaaccttctggctgggtgtggtggctcatgcctgtaatcctagcactttgggaggctgaggcaggcagatcacttgaggtcagcagttcaaaaccagccgggccaacatggtgaaaccctgtctctactaaaaatacaaaaaatattagccattcgtggtggcacacgtctgtagtcccagctacttggaaggctgaggcaggagaattgcttgagctcaggacgcggaggttgcagtgaaccaagattgcaccaccgcactccatccagcctgggcaacacagtgagactccgtctcaaacaacaaaaaaagttccaaccctctaatcatgccttggtctttctgagaccccttcccctaatcctgaagctatctagggacccccagccattagtcatgtcattagcaygcaaaagatacgttttgttttttttttgtttttgtttttgtttttttgatacctagtctccctctgtcacccaggctggagtgcagtggcatgatcttggctcactgcaacctctgcctcccgggttcaagcgattctcctgcctcagcctcctgagtagctaggattacaggtgcccgccaccacacccggctaatttttgtattttagtagagacagagttttgccatgttggccaggctggtctcaaactcctgacctcaggtgatccaccctcctcggcctcccaaagcgctgggattacagccatgagccatggcgcccggccaagatacccttattccttcagagattccaagagtttggggagctatgtgccaggaactggggacaatgaacaaatatttattattataccacagctgaaatgccatcttgtagagtcctttcctggccaccrtttttgaagtagcacagatactgatcactcatagcagcctgtcatattgcccaagtttgacattttcttgcatctgtgygtgttcagtaggctttttcttcaactcgaacgtaagttccgtgatcctaggtttgggtctgtcccgctcaccacgctatcccagcacctggcacatagtagatgtacagtaaatactacrtgaataagcatgtgcatgactcartgatgctgaggggtgaccctcaatacagcaaggcatccctcacctggccgtgaccccttcttctgtgtattgtctttctccaggtgaaccagaacagcacctcctcccacttaggaagctcgtgatttccaggtaagcctgtggacttcactgggggttcccnctgcttctgsgtggccccggagccacttttctgaaaagccacttttctgtccttccagagcctccctggggtagacatgtccactagggtgggctgacccagccccatcagaggtttccatggtgacagactrggggtgctatttatagaatcaaggcttagttttctagctctggatcaaggacagggagagggattaacgctgaaccaaccagaaaaaggtttgtctgacactggggacngggcaggaagcaccactatgatgggggagggggagattctggaaccatttttgcacagaatgctgtctgccagtctggcttctaaaaacagcatcagcgttgggccagagcaattaatgttctaataacagtcacaagtcgttctgttctaagaataacccccatggccgttgggccaggtactggtcctgtgttactcatttaaccctcagcatccttgggaggcggatgacatgatcattccattttacagaagagaaaaccaaagcacagagaaggaagggctttgacttgcccaaggctacacagccaccaagggacagaattcctcccaggtttgcttttagtgaatgattttaagtgcacatttatccatccatattctactaaggggtcsggaaagggattttttgaacttggtaattcaaagatttaagatctccaggtttaactcccttcagcccctgttttcttcatctggagaatgggsattcatcattgcccacctctgaggttggccatgagatggcgtgagctggcccaggtgggagtgcttggaaaccgtgaagtgctgggccctcgctgtggacttgggcactggagttaaggctgcatgagtgagctcacttccttctgtcccccagcctctatgatcaggttaaaggaaacctcaagagaggttattttacatggaaacaccttccagcttggactcttatttttagtctctgtatctatttttaaacaatcrgcatatgttttagtttttctttcaatttactttgctccaacctgcaaggactctgtcattattagggttcccatcttgagttgcactaagatcccagagtttttgtttttgagacagagtctcaccctgttccccaggctggagtgcagtggcacgatctcagctcacagcaatctccaccttctggggttcaagtgactctcgtgcctcagccttccaagtagctggggttacaagtgtgcgctaccacacccagctaatttttgtatttttagtagagacggggtttcaccatgttggccaggctggtctcaaactcctggcctcaagtgatctgcccacctcagcctcccaaagtgctgggattacaggcatgagccaccacacctacccaagatcccatagttctattccaaagaaaagaaccctctcatgaaaaacagctttcctccctgttcctyactaactgttccctcgctgcctttctgcagatcattagtagaatcctggaccttctcattgacaaaagcagatttgttacttgttttactgtttaaatgagataccatatagaggtgctttagctgaatcctgggtacagagttggccktgaacaaacatgagtccttctcttgcctccaagaattcatcagtatttatcacataatcactgtcatttgctctgtgtccataaraaaagtgtatatttgaggtcaagtggatgcaagatgagatgtggggaagaacccaggaaacgtttttaaatttaaactctctctggccatctgggatgcattcttaaaacattacatgcttatgcgaatggatgaagacagtatgttctgcaatcacatgtataaatataaatgatctatttcagaattgttactctgagcctaacacagtcttccccactttcagatctccrcaaatgacttcattgccaagaagagaagaaaatgcatttaagtggaaatcggacctctaatccaagcatattgcttgctattaatcgccaaaacaggactgctgatgaggaatgtatttgcatatgtttgcaaaagctgaatcattgaaaacgtaccttgaaactctctatctctggacactccagggtagagaatgaagggtatggaagtagtccggcttttgaaacttaggtattttatatttttcccctcaagaacttttttttaagagacagatttgccatcctccttaatttgcaggactgccttggtggctttgtttgctgggacaaggcccacaacctgtgcctctcctattgacccttactttgaattcaaagaatctatttaagagtttaatatatgaggctttctttgattcctcctcagttctacctagtttcacagaggaaaaaaatactctttgaataaagtgaacagaggctcatttgtttgtgcctyactttactgaatgaatagggttttttttttctttccatactggattttgtcaggtagatttgtgatgagcaaaaagctggagaatataggtgcatgtaaggcacagctgaattcctgtgtcagggtccccagggccacccccaggatcgatgattggctagaagaactcagaattcagaagagctattatccttatggttatggtttattacagcaaaaggataaacattaaaatcagcaaaagaggccgggtggagtggctcacgcctgtaatcccagcactttgggaggccaaggcaggcagatcgcctgaggtcaggagttcgagaccagcctggccaacatggtgaaaccccgtctctactaaaaatacaaaaattacctgggcgtggtggtgtgcacctgtaatcccagctactcaggaggcttgaacctgggaggcggaggttgcagtgagcggagatcgtgccattatactccagcctgggtgacagagcaagactccatctcaaaataaaatcaacaaaagaaaaaggtgcatagggcagagtccgggagagaccggcctcaagcttccagttgtcatctcctggtagagtcttacagacacacttaattttcccagcaatgatatgtgacaacacgtactaaatattaccagccagaaagctcaccctagccttggggtctaggtttttattgcatgtcagtcacatagggcaatcacatgaccgactttagttacttaatcaccagctgctccagaggtcaaaatgatacagcatggcccaaggtccccaccataaatcacattattagcacaaactatctggcctggtatggcccaaggcctgaggtatacaaagacacccctacttgggaggatattccaaggacttagaggttatctcccaggagcccattaaggccagttttttctttgagatgtgctgggtttggacacttcaagcctgctgagttaacccttatagcacagtccccaaatgctgagggaccaactgggcctacaataagtttgtatctttaagggttaaggtgttttacccatacctccttgccttatatctcatgataatatgaggcttttggaaggcagtgacttattgtggcttggggcatgggtttttggagtcaggctgacctactggctgtatggcttgagactttgtctcttcatctgtaaaatggggaagttaaaacttcatggtgtgtatgtgtgtatgtgtgtgtttagacagaatctcgctctgtcactcaggctagagtacagtggcgtgatcatagctcactgcagcctcggtctcctagggtcaggtgatcctcccatcttagcctcctgagtagctgggcatgtgccaccacacctggctactttttaaatttttttttttctgtagagacgaggtctttctatgctgttcaggctgaacttcrtgggtttattggggatggctaatggatgacattggcggtggtccttgataccagataagccctcagtgtgaagcagctcttatttttccttgtcttgagattgctctggaatggaaattaggcttttttgaaggtgtgaccctttttgttcatttcttcagcagttactttttattttttaaatgtttgacacacagtctctgataaatgatcattcaccartcaccgattactctccttgctctgttaagtgtgacactgtccctttgagaatctggcgacagctatgtatcccatcaccacacaccccaaaaaaaaaatttatgtctggttccaggagttaccttttatgagaagtccatctgtgaagaccctggatgttcagagaacttcctgggaaaacactgaaagaaaataaagaggccgggcccggtggctcatgcttgtaatcccagcactttgggaggctgaggtgggcagataagctgaggtcaggagttccagaccagcctggccaacgtggcgaaaccccatctactaaaaatacaaaaattagctgggcgtcgtggcgcatgcctgtagttgcagctacttgggaggctgaggcaggagaattgcttgaacccaggaggcagaggttgcagtgaaccaagatcrtgctagtacactccagcctgggcaacagagtgagactccatctcaaaaataaaataaataaaacaaaataaaataaatacaatttctgtttctagcccctaagtggtagcactgggtcttgttccctgaaaaaaactaggctcagaatccactctcatttcatctcccctgatttgatctgaaaagattttgtttagagtactacatgaatatattataaaacatgggacaatcagaattgatagtaagaaggcaagtggctctatttgtacttcctctcaatagctcctaaaggtaatgctaccattttctgtttgtacatagtcttccagactttaaatttttgaacatataaatattatcatcttaaagacgtatggaaaaaaccattttgaataggttattccaaaatgtaatttaacagattgctctggaggattgtttgtttgtttgttttggagacagagtcccgcttggttgctcaggctgcagtgcagtggcacaaacacagctcactgcaacctctaactcctgcaaacacagctcactgcaacctctaactcctgcaaacacagctcactgcaacctctaactcctgcaaacacagctcactgcaacctctaactcctgcaaacacagctcactgcaacctctaactcctgggctcaagcagtcctttcacctcagcctcctgagtagctggaccatgacacctacctaactttttattttttgtaaagaggggaatcactrtgttgcccaggctggtctcaaactcctgggctcaagcaatccttcctcagcctctcaaagagttgggtttacaggcgtgagccaccgcacctggctcctggagcatttctgatgtgaacatgtgctgatctaacaccactccttttaccagctgcctgttctagagcaaaccatcttttttgagcattccactttggctaggcccttaggctgttagcagttttcatcgctactggcaaagctgcagtggacgttctcctgcacatataacctcttgatgccactgtatgagtgagtctctgcaaaatgagaagtagaattgctggggtgaaaggcatacatactaacttttttgattaattccacccatgtaccctgatttgggcagaattttaatctcactgtgaaatcagagctttgttctagagcctttcttgggggttccatggatcagtgggtcagccgtcacttgtgccctggcccatcctctgtccagcttgggcagcatgcatcattcattctgattccttaatttgccatatgtgaaaacatggtaatctatacattacttgggtgctattattatatataactagctttggagtcagaattagcgtctcatcctggctctaccactttccaactgtgcgactgtgccaagtgactccccttctctgagcctcagttttcctcttctgtaaaatgggggtaaagggataagaactatagggggatctcaggggatggttaagagaaatccatgagataagcaaacacattatctagtttagtaaagctaagcaatgaagacttaacagccccatggtgaaggcttaatacatggtagctataatgattactattaatattgtgaaataaaaggttgtgatgaaccaaccatatcttctcatcaggatgtatgtttgtccaactgatagccatttgtagtcatgatctggggttggagaagggtcttctgcacatgtgccagatggactgaatatagatcttcactctcgttagcagccaccaacctggttgagccatcagggcctccaaagggcttggcaatttttcattgaaaacaaaaaacaaaaacaaaaaaactcttaaactatgtctacccaaagaataaatcctctacccttccagggtaagggatggacagctgatggaattacagacccaggaagctcatggttgccagtcattgggtagcagaggacatccagtctcattcattgttccactcatctcttgcggcccaaccaagcagccccaaactgagtgacttaaaacaacttgtttttttgtttgtttgtatgtttttttgagagcgtttcactcttgtcgcccaggctggagtgcaatggtgtgatcttggctcactgcaacctccgcctcctgggttcaagcaattctcctgcctcagcctccagagtagctgggattacaggcacccgccaccacacctggctaatttttgtatttttagtaaagatggggtttcatcatgttggccaggctggtctcgaactcctgacctcaggtgattcacctgccttggcctcccaaagtgctggcattacatgcgtgagccaccgcgcctggccacaacttgttaaatctctcagttctagccaggtgcagtggctagaactgtaatcccggtggcctgtaatcccagtaagttgggaggccaaggcaggaggatcacttgagcccagaaattcaagaccagcctgcgcaacatggtgaaaccctggtctctagaaaaaaaagaaaaaaaaaaaaaggcacggtggcatgtgcctgtagtcccagctactggggaggctgaggtagaatcacttgagcctcggaagtggaggttgcagtgagctgtgattacaccactgcagtccagcccgggggacagagtgaaaccctgtctgaaaaaaaaaaaaaaaaaaaccgctcagttttgggaattaactagagtgagctggtggttctctagtcagatggcagctgaagatttcttcattcatttgtctggtacctcggctgggatggttggagcatctagaggcttagtggggtacctcttatgcatgtagtctctccgcatggctagactgggcttcttcaggacgtggccatctcagggtggttaaacttcatacatggtgttggcttccccctgaacaaatgtcacaagagtccaggagttcgagaccagcctgggcaaaataatgagaccttgtctctacaaaaagtttaaaaaattagctcgagctgggtgtggtggctcatgcctataatcccagcactttgggaggctgaggcgggcggatcacctgaggtcaggagtttgagatcagcctggccaacatggtaaaaacccgtctctactaaaaatacaaaaaaaaaaaaaaaattagcgggaagctgggtgtggtggcttacacctgtaatcgcagcactttgggagaccaaggcgggtggatcatcttgaggtcaggagttcaggaccagcctggccaacatggtgaaatctcctctctactaaaaatacaaaaaaattagctgggtggtagtggcgcacgcctgtaatcccagctactcaggaggctgagacaggagaatcgcttgagcctgggaggcagaggttgtggtggtgagccaagattgaggcattgcactccaatctgggtgacagagtgagaccctgtctcaaaagaaaacaaaacaaaaaaattagccgggcgtggtggctcacgcctgtatcccagctattcaggaggctgaggcaggagaatcacttgagcctgagaggcaaaggttgcagtgagccgagatggtgccactgctctccggcctgggcgacagagtgagactccgtctcaaaaaaatatattagctgggcatggtggcaagcacctgtagtcccagctacttgggtggctgaggtgggaggaccacttaagcccagcaggacaaggctgcagtgagccttgactgtgccactgcctgcactccagcctgggttgacagagcgagaccctgtctcaaaaaacaaaaaacaaaccacaacaacaacagaaaacccatcaacaattggccacagttatccttaaaaaacaattgatcagcctcaattgtgggtcagcaaatggctttcagatctctgggatacaccaatgtcaccagaatattccctttcttcattttggggtagaaaatgaaaacatttctttcgtctactatttaaattaagaggctaggtcaccaaaaaacccaggcttctttgagggtttccccagcctgttccttgggaccagagacaactggtcctaccaatggaagtgttccaggcctctccggaccccacatctgggcccagaaccagaaagacacctcttacccctgtcctcaaagttggcctcattctgtgttctaaacccacactgctcaggataattaacaataagcattccattcctgctgggcatggtggctcacacctgtaatgccagcactttgggagacctaggtgggcggatcacctgaggtagggagttcaagaacagcctgaccaacatggagaaaccccatctctgctaaaaacacaaaattagctggccatggtggcccatgcctgtaatcccagctactcgggaggctgaggcaggagaatggcttgaacccgggaagtggaggttgcagtgagccgagattgtaccattgcactccagcctgggcaacgagagcgaaactccatctcaaaaaaaaaaagaattctttttcttcagacagaatccctggctccaccacatcaggccctcctccagtcctttcatgaatttggatttttttttttttttttttttttgatactgagtcttgctctatcatggctggagtgcggtggcgagatctcgggtcactgcaaccgccgcctcctggattcaagcaacttaccagtctcagccccccaaggagctgggactacaggcacatgccatgacgcccagttaatttttgtatttttggtagagatggggttttgccatattggtcaggctggtcttgaactcctgaccgcaggtgatccacccacctcggcctcccaaagtgctgggattacaggcatgagccaccgcaccccgccaagtctggattattttgatctaaccttgtttccatttccaaacaacagctgcttttttttaaatgggttgtttattaactttttattttgaaataattgtagactcatgtgaagtggaaaaagtggtgcaaagggttccatgtgtccttcacctggcttcccccaatgctgatatctgatgcaactgtagtgcaatagcaaaaccaggaaattagcattagtaaaaactgttaactggactacagaccttattcagttttcgccatgtttatgtgcattcatttgtgtgtgcttacggattttgctaagattcaaaaccttgcatttcagggttttatttccttgttttagcaacagatccctccatatactccttatacgcccatagagacaaatcaaatcacatgtaaaaactcaaatctataaagcaaaagtgggctaggtgaggtgtctcacgcctataatcccaacactttgggaggccaaggtggatcacttgaagccaggagttcaagaccagcctgggcaacatagtgagccctcatcgctacagaaagatcttaaaaaattagctgagtttggctactgcagcctgtagtccaagctactcgaaaggctgaggcaggaggattacttgagcccaggaggttgaggctgcagtgagctatgattatgccactgcactccagcctgggagacagagcaagaccctgtctcaaaaaaaaaaaaaaaaaaaaaaaaaagtggctattttgatgaggaccccatcactgtcccaagcatcagctatttctctctgaagcacttttataatcgttaaggttttgtatttattttcctgctgggttgattcaagttgattttattcaacaggctacaaactgcatgagaacaggaatcattatttttcattgtttaccatttatccccatagtctaccatgcccagcatgttaaggttgtagaagccagcttccaagatggcccccagtgaacctggcctcctggtattcacacccactttggcatgtttttcctttgtgcactgaatagggttagggttccatacaggatggtggttaaatttgaatttcagataattttttagtatttcgcaatattttacgagacatacatatactattattcattgttttatctaaacttcaagtttaattgggcatcctgtatttttatttactacatctggcaaccctatatagggctgaatgtgtaaccaataagatattgcaaaaatgggccaggcgcagccgggcacggtggctcacccctgcaatcccagcactttgggaggccgaggcgggtccatcacgaggtcaagagatcaagaccatcctggccaacatggtgaaacccccatctctactaaaaatataaaaattagctgggcatggtgacgcacacctgtagtcccagctactcgggaggctgaggcagaagaattgcttgaacctgggaggtggaggttgcagtgagctgagattgtgcctctgcactccagcccggtgacagagcgagactccatctcaataaataaataaataaataaaaataaaaaataaagaaaataaaaaaatgggccaggcgtggtgccccatgcctgtaatcccagcactttgggaggctgaggcaggtggattgcctgaggtcaggagttcaagaccagcctgaccaatatggtgaaaccccgtctctaataaaaatacaaaaattagccgggtgtggtggcatgcgcctgtagtcccacctactcaggaggctgagacaggagaattgcctgaacctgggaggcagaagttgcagtgagccgagatcacgccactgtactacagcctaggtgacagagcaaaactcagtctcaaaaaaaaaaaaaaaaaaagatattgcagaaatgacagtgtgactccaagactaggccataaaagaccttgtggcttctgccttgctctctcttgctttgctcattttgagggaagctagccactatgtcataacgacacttggtaaccatgtgtagaggctcacatggcaaga

SEQ ID NO: 96052 - DNA, 18415 bp, Homo sapiens
tgggttttgtttttttatccaatctgagaatggctgagttgccatttttcaatgaactgctgtttcttctcatggaagagaaatatttttcaggttagtatctccactgaaatagaaagataaaatgtagataagcagtttgtgagtttaaagacaaatgtattagaccatttttgcattgcgatacagaaatacttgaagctgggtaattaataaagaaaagaggtttaattggttcatctttttgcaggctgtacaggaagcatggtgctggcatctgcttggcttctggtgaggtctcagggaacttttggcagaaatgaaagtaggagcaacatgtcacatgatgagaggaagagagagataggtgaggggtcacacacttttaaataaccagatcttgcatgaactcactcatcaccaagggaattgtgctaagccattcatgagggattcaccctcatgatccaaacacctcccaccagacccacctccaacactggggatgacattgcaacatgagatttggagggaacaaatatccaaatcacatcaacaaataagagatctatatccagccaactttactcattatgtgacctgtatggcctccaaaggcactgagtttttaattcctgtggtagtaaatttgagattttctagctttgagggaaagaatgtaaaaaggagatgatagtttcagcctatgcatagtcattttcttatagaaattgctgttctctctctgaaaatacatttttaaagaggttgcaaatctatacttgtgtttaaatgatgaatatattcacgaatgaaaagataacttcattttggtcactagtgcccaaccagaggaatgttctgatctattaaaacttgtcttcctaagtgaaatcacgtagttgagtcagtagttagattccatcttttctgcaatggcttggccaatgagctataaattcctgctttggtgtaacagtttgggggagaatggccagtatgataagtttcttctgctaaagtggacagaagttgggagagatattctaaaagttcatgccttggtcccaggctaaggctgccaacagctcgtacaggttgagtatcccttacccaaaatgcttgggaccagaattgtttcggattttggattttttcagatttggggatattttcacatacataatgagatatcttgggaatggaacacaagtctaaatgtgaaatttatttgtgctttgtgtatatttaaaacacatagcatgaagctaattttatacaatttaaaaaataattttgtgcatgaaacaaagtttatatacattgaaccatcagaaagcaaaggtgtcattgtctcatgttggtgctcaaaaaattttagattttggagcttttaaatggaaggatgctaaatctgtagtacatccccactgtgcagaggatgtcttaagactcaaccgcattccctctgttttctctagaagggcaagatggagtctgcacagctgggccatgacccaggaacactatgaggaggtgggctgctttgtatgattgctccaatattctgtgaagtgaaattcaaaatatactactacagctataacacagaatcttctaatcttccagatgctggttctcctgtagctgctcctctttaggtgaccctggtgagtgatggtggtttggggactatgatggaagctatgacccacttcatttaaaatcatccctgaagattggccagaaccattctggattcatttctgagtgagacacatggcggctgccctattttcttccctaggccttggatctgaggcctctttttgaatcctgccagcctgtcagcatttagaattcctaattatttttctaaaataaactctgagtcaagaggatctctcttccctctacatttccttctaacatcaattttctaaaattccaagagtagtctgtctcacctctgtcctcagattctgttttctacatgtggcaatggcaatgtctgtgcattttacacagctccttggagaacttccgcccatcttttctattagtttgttcattctgggagtatggaggaaaggggctgggccaagctggctttcagagtggggagagtacttctttctcatggtgaaattgcagggtgtgtgtgtgacggggtaagcagggggacaggtgaagagatggtcaatggagccttggaactggtgagattgaaggtcagcagcctgaaggcttcaaattcttcctctacatctaatggggatgacactggaataatcaattagatcttggtttccacctgcaaaataagagtatgacactgggaagattctgtggtcccttgcacatatgtctctccaaatagactatgagccccttgaattaaggctgtgatttccatatcttcatagtcatggtgcccagtatagggtctgacacataattgcatcagctaggcataaatttggctgctagtaacagaaacccactaatagtagaatgtgttgaggctgattttcttctattacaagaagattagagctgtgcaggtgttggttaaggtgttcagtgaggtctttgaggaccaaggttctttccatctttcccttttaccatcctgggcatgttggccttatgttctcattcttgtcattgcatggatccaaagtagctaccatgttgccagacatcacacccacattttaggcaaaggaaagggaaaaacactagccatttctgccttttataaagaaagaaaaagcttttcccaaaggcacatcaggttatgtctcatggactatgtgctgggtcacatgaccaatgccagatgaaagggattctgggaaagcaaatgtcaagctttttggcttcttgggaaggagagagtaagaactggggcacatatggctgttgagcccactgaatgtttggtaaataaatataattagaaaataagctggaaaagtctcctttttttcccccaagtagagtgtaccatgacattattttgaggaaataagcattaaattggatttgcttttaagttatgacactgctcttttattattattattatcggcatccctgggtgtgcctgagccaggctatcttgtttccctctggcaaaccagaattggcccaagttttctcacaggcatggggcagggagtagaactggagggagagtcagagttcatgaagaactcagtgtggagggatttaactctggtgttttcctaagtgaatattttacacacactcaccttcggatcaggaaaggcatttcttctgtattctgctattggttattctcttcatgtggcctcatgtgtaattagttgaaaaattactggttcttactggtgttcattaccttctccttcatacacattgtgccaacatttaaagaggagggttgacatgtcgacagtgaaagcaaacgtgccagaatggggcatagaacagcatgcaatstcccctcttcactgaggaacagcactaataatacaaatgaagaggtgcacatgaagggtgmccattcctggtacagcagaggctcttagtaaatattagacgtgattattttctttcctttatttgagacagggttttgctctgtcacccaggctggagcgcagtggtacaatcatagcttacggccacctcaacctcctgagctcaagctatcctcccacctcagcctcctcagtagtttggaccacaagcatgtgccaccacacctggttgattttttaaaatgttttgtagagatgggggtctcgcatggtgcctaggctggtcttgcctcaagtaatcttcctgcttcagcctcccaaattgctgcgattgcaggtgtgagccactgtgtctggcccattattttattcctattcataataagaatgatgcttcttttcttcctgcgcaccctgccagtgaggatccactttttcctgttaaccagatgtttctagataaaattataagattcaagattgtactatgcagttccctggttttactttaattccccagggggcttctgggagaaccctgggcaggcgaaacatactgttagtttttcagatgtgtttgaagtaatctggttgggtaaatagtgatcacacaaaacctggctttctagggaggttaacctgaaaccttaattgttttcaaaaattttctcagggtaaccactctatttcctggtggaatttaagtctatcagttttctgtacacatgaaaaggaagctatttacaactggcattcctgtacgaaatgtacaaagttctctagcagagagctcttccacgtgggaagagtgcttttcaacgcacttcctaaaactggtgcttgacaatgctcatttgactttccagtgtattatacattaacaaatgtgaaaagaataagaggtcaattgttcaatgtctcgcttgcatggcagtcactgatgttacagagatcactgtgaaatgtgaactcctctgactcctctgttacttgtttctaactttgttttcatcttctcattaggttaggtggtagtaaagcataatgattaagaatccaagcttaggaatcaaagtcctagggttgaatcttgactttgccattttctacctctccaacctggggtccattaccttttcttactggactttattttcttataaacaaagttgccaaattaatatccaccccacaaaaagtattgcaagcattaaatacgatactatatgagaaagtgcttcataaagtgttcagctgcaacttcagaaaactcaacctaaacaccttaagcaaaatgagaatgtatcgactcatataatgaaaatagagcatctgaacccatgccagtgggttcagatttcactctaccatttttttttttttagagacagggtcttgctacattgcccaggctggagtgcggtggctattcacagaagtgatcatagcacactatagccttgaattcctgggctcaagcaaccttcctgccttagccttcctagtagctgggactacacatgcgtataccactgcactgagctctcactctacttttattccacagccttctgcattggccttatcctcagacagcttctcccttagtggagcatgatggctgcaataactccagccttttttctccagtttcaagtccagtaagaaagagaggatgcatctctttcaacagtcccagtgaaaagtggcattgcatctcattggctctgaaggtggatcatccctgaaccagtgcaatagtacgatttatcatacctaagccacaagctacctctggagcaggagatgaagtcaacaccacctgctggactgaaagtatagtggtttctcagaaaggaaattgggatgttgttaccaaaggaagagggaatgaatgttgccatggtggggaggttgggggcggtggcgagaaaaaggcagatttcctctagaatgccatcaaaatgaaagtaaatctaggctttagcacaagtcctagaataccagaacggagacgtgctttcttggaccttaaacgaaataaaattaggccaagtgaagcaagtgccatttaaaatagtagctatgaatgtatataattaggatttcaagaactgaatgaaaatataaatgttttaaaaatgggaagaaagattcacaataaggaactagactgttgcagggtgggggtggggtggtgggtggcatggggaactctgaaaactcattagttgaggataactacgcctaccaacagaatgcagaggtgcaagactgagctactggtgcctgagttctcagcgggccagaaggaaggacggtagggtggaagggctggagtctcagttctgggaagtctccctcttatctcgcagaatgcctgtccctggataaagatcattagtttgagtttttccaagatgattctaggaagctcctgctggtaactaagtcacccatcctggggtgggatccagagatttagattttttataagctttcctgccaccgaaacgggtgtttgggacctcacgaggccctgttcattcttcgtcgctgcgctccccactctgtactggatgcatttactgacgttgttgtctccgtccccagagtatgaacccccaaggtgactcatgcagctgtgggtgcccggcatacagcatggtgactggaatggatgagcacccaataaacatttgttgcaggaatgcaggaggaygggcaggccagcaagcaggctgcctggtttttcccacatgggcttttctgggaaagaagagcttctatttttggaaagggctgctatgattgagaaaagttcatggcagcaaaaaaaggacagacgtcgggagggaaacactcctagttctcccagacaacacattttttaaaaagactccttcatctctttaataataacggtaacgacaatgacaatgatgattacttatgagtgcggctagtgccagccactgtgttktcactgggcgagtaatgatctcattggatcttcacggtgggcgtgcggggtggacagcctcacacccccattttacagatgatgaaaaggaggtgcagggagtggtgcakctgcttcaggcgtacacagataggaagtgacaaggctgggactctgcagcctgagtgtgtcatcacgacccacccgctgctctgctctcataggtatgacagcacagctctggagcaaatgccaygcacatttgcaaggtgcccatttccatgcagcaaaaataagtcaataagttattgacttasagaaaagcaaagggcctctcaataaagaggtcattgtacacctctccaaacaggcgattttctttctcatttttattcccctgctgtgtgctgaaggtcactggctacaagccggtgaagtcgcggaatggaatccttggcccgaaaacccaaaaatgggaggggcagaggaggtggggacagagcgggaggaggtggaggcgaagcaattctacaacccggggaggtctggcctgcttttcctccctgaactggcccaatgactggctccctcacgctgaccactcctctgggctggcctcctgcactcgcgctaacagcccaggctccagggacagcctgcgttcctgggctggctgggtgcagctctcttttcaggagagaaagctctcttggaggagctggaaaggtgggtgctaagttgaggttcattttgttcttctcggagtgtgcttattgagtctgaagctgggttggggcaacgggcctcttcttgggaacaaattggatcatcttcttgggaaggaaatgtactttccctggctgctctgaggggttagtggggaggtggagtgagcggggaggaaggcaaggagrggaggaagaaaccgttcctcctgtggatctgcaaagaccagtccaagaggattttagtgttaggaaaaggaatctggagtgacgagaaagggggcctttctagatgttgcatggctttggtgtcgggagccacttatgggacagcaggtactctaaaaagccacctccttaggaaagcagagaggccctggccagctcaggctcccagcaagagctccttctaggagacagctgagggatgaaacacacccaaggctcaagaggggcaggttcttcccagatacagacccaggaaggagataaaggcttggtgcctctatttggttcaggataagggcccctgtcctctttctctgataacactgtcctctttctctgataacaccgtcctcccttccagatccacgtacaaaggaggcccttaaaaaggcacttggtcattcacagctcaaactgagcaagaggctgtgggagaagaatcaagttggtcccgaggggaagaggtgtcaaaggcttaagaaacaagaagtcagagtttacctgggtttgagggagaattttctttcccccttttcctcctcctcctccttcttctcttttttttttttttttttttttttttttgagacatggtctcattctgtcacccagcacccaggctggaatgtagtggcacgatcactatcacggctcactacagcctctacctcccgggctcaagygatcctcctacctcarcctcctgagtaactgggactacaggcacatgccaccacacccagctattttttttttttttttttgctagagatgggggtctctaccaggttggtctcatactcttgtactcaaatgattctcctgtctcatcctcccaaaggggtgggattacaggcataagccaccatgcctggctcttcttttggtttcagagaaaaacatctccttaaaatgtttatttcccaaggattcttgaaaaagaaagctcactgacacacccaaaacaatctggttttgctctgtgcttttagggagaactttctaagcagcagagcccttctgagtggcagggctgtcttaggaggaaggtgtctttgatgatggggaacttcatgtccaggtctggcaggagagttaccccactttcctgcctactccctggggctttggggtagtagtaccacattgggccatgtcatttaggtgagtccttcaacatcactttctctgcttctccctctttctggatcctccttcttggagcctttcaaggggacctcctctcacagtgtccatagcatctcttagctaatggtccttaaaatctctaccagcagcttctctctgatagctaagagctgccatttactgggaactttctatgtactgggctctgtgctaagtgccctagatgagagatgtgcagtgtggtgcctaaaccttgggcttggagcagacacacactttcaaatcctgccttcagctccttagtgaacatgtcaccttgggcgggacacacgcctctctgtgcctcagtttcctacactttagaatggggataacactgaataatgttcttgtgaggatgcagggaattaacccacgcacagtacttataatagtgtctggcgcctgtgttcgataagttttagcaattctaatcatctcttttaagcctcgcagcaagcctctaaggtaagtctgtattagtatccctatttacagatgagaaaactgaggttcacaggggatgagacagtgtacagtctgcagtccagcaattactctgctactcagcaataaaaatagtaacagctaacccttagactaagtggcagagtcaggctttagattcatgaggtgagttctggaatccatccctttaataaccacactaaattgcctttctgaaatggttatataaagcatatctacccaatcttggagttttttaaatggcacctagtttggtgctggaaatgcagttgaccttcaaagcaattctttggaggcagcatcaatccctctggaaatacctcggtggcatggctggccttattctacaggtaaggaacttgaagctaagcatcagtaaccccgtgaagtcacagttagtataggttggaattgggattcaaatctgtacctgactttataattcctagctgggccccagaatctttgatagaggtgtcttctttcttttcttttctttctttcctctttctttcccttccttcctctctctctgtctttcttctctcctttctttctcacagaatcaaaatctcttggggtggggcctgggcatctgatttttaaaaaccagacatctgatgtgcagtcaacactgagaacccctgccagcttcatctcctcttctaagtgccagacccaagtttccractgtctgcccacctgtctycccacctgggcacccgccagcgtctcaccctcaggagactccagctgaactaatcctctctccctgcttttccagaacaggtcccaccctccctccactcagtctctcctgctgggaaccctggtcatctgcactgtgccttcatcttccatcctgccagtgctgcccggtgtgtctcttaaacscatgcctcctctgtgtgcaccacctgcactttggtaaaagccttcatttcctgcttgggttactacaacgccccctaactcatctcactgtctctatttctgcttctctgtctctccctaggctactcccattcttcctcccctttcctcttcatcccaaagtccaacccatatccttttaccagtaggacttaaggaactaaagactatctcatcacccacttttcttcttaaaaacttccactgcactgcctgctgagatggccttcctacccaacttggctggaaaactcctacccatcttgtggaacccagttcaaaagtcaccacctctgagaagccttccctgaggctcctagggagatgggtactgcctcctctgtccttctccagcacaggccccatcttcaatcacaggattgtgctggaatgattggatgccaagtctgtccctcactgaactccttatgcaaaatccatattatatgtttccttttgccaggtgtgggcccaggtgctggggataccgatgaataaaactgagtttctgtcttcaagaagctccaagtctactgagtgtagcagagaacagggagaaggcacttcagggagaaggsgtagcacatgcaaagccccagaaggcagggacagaagccttagggatgtctgtggggraggatggaggaagagggtaacaggagaccaggtggggagatgagggaggtggtctggaagggccatgagacacccctcacgctccctgagaccccctccacgctatagagatgggactggagaggacgatgatcatttgtgactcagatccctgtgggtttcttcagattgggtctcacccatctttacagccacagcacctaacacagtgcccggcacacagcaggccctagacaaacgtttgccacatgaagtcatgcccactgggccaggaagcccactggggactggggggttggttctgcgataatggggtccctgagattctatgtttcacgtgactaagcctcactctgcccccacctccgcgggggcgtcccgcaggtgcccgactccagccatgctggcgctactgtgttcctgcctgctcctggcagccggtgcctcggacgcctggacgggcgaggactcggcggagcccaactctgactcggcggagtggatccgagacatgtacgccaaggtcacggagatctggcaggaggtcatgcagcggcgggacgacgacggcrcgctccacgccgcctgccaggtgcagccgtcggccacgytggacgccgcgcagccccgggtgaccggcgtcgtcctcttccggcagcttgcgccccgcgccaagctcgacgccttcttcgccctggagggcttcccgaccgagccgaacagctccagccgcgccatccacgtgcaccagttcggggacctgagccagggctgcgagtccaccgggccccactacaacccgctggccgtgccgcacccgcagcacccgggcgacttcggcaacttcgcggtccgcgacggcagcctctggaggtaccgcgccggcctggccgcctcgctcgcgggcccgcactccatcgtgggccgggccgtggtcgtccacgctggcgaggacgacctgggccgcggcggcaaccaggccagcgtggagaacgggaacgcgggccggcggctggcctgctgcgtggtgggcgtgtgcgggcccgggctctgggagcgccaggcgcgggagcactcagagcgcaagaagsggcggcgcgagagcgagtgcaaggccgcctgagcgcggcccccacccggcggcggccagggacccccgaggcccccctctgcctttgagcttctcctctgctccaacagacaccytccactctgaggtctcaccttcgcctytgctgaagtctccccgcagccctctccacccagaggtctccctataccgagacccaccatccttccatcctgaggaccgccccaaccctcggagccccccactcagtaggtctgaaggcctccatttgtaccgaaacaccccgctcacgctgacagcctcctaggctccctgaggtacctttccacccagaccctccttccccaccccataagccctgagactcccgcmtttgacctgacgatcttcccccttcccgccttcaggttcctcctaggcgctcagaggccgctctggggggttgcctcgagtccccccacccctccccacccaccaccgctcccgcggsaagccagcccgtgcaacggaagccaggccaactgccccgcgtcttcagctgtttcgcatccaccgccaccccactgagagctgctcctttgggggaatgtttggcaacctttgtgttacagattaaaaattcagcaattcagtactgcgtcgaggtcttggttacttttttgtttgtttgttttaggcttctctcccaagctgagcttttttttgttttgttttcgttttccttttttttcttttttttgggagtggcaaacatgcttcccaaatccctacaggacttctccttatcctctgcccccacctccctaaccctgctggcaacaacgttcagccactgcttgtcttgcccttcagtgtggctccaagaggaagatcaccagaatcactcagggaagttaaaaaaaaaaatacagcttcctgggctacatcccagagctgtggaatccaaagggagaagagaaagtgaatttgcgacaagcgtcgggatgattctggcactggaccctctggcctgagaggggaagaggccttccatctcacctgggctggtagcttgtcacatctgcctccgagtacagccttaggtccatttcccagatatcagagacagtgccagggaagccaggtgactgcatcttgcctaggcacagaagagtagggttggaatgtgacgttgttagcatttggcaggaccaaaaccagaggcaaacggaggcagtgggatggaaaggcagttgattttgatgaaggcttgttgggagttcagctttcttttgaaacttataatctatacccaggctagaacagtcttgtgtatacaccttcattcatggaataaacgtacttgcaataactttttagcctcccagggtagcctcacttcctagctgtgacttttccaccctggttactgggaggcagcttccatttctcccagactagctaggcagtgcgtccaactgaaccgcagccagaaacctgtctccaggggttatttttacctctaactaggactaacttattttaaaatctttccttgagcccaagtgacaactgaagagaaaggctattgcctggtgattttgctccaccagttggttctcactggtttgaatactaacttgaactgtactcatcgacactgaaaggggatgagcaaacagtgtctctaaatctcctgatcctgatctcaaatatccccctaattacaagttgcaacaaggcagctattacacggggacacaggatggagaggatgggtgccaaacacccatcgtctactctgctgcctcggttatggtgaattcaggaccatcaagggaggtgtggaccttttttttcagaaggaggctgacacttcttgtcaattgcattgtgttcttagttttgctcttcacaacccttgaccccgtagatgggggctgaagaggcaccctggccgactcactctatttctgttttgggaatgggatggataaactatcccatgggcctccagagccaaaaaaccaaaacgaaacaaaacaaaaaaccccaaaacaaaaaagcaaaaagcaaacaagaaaaaaaaaaaaagaggaaataataggcagacaatttacagttcattgtaagggcaaagatatgcatatagcatgatggttaacaggtcagactcaggtagaaaggcccatttgaaccccagctctgccacactcagaaactgtgtgacccgaacaagtcacttaacctctctgagcataggtaaaataagatcatcataccagattgttttgaagattaaatcaagtgttattcacgagaggtgcacagcatagcatgcacaacaaataaggacctggtaagtatctaattaataacaatggctaagatccaaaaaacagctacctactaataaatagatggagctgccttgtaaggcagtgagcatcatgcaaccaggattcaaatgaaggacagttgctacctctgaggttcccgagaaggatttctgcatccattgagagactgaatgacatgaactctgcgatcccatctcttgtggggagggaacctagaatgaagggaagattgtgggccataaaggcagacatctggttcctggcacagaaccatatgtgtgccaccaaagccacccaccggaccccacttggcccctggagtctatttttactcctctcatcttacagatctattttgttaatctccttatatttgctgttttgacttcccagccagcttgctaatcagtttgcctatttgactcacagggtttgcrtttgtcacggggactgaaacacacgcttgttttgatttctttttgtaaaattagaagcgtttgatgtaatgactctacctagacacagctggtaaagtgagaataatgctcaagtttgcacagtttaaacacaatgtagacaataattagaaatgctatctttagawgtttaggataagctttttctcagaattgcactgattttttttttctgagtggggctttttagtgcatatatacagaaatactaaaaacgtaagaaaatagagcaaatcagtgagtgctttggtcaacttgaaagactgcaggaaataaaccaactgattttagatctgcctttttttgactgaatgcataaaatctttacattctccatatttttcatgactaccatatgatcaaatagttttaggtgacagattgcaactgataagttgctgcaatatggcagaagtcatgctcagcctccgcttgcccggtggtgagggtggaatatgaagcaaacaataaagataattcatcatctctatcaggaaaattgccacatgtttatttcaggtaacaaaaaagatatagttatgatatacaatgaccatagaatccaataaagcaacttctgcaaatgaatagaaggtactttttctttaaatgaaactacaaaatagcagctggttttaaaaacaaagccaattgttttagatttaataggctaccactggcctctgctaagatccccaaatatattcctgagctcacatagattccagaaagtcaaacttttcaatattatgcaaactttccctatgcatccaaaaaattctcatttagtaaagaggtgatatgaaatgtaaggcagcatgtccatatctatcattttaaattgccttcatgctgtatcaactggttttgttttgggaagcaaccataatattgagagacgggtctttcctattttttctgctactcatttctaactagattcactacggagctcccaattgcatctctctgatctacaaatttttctctcttcaggaagacacctggaaagaagggactacattaaaggagtgtgttgggggcaatgctttggccttttgacatcctatctagtctgaagggaccctcactattgctaaggaggaggagtgttttaaatggaggcttcagaatgaaagcagaggaagaaggtactctctttttcaaaaagaaggagggtacaggccgggcgcagtggctcacgcctgcaatcccagcactttgggaggccgaggaaggcagatcacgaggttgggagtttgagaccagcctggtcaacatagtgaaaccccgtctctactaaaaatacaaaaattagccaggcatggtggtgcatgcctgtagtcccagttactcgggaggctgaggcaggagaatcgcttgaactcgggaagtggaggttgcagtgagccgagatcatgccactgcactccaccctgggtgacagagtgagactctcaaaaaaaaaaaaaaaaaaaaaaagaagtagggtaccaagtcatccacaaggctgtgggaaaacaacaaagccaagagggcaccccatttttttggagtgaaaaccaacaggggcaaaggcatgctgtaattttaaagagacagagaagatcacctcagtgagtaagcagctggtctttgtcattccttaaagaggagacagaacttttcatgccatatcgtgaaccggggtgcaaaggctcccggtaggaataacacatcaaaaaatttactccaacatgtgaataattgatagcagagcccttttctagcactttgcatcgtgatggtggtgcatgtttgggagggaggtcacagaagaggagcaacgatgggcaaactaatttagcttgcttaagattgccaaaagctgggagggtccagccggcattgagctgaggccatcaggagcctcccagctagagaggctttgggaatagctgtgggagcaagagaaggaacggggaggggagaagaaggtgggcagagaaggtgtggaaggaggaagagcaagagtgagggatgagaaatgcctggtttacaaaaaccaatccacttctacaggccttaatcaaaagaaagacaaacgctcatgtaaaaatccacacctagaggctctcaggcacagagcgatcacaggagaggcagagtgtgcaaacaagctttcattaagagacctgtcagctctgtttcatttctccaggctgctctgcattctgctggcaatccagccggaaaaataatggaaggacaaacacgtctgaacaggcaaacaaaggtgggaacattccacctacagaacaggacagatcagaaagatgccagggaggggggatgagatggcttttttctgagcaaacaaccatagcccctccccttaactccaaactcatcggaaacatgattttctggctttttatgcagcaacaaaaagacatggggttcagagacagcaccattggttgtctattcccaactctcttacacatcccaagatatgattctgttttggtgttcagccttttagagtctgaatgtctagcgacagggcccttcttcagttcttaagggtgaatcttggtgaacctaaacagatcatggtaataccatctcccttgctaagaaatggttaagacattgtcatgtgacatcatcatgtgacaaggtctcatgcgaccacaagccccaggtgatcattctgaccaataaaatgtgataggaactgggtttctcgctcttgaaacacacacacacacgtatgtgggaagaaacttccttctgcctttgaacaggtgttatctggagctgttgcagccacctcgttatcatgagaaagcagctgacacagcaggaagagcaggaagatggaaacctagaaccttgacaactttcttgaatgtatagccctggaatgccttactttcgaagttcctgttatacaacataattcatttccctaccgcttaagtttctgttaagtgtggcttgaagctgagaggaccatgactgatgcagggttatctagtgaagtaggggacagaatgccacaaccttaaactatgatcctaaaaaagacaaaagacagctgtaagtaattgcagaaagcccctttaatgtctgtggaacagaagaaccatgttggatggggaaagcaggggcaggacacacgtgtcgcgtatctatggggtgttatcagggttatatctgtgacaggatcaactaacttactggctctcatttcacctgataacataagaccctccccgctgactacacacagtttaggttatcactccttatgactcctgctccctgccctgcaccctagattctctgggactcaccgcagttttcctgactctgatggaatgtgctggagtctattacgagccctgcttttcagaaggtgctcaacaggccctgaagatgtgcatctggccgatggtgggtcaaaaccagagttctgcaggctgagatttttccttttattattattaaacttggctgtgttttccttcggtggctctggcatcctatgcagtagtgctggacatttgcaggcagttaaggcccagtacagcaggaagaatgatttctgtgactgctggtctgtgcaagccctccagctgcgggagcaacctcccttgaggagaagttgtgggggtgggcctggtggggagggcgataggctgggacagaaggaaggatggaatactggacctggtggccaggggtcaatgggatgtccttctcaccagaagcaacagaacgccgactccagcatgctcccatttcaactaaagtagtgggagacccacccaa

SEQ ID NO: 96053 - DNA, 41247 bp, Homo sapiens
  misc_feature (1)...(41247): n = A,T,C or G
tcaatgcaagggccataagcctgaggacagaatccaacacatcaaggatgatggtggaagtatccaaatagcctgagttatatgcaacagaaacaaatggtgtgtccaccaaaagacatgtaaaagaacatttggccacgcacggtggctcacgcctgtaatcccaccactttgggaggctgaggtgggtggatcacctgaggtcaggagtatgagaccagcctaaccaacatggtgaaaccctgtctctacataaaatacaaaaattagtggtggtgcacgcctgtagtcccagctactcaggaggctgaggcaggagaatcggttgaacttgggaagaggaggttgcagtgagccgagatcatgccactgcactccagcctgggcgacagagaagactctgtctcaaaaacaaaaacaaaaacaaaaacaaaaacaatattttatatttttgttcttaaatatttgaaattaaatatttttctcatttttattcatttctaggggccaatttgtagcaaatgctattatttttaatgtatttttcttgtatttatcaccttaacattttatcttattaattgtaataattttcaagaaagtcctttggattttctagatttgtaaccacggcattaactaaagagatagtttaatgtctttctctccaatatttataacatgccattttcttttcttattatattcgttaggattctttttttccctccaaagccaaatactttagaaatatttgctagaattctaaggcaatgtgttataatagtgttgccatcatccctgtctagttcctgatttaaaaaaatgttttgcatatctggtgtacctgaacttattattatatcgtttatgtatagtttatatctgtttcttttttcttttcttttttttggagacagagtcttgctttgtcacctaggagtgcagtggtgtgatctcagctcactgcaacctccacctcctgggttcaagtaattctcgtgcctcagccacccaagtagctaggactataggcatgcaccaccacgctcggctaattttgtatttttggtagagatgggctttcaccatgttggccaggcttgtcttgaactcctggtctcaagtgatctgcccaccttggcctctcaaaatggtgggattacaggtgtgagccacagtgcctggccatgtctgtttcataaattgtctgtttctatgttagacagtggccctgtttattttgctcaatgcctatcaccttaaatcctaccttttctcatgtcatgtactcctgttctcttctagtttgtgctggcctgatctctctgcccactcctttatttttcagccttttctgtttgtgtggtctcaaatatcctataaatagcatgtggctgggttttgtctctctaatccagtctctatgcctttaaagggagttcaggatttatttactgtgataaagatgtttagttttgctcattccataaattccttttttttttttaaagacacaggatctcgctatgttgcccaggctggacttcaggtcctgggctcaagtgatcctcctgcctcagcctccagagtagctgggattaaaggtgacagccatagtgcccagccccataatttagggttattattattattattattattattgggtatnnnnnnnnnnnnnnnnnnnnnnnnnnnnnnnnnnnnnnnnnnnnnnnnnnnnnnnnnnnnnnnnnnnnnnnnnnnnnnnnnnnnnnnnnnnnnnnnnnnnnnnnnnnnnnnnnnnnnnnnnnnnnnnnnnnnnnnnnnnnnnnnnnnnnnnnnnnnnnnnnnnnnnnnnnnnnnnnnnnnnnnnnnnnnnnnnnnnnnnnnnnnnnnnnnnnnnnnnnnnnnnnnnnnnnnnnnnnnnnnnnnnnnnnnnnnnnnnnnnnnnnnnnnnnnnnnnnnnnnnnnnnnnnnnnnnnnnnnnnnnnnnnnnnnnnnnnnnnnnnnnnnnnnnnnnnnnnnnnnnnnnnnnnnnnnnnnnnnnnnnnnnnnnnnnnnnnnnnnnnnnnnnnnnnnnnnnnnnnnnnnnnnnnnnnnnnnnnnnnnnnnnnnnnnnnnnnnnnnnnnnnnnnnnnnnnnnnnnnnnnnnnnnnnnnnnnnnnnnnnnnnnnnnnnnnnnnnnnnnnnnnnnnnnnnnnnnnnnnnnnnnnnnnnnnnnnnnnnnnnnnnnnnnnnnnnnnnnnnnnnnnnnnnnnnnnnnnnnnnnnnnnnnnnnnnnnnnnnnnnnnnnnnnnnnnnnnnnnnnnnnnnnnnnnnnnnnnnnnnnnnnnnnnnnnnnnnnnnnnnnnnnnnnnnnnnnnnnnnnnnnnnnnnnnnnnnnnnnnnnnnnnnnnnnnnnnnnnnnnnnnnnnnnnnnnnnnnnnnnnnnnnnnnnnnnnnnnnnnnnnnnnnnnnnnnnnnnnnnnnnnnnnnnnnnnnnnnnnnnnnnnnnnnnnnnnnnnnnnnnnnnnnnnnnnnnnnnnnnnnnnnnnnnnnnnnnnnnnnnnnnnnnnnnnnnnnnnnnnnnnnnnnnnnnnnnnnnnnnnnnnnnnnnnnnnnnnnnnnnnnnnnnnnnnnnnnnnnnnnnnnnnnnnnnnnnnnnnnnnnnnnnnnnnnnnnnnnnnnnnnnnnnnnnnnnnnnnnnnnnnnnnnnnnnnnnnnnnnnnnnnnnnnnnnnnnnnnnnnntggtctctttctccttggcgtttaagcaattttactgtagtctttctctttcatcctgcttgggcaatgtggccaacccctcccatctacacacagctttttcttttttcttttctctttcttttttttttttgagagggagtcttgctctgtcacccaggctgtagtgcagtagcgtgatcttggctcactgcaacctctatctcctgggttcaagtgattctcctgtctcagcttccggaatagctgggactacaggtgcactgagactacaccacgctacacctgggactacaggtgtagctgggactacaccacgcccggctgatttttgtattttttagtagagacagggtttcatcatggtggccgggctggtttcaaactcctaacctcaagtgatctgcctgcctcagcctcccaaagtgctgggattacaagtgtgagccactgcacccggctgacacagagttttcttcatgtcatgaaagttttcttctgtagtttgactagctggtgcctccatttcagctgtccctttttctccttttaggactcctgctgtctgcacatcagaattcttggacttgccccccagatctgtggtctattccttcatcgttttcagctctgtgcatctttcccttaagttctgagctatttcttccattagacccaagtggcyttttcatattccctcaaaatatcaaacttcttctttcctcggggtctttgtacttgctgtgcttttgtcagaaatggcttcctctagatctttccatgctcagccagtgcctttgggctgatcttagctcagatgttcccttctcagatctacctctcctgctgccttagacataaacaccatactctgcacttttgcttggttccttttctccattgtagtcactctgcctataattatgttatttgttcttttactgtctgttgcctctcacccacctccggacaaataaatcatttgaattcttgctgtgtttattcacgctgcatccctggtgtctaatctaagtcagaccttgataagcacttgtgaaaggaatggaagagtgaattaatgctagggcggccccaaggtggtaactgctatgaagcggccgggtacggtgcctaatgcctgttatcccagcactttgggaggtcaaggagtgtgtatcacttgaggccaagagtttgagaccagcctggcctggataacatggtgaaaccccgtctctattgaagaatagaaaaattagccgggtgtggtggcacacgcctgtaatcccagctacttgggaggctgaggcatgagaatcgcttcaaccctggaagcggaggttgcaatgtcatagcactgcagcctgggtgacagagcaagattatgtctcaaaaaaaaaaaattctgagaaggtggtaactgctatggaaacatatagagccaggatgaggggataaaggtggtactgagtgctgggggcagagtggggcaggttacagtctgaaatgaggggctctgagagctggggtgcagctctttggaaatctgtgcaatccaggcatgggaacaaccataactcatacactgtgcaggagagtgcatggggtgtgatgtgtgaggaacactgggagattgagcagcaaggccaaaagctggccggggagatacagtcgggggggtgatagggaattatgaaggtcctgatgtctctggttttcccttggggaggaagtactccagggttctgagcagggaatgggaggatctgactcatgtattcacaggctgatgtgtgcagaacagactgaaggcatcaggggcagcaagaggagaccaggaggcagctgtgacattgcactcaagagaaatggtggcagtttggactcagtgaaaggtatggaggtggcaagaagtgatttcattctgggtagatgatgctgatggagacagcagaccttcctggtgcactgaatatagatgggaaagagagtagtcaaggggtactttgaggtgtttgacttgagcaataagaagggctgagatgctatcactcaatttggggaaagtggggtgaagtaggtttggcggatgagccagtgttagggtagcacaagttgcgtttgagatgccagcaactggaagtcagagtgcagatgtctagttgacagtgggactagtgaatctgccactcaggaagggtctggactggacaaacacttttaggagtgattgacatgtaggtggcatttgaagtcatgagcctggataagattttggaagagtgagtgtagacaaagagaaaacacacagatgagaaactggtgagactggaggaaaccaggaggacatggagccctggaaaccacatgctaaggtgagaggagctgctcacagaagtctctcctatccactgttataaggtcagggatatttatttattttccttttttgttcactgctgtatttccaataccgagtgtaagtgcttaataaatacttgttgaattaaaaagtgtatgagtgaatttacacctttgcaaatgcccagtacacagggctgcaacattgttctcctttacagaaagagcagagatcaggtaggaggctctgcccattctcagtggcactaaccctctcctttgcctttcacagctatgctgacattcactcaggtgagagcccttctgtccaacacaggcccaagacaaatgagcctcagacaagccctgtggtgtggtgcttggtgggagctgggttgggcactgggtcatccaccagtccccagaaaactctatggccacttctctgtccacccttccatatctaataatctgtctgtctgtatctataaccatttctttgtccaccgtctacaggcactcttttgtccctctttccgtctattcacatccagtcttctgtccatctgctagagtgaccaacttcccagtttgtagtggactgtctctgtgttagcattgaaattcctgcatcctgcgaaatcgctcactactgaacaaaccaagactgttggtcaatccatctgtttcccaggtatcctgctgtccatcggcccgcagctagtctatccacccaaccgcccgtcagacctccggcccaccctcccagacggaggacaatgctccgccctctctggccccgcccccagtcaccgccttttccggaagctgctgcagcgaatcctggcaccctagcaacagcgcctttcaggctgtccagtccgcgtgcgcagctcctaggacgagccaatagtgaggggcaccgggagcgaggtgcagggggcggggctcggcctggccgcagccattttggtgcgagagaaacaataggacggaaacgccgaggaacccggctgaggcggcaggtaaagctcgcgtcctatggccctagtgcccgaggagctttgagggagattttttcaggctactgggaaacgggatctctgatcattggagtctcccaggttatttgggaaagacttcttccgtggtcattgtgggggaaatctcccggggtccctgtggattcgatttccctgggtcatttgggaggagggtttttcttctgatcattgggggagggatttccgtggttttgggggtccagcatcctccccggtcattggagggggtctcccgggtttgggggagggcaggatctttcctggtcattgagatctccccgggtcttgggaagcgcaagatctacggtgtcattgaggggtctccccaggtcattggcggccacgatctccccagatatttggcgggtggaggggtcttcccggatctttggatagggagtcagctcagcgcctcaggtactgttacctggggtcggcagatgtgcagccattttgagtgttgaatgccatttgggcccgtcagatggtgttcgatgagggaatctacacacttaaccttattatagaaaaaatgcctttaaatggataagaggacacctttatagtgatatttccactctttacgtttgattacagaccgcttttgtcttttgcatcctaatggcttatttcattttaggattgtattcgttctcatatatcaactaagctacactagcagaaaagtgagtgaaaataaaatgtagaaaccagtaaaatccagtgctcttaaataccagggaaaacagaactagtcactgcttggaattaaacatttccgtagcagaatgtacacagaacaaaaaatcatcttgaatagttttaagaaaaagtactggcactttggaacgtggtaacaaaaatgttgtagatcatcggttctatgatatttttaatagaggaccatgattacagtaattttgttgaattctagtgtttaaaatgtttgctgtatttgcagttgtagccaggtaatattttaagtgaactaagatgcttatttatataggttgttgctgtggggtttgtataattgcatcgtgtaacttgggtgttaagtatttaaagagaagcttcagggtgttgttttaactttagccactatcagagttagaaagggccaaatgaatactttatcacatttgacataataggcaaattgatggcctagtaactttttttttttttgagaaaaagttaaactgttaactgtcatttaaaattttttttctattttctgtggtcttgtctgacattgtcatttcgatagatttacctgctttgtgactttagaattcacaggcattgttagaaatcaaatggagaatcacttgagcccagcagttcaagatcaacctgggcaacatagcaacaccctgtctctacaaaaaaaaaaaaaaaragagagagagagaaagaaatgaaatggataagaacactgactagagttaatacaattgtagaaactagctttttgtttgtttggtttgttttttatgcagggcctgggtagggagggagcaaggcagggacctgggagatctagaaatcagtgtaacagatataatagatttcttttgtgtttcaaagcttcctaggtgacagacaggtacactgtatgctagccctgtatctgtctgagcagtggaatgtgccaggaaagaaggagcaaccactgactgatgaacctttgccagtctcccttccaagagggatgccagagccttctgtaagctcctgagatgtcactggtatctaggcaacagggatgagcctgaacctccctgaggccagcttactgaggtgaaaattttccattgtttggctcataaagaggatgcactggggaagaattttccctttaagtgaagttatttcacctagtgggataatcttrggtaacaaattgaacacactcttatacattagaaagtaagcagatgattattctcatgttattacattttaaagcatgtttttgtttttttaaattatgtttttgccyatttgtgtaccatataataaaagtaataagaagtagttgtgttttacagtatattctggtggcaaggaaatgtccttctctccaaaaattgagtttagagcccacttcaggatttggagaagtcaatttgccgagatgatgcacagttgatttgggtctgtcatccataaccagcttcagtagttactaattcctggccaatcttgtttcatctacactgtgcctatccccatcactgccctacttttttttttttttttttttttgagacggagtctctctctgtcgcccaggctgaagtgcagtggtgcgatctcggctcactgcaagctccgccttccgggttcacgccattctcctgcctcagcctgcctcagcctccgcgcctggcctgccctaccttttaaagaaagaaagggccagggccaggcttggtggctcatgcatgtaatcccagcactttgggaggccaaggcggttggatcatgaggtcaggagttcaagaccagcctggccaacctggtgaaaccccgtctctactaaaaatacaaaaactagccagcctctgtggcaggtgcctggaatcccagctactcaggaggctgaagcaagagaatcgtttgaacccagggggtggagattgcagtgagccaaaatcacaccactgcactcccgcctgggcgacagagtgagactccatctcaaaaaaacacacacacacacacamaaaaaaaaggaaaaagaaagggccgagcgtggtggctcacgccagtaacaccaacgcttcgggaggccgaggtgggcagatcacttgaggtcaggagtttgagaccagtctggccaacatggtgaaaccctgtctctactaaaaatacaaaaattagctgggtgtggtggcaggatcctctgtctcaaaaaaacaaaactaaacaaatttctgggatatgctccctttaagattcaggggttttttgttttgttttgttttgtttttaatgagacggagtctcgctctgtcacccaggctggagtgcagtggccagatctcagctcactacaaccttcgcctctcaggttcaaccgattctcctgcctcagcctccctagtagctgggactacaggcatgtgccaccgcacctggctaatttttgtatttttagtagagacggggtttcaccatkttggccaggctggcctcgaactcctgaccttaggtgatccacccacctcggcctcccaaagtgttgggattacaggcgtgagccactgcaccgcacctggcctttttctttcttttttgtattactattttttttttttttttgaaaaaatgtcactctgtcacccaggctggagtgcagtggtgtgatctcggctcactgcaacctcagcctcccgagtagctgggattacaggcgcgtggcaccacgcccggctaattaatgttgtttgctttctctatgtatccacctatcttacttgagacactcctatgtgttttcgaaattgagtgtctaatcccaaacctaaggaagagtaaaacttcttttaatggaataaaacatgttagttaccaagaagcagacatctggctctagtgttgcttttgcacttagtttgtgagaatgtgcccagttggaacctgggctagatctcctaagtctgggtttgtggaaggctgccacgttgcctgctctggccctggggtgctgtggcccaagttccccaggccatattactctaccttaaaaccctacctgttagaagagcccacctgttatggctccttgccttgaaccttgtcttgctcttttagttggggctgcttcggggccaacaggccttcgtaactgaagctgcacactcaaatgagatgccccatgggccgtgtgagcttgtctcagctttcatggggattgcaaaaatctcgcatcccccttcagtatttgttttataagaatagtaggttatttttgctttgcaagtatgaaactaacattggatatggctttttggtataactactcacctgcccattcagatttttatgtgccctagtgtcttagatttatatatttattattattattgttgtttttggagacggagtctcactctgttgcccaggttggagtgcagtggcgcgatctcggctcattgcaacctctgcctcctgggtttaagcgattgtcttgcctcagcctcytaagtagctgggcctacaggcatctgccaccacgcctgggtaattgtatttttgtagtgatgggttttcaccatgttgtccaggctggtctcgaactcctgacctcaagtgatccgcccactctggccttccaaagtgctgggattacaggtgtgagccactgcgcccggcctgcacatacaaattttaaataaagacagtctcactcagttgcccaggctggaaggcagtgcagcgatcatagctcgctatggcctcaacctcttggggccataagtgatcctcttgcctcaggctcccaagcagttggggctacaggcacatgtcactgggcgcagctcattttaaaaattttattgtaggccgggcatggtggctcatgcctgtaatcccagcactttgggaggtgaaggcaggcggatcatgaggtcaggagattgagaccatcctggctaacacggtgaaaccctgtctctactaaaaaaaaatacaaaaaattagccgggtgtggtggtgggtgcctgtagtcccagctactcgggaggctgaggcaggagaatggtgtgaacctgggaagcggagcttgcagtgagccgagatcgcgccactgcactctagcctgggagacagagcaagactctgtctcaaaaaaaaaaaaaaaaawttttttttttgtagagacagggtctcgcttttttttacccaggctggtcttgaactcctggcattaagcaatcctcctgcttcagcatccacaagcgccaggattacaggtgtgagccactgcatttggcaargatcccttttctacatggtattgctgaggctgcagccacatttgtttggggattaacctaactccaagcctgcccactttcactctgatgcccatttgtttagatgtgctttaaacttggtgtctgtggactgtgccatggttccttcctcctcatcagcagggggtggtggtaagttcagtttrcgtgcttttatggggtgccctgtggagttatatgcttggctctggtgctgaagagtcatcatatttcttgagaacttgcctagttactcaaggaagaaagaggagggctgattgtagtatacttgaccgaggaatgtatgtttttatgagcttgaacaacctgacaagaaaaacaataacaaataacttgttaaaccatctttttgcacgttgctgagattatgatcttcctaaattagttaattcttattaaacattttcaatttttcatctattatgaatggaagttttacttgtaaggcagtaaaaggtgtcattccttgaacagtatctgttcttccaggcaagtgcctctaaaggagagagagmccagttgattacaaacccactactgaagggcttgggtttttcttgctttgtgtttgtatctgagcatgaggataaaagtgtctgtctcttcctcaggtctttgggctgcctctgcccttcgtagattctctgctgggcctttggaactaacacagcaacttccagggtctcatgttgaagactttatgggttagtcagaatgctgcatttacactgggaaggccagaggaggactgtaaatccaggatacaaggtcctgggggatttgggagggtagaatttacaggggtgccagttggcagctgacaggtttagattctggggcttaaaaactaatagatgtgtggcctggttcagtggttcatgcccgtaatcctggcacttcaggaggctgaggtaggcggatcatttaatcccaggagttcgacaccagcctgggcaacrtggcgaaaccttgtctctactaaaaataacaaaaaattagctcgacatggtggcatgtgcctgtagtcccagctacttgggaggctgagatgggagaattacttgaacccaggaaggcaaggctgcagtgagctgtgattacaccaactgcgcttcagcctgggagacgtgagtgagaccctgtgttaaaaaaacaaaaacaaggccagatgcggtggctcacgcctgtaatcccagcactttgggcggccgaggcggatggatcacgaggtcaggagatcgagaccatcctggctaacacggtgaaaccctgtctctactaaaaatacaaaaaattagccgggcgtggtggtggccacctgtagtcccagctgctcggaaggctgaggcaagagaatggcgtgaacccgggaggcagagcttgcagtgagccgagatcccgccactgcactccagcctgggcgacagagtgagactccgtctcaaaaaaaaaactaaactaatgaacatgaacagcaggactggggcaggtgaggcctgggaaaggtaagggacaggacccctaggatgatttatctcacgctcaaagaccgtttttactttggaaaataacttaagctccttgtaatgagcgagagaagagtaagatgttaaaactggaagtaccttgttgaccttcactgctggtcctgaaatgcaatcttatttttactttttttagagacagggtctcactctgtcacccaggctagagtgcagtggcacaatctcatagctcacagtaacctcaaccttctgggctaaagtgatcctcctgcctcagccttctgagtagctaggactacaggcgcatgccaccaagcctggctaatttttaaaacattttttgtgaagacagggtctcactgtgttgcccaggctggtctcaaacttctgagctctagcaatcctcccgcctcagcttcccaaactgctgagattataggtgtgagcctccgtgcctggcctcaaatgcgtgcgatcttgattgactgaatccactgctttcctcacaaactgggtgattctgaagagatcagtgtgacctttgctttggaactgtgaatgcaattgaacttgatttctgtaacaaaaattttaaaatatttttctggatcttattttggagagctaactcaggacttctgaagcataattggcaggtgtctctttattaggacatagtgctgtgactggtgcagtcttttttttttaattaattaattttttttttttgagatggagtctcgctctcttgcccaggctggagtgcagtggtgcgatctcggctcactgcaagctccgcctcctaggttcaagtgattctcctgcctcagcctccccagtagctgagactacaggcacctgccaccacgcccggctaatttttttatttttagtagagacggggtttcaccatgttagccaggatggtctcgatctcctgacctcgtgatctgcctgccttggcctcccaaagtgctgggattacaggcgtgagccaccgcgcccagcctgactggtgtagtcttaagacttttctcagaatcgtatctcatttttttctgggctggtctggaagaacactgactgcactcaggccaagtgggttgggtgatacaagctgccagattgctgccacgaacctggagtagtttgcagacccttgcgaggagtatttgtctaagcgagatgttgaaaggacccagaggaaattgtcagagttcccttggtcgcaggaactagtgctgcatagggtacacttttgttcctgctccagcaaatgcagcactcaggtgcttgcctgggcaggtccgggatgccctgcctctgtggctgcccattgggactgaatcactgttggcatcccttatttcagaggatgaattcatgtgtcatttgggtttggcagtgagctaagagctaaatggggtaaacattgcccactggcaggaaacatataatcttgtctgaagctaatggaccgttacttttttggttgtttgagacagtgtctcgctctgtcaccgggctggagtatggtggtacaatctctgctcactataaccttgagctttccagcctcaagtgatccctccacctctgcctcccgagtagctgggacaacaggcatgtaccaccacacctggctggttattttttgtagagacaaggtctcactattttgccaggattgttctcaaactcctgggctcaaacagtcatcctgccttggcctccaaagtgctaggattacacgtgtgtgagccaccacacgggccctatggaaccattacttattggcatatgaaagaaccatgactcaaggattgcaaaaatccctcatagattgagacctgtaagcaattttggctttagtctgagagagttgcttctctgtgttcctgttgagttagtttcttacaatgtggtgggagactggagactgagaattgttcttgaaaaaggggtaactggcttttacaacagaactgaaaattcctggtatgtgtatagaatacattcagctatttgtaagaaaatttggccagttgactcatgccttgtaatcctagcacttggagagactaaggcggaaggatcacttgaggccaggagtttgaggccagcctgggcaacatagtgagcccccatctcaaaataaagtttgatatattgataaaggggacatatgagaccttagaatcaatcattgttttagcgagaagcttttaaaattgcttaaattctttataattctagcaggttattctgataaacatatttcttttttattatttatttatgtattattattattattttttgagacagggtctcgctctgtcacccaggctggagtacagtcatgtgatcacggctcactgcagccttgacctcccaggctccagtgacccttccatctcagcctcccaagtagctgggaccacaggtatgcgccattgcacctggctatttttttttaatttttatttggtagagacagggtgtccccatcttgcccaggctggtgatacacatatttctcggtagactgaaagttccttcttcctgttccctttaccttggagccctctagtctgtcattccagaaacctggtcagacgaggcagagagatagggcagctagttgtgctggtggttctagaaaggagaagcagctgagaggctactgtgtcccttatggaaaacctgagatttgtccagatttttggaacaatctgctgttttgggggaagaagctacattattgtatgactttcatgtaatcactccagttaaaatctgtggtttcttcattaaaaccagaatgagcctgggtgcagtggctcacacctgtaatcccagcactttgggaggccaaggggggcggatcacctgaggctgggagtttgagaccagcctgtccaacatggaaaaacgctgtctttactaaaaaatatataaaaattagccgggcgtggtggcgcatgcctgtaatcccagctacttggaagtctgaggcaggagaatcccttgaacctgggaggcagaggttgtggtgagccgagatcaggccattgcactccagcctgggcaacaagagcgaaactccatctcaaaagataaaataaaaccagaatgagatgctattgagggctctgaccttctagcaccttgtatacatcttaaggacagtgcgtgttgtggtgttgtggttgttattctcacttggagtgaagctctgagtacgaagggtgggccggatcagtgtttgtttctaggtggatttaaaaccatcaagagccaggcagccatctgtgttttcctgtttcaatcttgaatcctcctcttcccccagtattttctctctcagttataaaggtaatgtgtgctcagagttggaggatattataagtttgaaacattcagaaaactgaaaagygggcaatcatgatcttaccacctagtatagggcaggttttgtggtgtctgaagcttatataaaataatataaatayatgtaacataaatacataatttgtaattatacatgtaattataaatgccatctttaaacaaaataatgtacaattatgataacaaaattaggtaagaaagtgaatgtttgtttagattgaaaaaaatcacaaaaagttacacatttaaaaatgcagaagaaagttctatagtacttacctccctacattttggggcagcattttgaccaccgctttctttcttttttatttttttggggacagggtctcattttgtcacccaggttcactgcagcctcagcctcccaggttcaagctattctcctgcttcagccccccaagtagctgggactatgggcccgtgccactacgcccagctagtttttgtatttttagtggagatggggttttgccatgttgctcaggctggtcttgaactcttgagcttaagtgatctgcctcccaaagtgctacttttacaagcctgagccaccgcacctggcctgaccacctctttctataatagcaatattacaactgtctgtagagagaacagaagggtcgccatagtcactcctcaagggtaattgatcctatcttttatttctttatttggttgtttgacataggatctcactcagtcatgcaggctgaagctcagtggtatgattagagatcactgcagcctcagactcctgggctcaagagatcctcctgcctcagcctcctgagtagctagggctacagatgtgcactaccacaacttgctaatttttttgtagagatagggtcttgctgtgttgccgaggctggtcttgaacttttggcctcaagtgatcctactgtcttggcctctttttttttgagatggagtttcactcttgtagctcaggctggagtgcaatggcgtagtctcggctcactgcaacctccgcctcccgggttcaagtgattctcctgcctcagcctccagagtagcttggaatataggcgcccaccaccatgcacggctaattttttgtatttttagtagagacagggtttcaccatgttgggcagtgtggtctcaaactcctgacttcaggtgatccacctgccttggcctcccaaagtgctgggattacaggcgtgagccactatgcctgtccttctgttttttttttattttattttattttattattttttatttttttattttttttattttttattttttatttttattttttggtagagaggggtttttgccatgttgcctaggctggtctcgaactcctgggctcaatcgatccacctacctcagcctctcaaaatgttgggataacaggcgtgagccaccacgcttggccaagctgtagtatatccttgaataattcttttagagaaggcttgtgaatagccttttttttttttttaatagacagtgtcctgctctgtcatccaggctggagtgcagtggcatgatcatacctcacagaattctggaactcctgcactccagtgatcctcccacctcagtctccccaccatgcctgactaattaaaaaattatttagagactggctgtcactgtgcagcttgcccagtctggtctcgatctcttgacctcgtgatccgcccgcctcggcctcccaaagtgctgggattacagatgtgagccaccgcgcccggccccatcttccttcttataacttaaaagtttatcaaaagtgaggcctggtgcagtggctcatgcctgtaatcccagcactttgggaggctgacgcgggcagatcacttgaggccagtagtttgagaccatcttgaccaacacactgaacccagtctctactgggtggggtgattcacgcctgtaatcccagcactttgggaggctgaggcagcggatcacgaggtcaagagattgagaccatcctggctaacayggtgaaaccgcatctctactaaaaaaatacaaaaaattagccgggtgtggtggcagacgcctgtagacccagctactcgggaggctgaggcaggagaatggcgtgaacctgggaggcggagcttgcagtgagctgagaatgcgccactgcactccagcctgggcgacagagtgagactccgtctcaaaaaaaaaaattagaaaaattagccgggcacagtggcgcgtgcttgtaatctcagctactcgggaggctgaggcatgagaatcacttgaacctgggaggcagaggttgccgtgaggtgagatcatgcactctagcctgggcaacagagcaagactctcagagaaaaaaaaaaagtgtatcataaacggcccggtgcggtggcacacgcctctaatcccagcactttgggaggccaaggcaggaggatcacttgaactcaagagttcaagaccagcctgagcaacatagcaaaaccccgtctctacacagaaatacaaaaattagccagatatggtggcgtgtgcctatagctgtcccagcaacttgggaagctgaggtgggaggatcacttgagcctgggtggacaaggctgtggtgagctgagattacgccactgcactgcagccttaacaatggagaccctgtctcaaaaaaaaaaaaaagtgtatcataagcattttctcctggttaaaaaatataaaattggtaagaaagctcttcatgctatcctaatagtccgtcatacaattgaatgaaaaaaatatttttgtttcattcatctcctattgctggatgtggaggcgaatgtgttcatcatcaaggatgatagatgtcctgattttatggagcagtggacttgatttttatggagttttcctgaggttgatggtagtttgatgccatgtacccagacaggtcaatttggtgttccccacaagacatcctttcagagtcagacattgactgtttccttcctggctttattttactaaaaatgctttttagttttttattgtttgtttttttcttttcttttcttttcttttttgagatagagtctcactctgttgccaggctagagtgcagtggcgcaatctccggtcactgcagcctctgcctcctgggttcaagcaattctcctacctcagcctcccaagtagctgggatcacaggcatgtgccaccatgcctggctaatttttgtattttttagtagagaccgggtttcaccacgttggctaggctggtcttgaactcctggcctcaagtgatctgcccgcctctgcctcccaaagtgctgggattacaggcatgagccactgctcctggctgatagtttttattttaaaaaatatttttatatttatttcctcatctccatggttagcaagagatatttttgttttgttttgttttgttttttgagacagagtctagctctgtgtcccaggctggagtgcagtggtgcaatcttggctcactgcaagctctgcttcccgggttcacgccattctcctgcctcagcctcctgagttgctgggactataggcccctgccaccatgcctggctaatttttttttttttttttttgtatttttagtagagatggggtttcaccgtgttagccaggttggtcttgatctcctgacctcgtgatccacccgcctgggcctcccaaagtgctgggattacaggcgtgagccaccgtgcctggccgagataattattttttagtgacgatttagcaacctgaaaaccttgggtctttgggatatgacctcagtatcaacacagaatatttgaatgctggttaatatatttgttttaaactgtgatagaattgaaatcttgtagccacattttgaaagtttattcttcattaactagtcttttctcacctgattttctacaagagagaattttccaaaaggttagttgtcgttacattaagaacttgggttttgtttgacatgaaatgtttctacaccagcaggtctcagatgaatgttcaggcgtgggtccttaatttatactccccagttaatgcagacttataaggtggaaaataataaatgcaaagtaaactartattagccagtgcttggaatgcattttgtaaagtgtgcagcaggccacattttaataattgtactcaccatatgattggtgtggatttggatgatgattgcagtgggtgccttatgagttctctgctgatctgtatgcgttaggtattcatgacacagtagtgatttgaggcacattttgtggagtgcctactttatgctggtkctcttgtagatcctggagattcagcagtgaatactgcagtcaaaaatctgaccttatggaacttgttttcaagtggaaattgggtgggaggagacaattaacaagacaagtaagaaacgtagagtatgtcagacggtgataagtgctgaggagaaaataaagcaggggtgccccagggagtggcactcacttttagatagagtggctgaagatcccattaaagagatgacatttgcttagctagctgtggtggtgcacgcctgtagtcagagctgctcaggaggctgaggtgagaggatcacttgagcccaggagtttgaggctgcagtgagccgtgattacgccactgcacttttagcctgggcaacagagcaagactctatctcaaaaaaaaaaggggggggtgacatttgcacaaagggctgaaggaggttgagagagtgagccaagggggatatctgggggaagaacatatcaagcaaagggaatagcaagtacaaaggccctgaggtacatgtgtatcaggcatatttgagaaataaggaagccagtataattgggccacatttgatgttgatattttttcctctatggatgctttattttatttttttttgacatggagtctcgctcttttgcccaggctggagtacagtggtgcagtcttggttcactgcaacctctgcctcctgggttcaagcaattctcctgcctcagcttcccaagtagctgggattacaggtgtccaccaccatgtccagctcattttttaaaaatttatttattttagtagaggtcaaggctgaccttagcatgagtgattcaagatactcaaagtgaggcagatgagtccaaatagaatggatgcaaaaggaaatttcagccaatgagtttgtatgtagaaactattggacaatgagtaggatttatttttatttatttatttttttagacgaagtctcgctctgttgcccaggctggagtacagtagtgcgatctcagctcactgcaacctccgcctcccgtgctcaagcgattcttgtgcctcagcctcccaagcaggtgggactacaggcgcctgccaccacgcctagctaattttttgtattattagtagagacggggtttcaycatgttggccaggctagtctcgaactcctgacctcaagtgatcacctgcctcggcctcccaaagtgctggaattacaggtatgagtcagcgcacccagcaggatctttttaagtataatcttttttttttttttttttttttttttgagacggagtcttgctcttgtcgcccaggctggagtgcactggcacgatctcggctcactgtagcctccacctcctgggttcaagtgattctcctgcctcagcctcccgagtagctgggattacaggcgcctgccaccacgcccagctactttttgtatttttagtagagacagggtttcgccatgttggtcaggctggcctcgaacttctgagctcaggcaatccgcccgcctcagcctcccagggtgctaggactataggcatgagccaccactcctggccagcataatcttttctgattattaaaataatacatacttaygggccaggcgcagtggcctgtaattttttgtattgttagtagagatggggtttcaccatgttgaccaggctggtttcaaactcctgacctcaagtaatccacccgcctcggcctcccaaagtgccaggactacaggcgtgagccaccgcgcccagccacgttgtcattccacttagttaaacacctrggagtgggattgctatgtatataataagtatatgtttaactttataagaaactgccagactgttttccaaagtggctttgcattgctaccagcaatgtatgaggcattgcataattaaccctggcttgtatatgaatgtgtaccaggcagatgctgggtggtggctctggaacacacaggaggtatgggtggtaagggttgtttttccaccatcagtatagtgtgccttatgccacccctctgtgactgcctgaccctggggcttttcttaagccagagtaagtagccccagtggatcccattttgtagcctctttaactaaattctggatgagtgaactaaggacccaggggctttcatgagtcatagccattttatttgcattactttaaaagttaagaatattaaggcattgtttccaacagatccttaaaccaatttgatagatttgggggagggactgagtgggaaaactgtatgctgtgctaggatggatgttctgtgtttcttacctgttcatagtttcatggacaaatgtgaggcaatgtggaaagctaaaatagatgctaaatctgaagccagtattttgcagttatttcctgtctttctaggtactgggcccacacattgcatgggctttatcgtaaccattaattttccagccttccagggaaacagctttagaccttagagatcacactgctcaaaaagagagagagagaaacaggtgacatggagattggtgctttggggcttttctttcttctggtgtagttgaggctcctagggaggaagctgatttgctttgtaatctttggaaaattgatccttcatttccttgcagagataggggctgtgagggaccctagaacagaagtgccacttctttgcaactccaaatgtgagaagtatgttttacagtaaaaccatacttatgttcatattgagagattgaacataattaaaacaaaaggatcaaaaagcaagacttactatgtgcaatgcattgatattttgtttattattattttatagagttgaggtctcactacatagcccaggctagtctcgaattcctgaactcaagcaatcttcccatcttggcctcccaaagtgctaggattacaaggagtgagccactgtacccagccatattttgttgtattctgtttaatttttttaaaaaactactagttaccactcactaacttgcttacacaacccacagagtagagatctactctaagcctctcttttcccattttacagaccgtaaaacgaacccaaagggagccatggacttggagtctttctccacgctattgagtagcagaactggtactaaaatgtggctccacctcactacaggatggtcaattgtttccctaattctgcctcacatttggaagtttcttatcagacttggctcaggcaaggatgagcctgatttttcctatctttctacccaaaatgatgatgattttcccaagagcagcaacctatggaccgccagagatggatgcaagaggaagggtgataaggtggcacatcatgcccagcagctaattaacactctggagaagagaagttggagaccctcactgggccttttggcctccagctacgttttttttgttgttgttttttgttttttttttgagatggagttttgctcttgttgcccaggctggagtgcagtggctcactgtaacctctgccccccagattcaagcgattctcctgcctcagcctcccgagtagctgggattacaggcatgcgccaccacacccagctgattttgtatttttagtagagacagcatttctctatgttggtcaggctggtctcgaactccagacctcaggtgattccacccgcttaggcctcccagagtgctggaattataggtgtgagccaccacgcccggccccagctatgctcttgagccacactctagagacgccatgaaggactgtttttgtttattttcgttggaggtggggatgggtaagacatacctacacagagttatttttctacgtaactgagtacatttaaggaatcctgagcagagttgataagggatttgcattgttgttagcattgctgtgatagcaaaagacagggtcttactctgtcacccagtctggagtgcagtggctcagtcatggctcactgcagcctcaatgtcctgggctcaagtgatcctcttgtttcagcctcctgaatagctgggactccaggcatgcaccactacacctagctgagtttttwaaaaattttgggctgggcacggtggctcatgcccataatcccagcactttgggaggccaaggcgggcagatcaattaaggtcaggatttcgagaccagcctggccaacatggcgaaaccccatctctactaaaaatacaaaaaaattagccaggcgtggtggcgtgcgcctatagtcctcagcttctcgggaggctgaggcacgagaatcgcttgaacctgagcggcagaggttgcagtgagccaaggtcgcgccactgcactccagcctgggcaacagagcaagactccatctcaattaaaaaacaaaaaaattgtagagatggggcttactatgttgtcaactcctagtctcaagtgatctcctaccttggtctcccaaagtgctgggattataggcatgagccaccatacctggcctggattgtgtttctaaagcctggcccatgaggagcatcttgtgctttaacaattcataattatggtacctgacatgtgctttagtactggccggcggaccatgaatcagtagcttcttttggtattactcttattcaaaaggtcttttcagtagactagtgtcaaccagtctgcatagacctagagaaaaggcttgtgtggccagacttctcagagctccatcttctggatagagcctrgaatggttagaatgtactcatatttacagttccattgcctgtgttgagtttctggactcttctcaatacgtgccttcctggaggcttttgtggtgatgagaaggtagtgccaagtaatcagaaccttaggtttagattctctgctctttgcatatgggaaaacttactgattcctagccattgagttcagttgaggcccatagtcgggtactctctaaaaggaagagattaacaccagtttaaactctttaaaagaggctgctttataaatagaaaatattagttaggcgtggtggcatgcgcctgtagtcctagctgcttgggaggctgagacaggcagatcccttgagcccaggagtttgagggtgttttgagctatgatcgtgtcattgcactccagcctgggcgacagagtgagaccctgttgacttttttttaagaaaacagtaaaacgtttaatttttttaagaaaaaattaaaaattggccaagtgcagtagctcacatccatagtcccagcactttgggaggccagggtgagcagatcacctgaggttaggagttcaagaccagtctggccaacatggtgaaaccctgtctctactaaaaatacaaaaaaaaaaaaaaaaaaaaaaaatagccaggcatggtgggtgcctgtagtcccagctacttgggaggttgtggcaggagaatcgcatgagactgggaggcagaggttgcagtgaactgagatcacacttcagcctgggcgacagagcaagactccatctaaaaaaaaaaacaaaacaaaatgaaaaaacaactggccgggcgcggtggctcacgcctgtaatccagcactttgggatgctgaggtgggcggatcacgaggtcaggagatcaagaccatcctggctaacatggtgaaaccccgtctctactaaaaatacaaaaaattagccgggtgtggtggcgggcgcctgtagtcccagctactcaggaggctgaggcaggagaatgacgtgaacctgggaggcggagcttgcagtgagccgagatctcgccactgcactccagtctgggtgacagagcgagactccatctcaaaaaaaaaaaaaaaaagtaaaaattcagctgggcagtgccagatatcatgtgccctagaggcagctgtatggggttcacttgggagaagtggcttattgtctctggccctgggtgaatttcctaaccatctctaatcaccttcattgtttgcaacagggatagtagtgtctacctcaaagaaagtgtcaggaccaaatgacataagaaattcctgtcatgagcctgatacataataggtgctttccccacattagaggacagagggcacatctcttccagatccatcctcactcctctctcagttagagtcatgggaactgaaggagttcccagtaaaatccctgtacagatactgaaatgtaactcaagccctgtaagtaatgctagtagagactgtctaatttgtaaattagacaaaacagataatgagtgtgagatggcctgaactggttaacagggtgcatccaraaatgtgcttcgttgatgcggcatccagtgcatggctgagtgagtggatgcgagctctgattgccccaagagcataactttggtttaaaggtgtgtaccagcttttggtgatcaggatagaactgataaaaatagtgacctagaacactgtgtatctttttaaatggagttaaccagccttgatcagttgtttttagatacagatgttaatcattaaagctagacccaagctccattgctaacaaggttaatggggctcgtctttggccttgggcaggagcagtgtgggtagacaacctggacaagtaaataatgagtcttactagataatgagtaagcaggttttccctgtatttaaatgcattttataaaaatataattaatggggctgggtgcggtcgctcacacctgtaatcccagcactttgggagaccgaatgggcagatcatgaggtcaagagatcaagaccatgccagccaacgtggtgaaaccccgtctctactaaaaatacaaaaattagctgggtgtggtggtgtgcacctgtaatcccagctactcgggaggctgaggcaggaaaatggcttgaaccctgagaggcggaggttgcagtgagtcgagattgtgccactgcactcccgcctggcgatagagtgagactccatctcaaaaaaaaattatatatattaaaaaattatatatatatatttattttatatatataatatatattatatataatatataaaattaatgggagacctgggcatcatccacttaaagcttgacactcttattagaaaatggtaagatttaatccaaatattaggcttgaaattgtgatttcacctcaccatggcatcagttttgcctgcggcagtggctttctaacaccgtagtgggacctctgcctttttagggcccctgaacccattccctgcctgtctgcatctaaccccgccccatgagctcatagtgtttttgtttttctgccggagaaggcgggggccaaggtgggtggcatgggcggagtcccgcaagaactcagactgtttgtctttgtctttctgctgaaggagcagggtgagcagctctaaggcacttcccacgctacttcgaacccccatgtcatcattttgtttgcttccagcagagcatyctggccagaacaagccaaggagccaagacgagagggacacacggacaaacaacagacagaagacgtactggccgctggactccgctgcctcccccatctccccgccatctgcgcccggaggatgagcccagccttcagggccatggatgtggagccccgcgccaaaggcgtccttctggagccctttgtccaccaggtcggggggcactcatgcgtgctccgcttcaatgagacaaccctgtgcaagcccctggtcccaagggaacatcagttctacgagaccctccctgctgagatgcgcaaattcactccccagtacaaaggtaagtcccagctgctggaggggttgccacactggcgaggagrtgtgagagatcgtggccatggaaggccctggcagccatccctggagccctcactccctcccactctgtgctttccctccctctcctccttctcctcctcctggccctcagcccagcatctcacaccctcagttttcaatccctggtaagattgctcaattctgttttgttgtgtggatttgagtttgattttggtagaagtgtagttgtgttttatgttcaggtgtctcttgatcacagtaacccatagtcccccaytggggggacggtgggggaagactttgggaggattttacccagaatacttgccgcctgctttttgtcctccaggaaaccagaagcccgggtaattaggtaggccggggagcagcgttgagtcagatggaatgcaggagtgggaggcctgtgctgattagcccaagccctttgctgttacagaatgtccccaraattgctatatgaaagcaacccttcgattcacatatgataattttttatttctttttataatgtattttayaggggacatcagcagccaccagcatggtggggtctttgttggggagtgggggagtcttttgtaaatcaagtaagaatccattaaagaaattaattttaaatgtgcattacctggttacataaaggactctagaacaacttaggttcttttgggactgttgaaacattgtctttaaggacagaatgtactgggtgcctttctctgtactctgaatatgcatgtgtattgcggtggggatgggggagttgggggccctcacttggtccttctctgttgtttttttccaggacaaagccaaaggccccttgttagctggccatccctgccccattttttcccctggtcctttcccctgtggccacagggaagtgtggcctgaataccccaccccggctcctctgcacccagagctgggggccacctcakaagtgtcatctctctctgagcacgcattcccctgcagcagtcgaggamtgagcagattgagtgatgctggggcagagaggcctgggaggaaaggtgttcagccagtcgtttgtaaggcgctcgtcggcacctgctgaaacgcccccacctgacagccccatcctcaaagactgtcttaattactcatggcaggttctagagacttaaggggaaaagctgctttcaaggccaccacatgtctgtgctccccaaccagctctatctgccttgtgttcattttgttattttgtgacgtgagactgcaaagaccaataaaaacatattttataagaacaaaaggcctgggtgcctacccgtgtgggggcactgtgggaagcctttgctagggtgtcttgtgctgtgtggtttgttttgtttgcccctttattttgctttgcttacccagtcttcccttactcttggatgcttcttaaccctcaggcaaacctgtgttccccctgtattcaggctctgctttaaagcaagccatgaggctgttggagtttctgtttagggcattaaaaattcccgcaaactataaagagcaatgttttcagtcttttaggattagaagaattacataaaaattaataaacattttcaatgatggaaaaatgtgtcttgtaattctttggctcttgcctcgttgagtacatcagagaggaagactctcagccatgtttgctccctaattgcttgtcttgtatggtgtcatcttttctagctgttttgatatttgttaagtttgcagatgagtttggggcctctggcaacatagagactaaggaactgggtaagaaaaaaacaaatgttacaatcatgttacttacaacgcttcttcctgctaaattaaaagttctttctgctcctcacccccttccaggtgtggtatctgtgcgctttgaagaagatgaagacaggaacttgtgtctaatagcatatccattgaaaggggaccatggaattgtggacattgtagataattcagactgtgaaccaaaaagtaagctcctaaggtggacaacaaacaaaaaacatcatgtcttagaaacagaaaagacccctaaggactgggtgcgtcagcaccgtaaagaggagaaaatgaagaggtgagtgtagacagagggcaactctgggctatgtgggaggggaagtgttgggggttttggttacagcccagttccctggagctaaggactgaagtggatttagtaggtaccttgtcattcagtggctaattcccacatggcatactcagcctctctttgtttaattgactctggttagatcatgccagtttgggcaaacagctgcactggcagctgtaagagattcactcactcttctatgactgctctgtgctaggctgtgttctggagrtgtagcagtgactaagagaggagccatccttttacctcaggttgttcaccagtggtgggggatgaaatgagcagttgggcatccctgaaactcagcaatccccctaagcagggccatcctacccttgcaccttggcaaagcttgtgaaaatataaatagtatatataaagtaaagtacatgtaatgtagctaagtaggttgacgtagtcccatggaatttcagttcctattttcccagttgccagcttttggagtcaggggaacctggttgtactggaggctaggtggtaccactgcctasaagagggcagtgaaggctctccacatacagggctggggagcaggggctgatcttggatcttaggttctttttgctgtagaaaatagtggttgactggtcccttaattttattttctaaaatcaactttcttgaggtatacatgtggtaaaatgcacccatttggagtgttcagagagttttggcagatgtttacacggtaagccaccaccacatcaagaagtcacttttcattactgtagaaagtttctggccgggtgcggtggctcatgcctgtaatcccagcacttcaggacccagggcgggcggatcacctgaggtcaggagttcgagaccagcctgaccaatatgatgaaaccctgtctctcctaaaaatacaaaaattagcccggtgtggtgcatgcgcctgtagtcccagctgagacaggagaatctctagaaccgggaggcgtaggttgcagtgagctgagatcgcaccattgcacctgggcaataagagcgaaactccatctcaaaaaaagaaaaaaaagaaagtttctggattttatttatttatttatttatttatttatttattttttgagtctttcttgttctgttgcccaggctctggagtgcagtggcacgatcttctaggctcactgcaacctctgcctcccaggttcaagtgattctcctgcctcagcctcccgagcacaccaccacgcctggctaatttttgtatttttagtagagacagggtttcaccctgttggccaggctggtctccaactcctgatctcaagtgatctgcccatctcggcctcccaaagtgctgggattacaggcatgagccaccatgcccggccttctgaattctgataagacatactgatttattggtccttatctctttatagccataagttagaagaagaatttgagtggctaaagaaatctgaagtcttgtactacactgtagagaagaaggggaatataagttcccagcttaaacactataacccttggagcatgaaatgtcaccagcaacagttacagagaatgaaggagaatgcaaagcatcggaaccagtacagtatcctttgttcacgggcatctctgcatttgagggtaagaggagaggaaatgaggaagtcccttggagcttggagagagaagttaggtttttatagtcatggttgagtttctcctacctgggttattccaggacctgtatgataattatgggcaaataatcacttccctcagggcagctactggcctaggagtgcagatgatgaggagtggggtataatgggtttctgggaggtgaggggtgcctcatgaaggggccagcttgcatcaggtgggctttactcacggtaacctagaggaagagggcaaggagctgctccctgttttcagacttttcagaagtctgaaaacattgctcacctgccaagggctggggtgtttgggtgaggagactgacctgatcagtcctggttcaccagaccaccactgggacatgagctgtgcataaggaaatatttgttttcttttctcttttctttttttcctctctctctcttttttttcttttttttttttttttgagacagagtcttgctcgtcccccaggctagagtgcagtggtgtgatctcagctcactgcaacctccgtctcccaggttcaagcgattctcatgcctcagccacccaagtagttgggattacaggcatccgctaccacgcctggctcatttttgtatttttagtggagacagggtttcaccatgttggccaggctgatccaaactcctgacctcaggtgatccacctgctttggcctcccaaagtgctgggataactggcatgaaccaccacgcccagccctcttcctccctgcccctcccctcccctcccctttgtagaggtaaggtctcactgtgttgcccaggctggtctcaaactccggggctcaagtgatcctcctgcctcagcctcccaaaatgttgggataacaggcgtgagccaccacgcctagccttttatctattttttggtctcttaaaaatgtaaaaaccattcctagcttataggccataaacagcaagcactgggccatagtttaccagtttctgctgttgggagcactgattccttgaatgggaaataatgagtcaatggtctgtgcactagagacactcattatttctggttattgtttctagacctttttagtgcacacagctgagaagcagacgtttaaagagcaaagtattttcatgagtttatactgatatttccagttcacatttaaggctacaggatttactgaactttcttgatgttctacttgtaattgaggactttgtttttggaccctagtcctacacttagctaagagttcagaagatggcatgtgtgtctcccaggcaggaagagcctaggcctctgttgagtccgggtgcaggctgcttccacgtcagttccctgacaagaagtaaaggtgtctcttagctttatagtcagctctggactccctstgtcggggatggcaggactaatggagtctcctgtgggttcaggcttctctgggtcactgcatcaaggcactgtaccttgagagtgccaaggacccatgcagtagcacttccttttgggggtattattcttaactactcagaatttatcttactggaaaacctgacttcccgctaygaggtgccttgtgtccttgacctcaagatgggcacacgacaacatggtgatgatgcttcagaggagaaggcagccaaccagatccgaaaatgtcagcagagcacatctgcagtcattggtgtgcgtgtgtgtggcatgcaggtgagggggatgctagggctggctagggcatccagtggctgtcacttccccaccctggtatagtcctgtttgctcaaaagattccaggccaggtgcagtggctcacacctgtaatcccagcactttgggggtcaaggtgggtggatcacctgaggtcaggagttagagaccagcccaggcaacatggcgaaaccctgtctctgctaaaaatacaaaaattggctgggcgtggtggtgcacggctgtaataccagctacttgggaggctgaggcatgaaaacagcttgaacccaggaggcagaggttgcagtgagctgagatcacgccattgcactccagcctgggcgacggcgagactgtctcaaaataaaaaggttccagatttgaccctacatgagtctgttgctttttggttaaaaaagaaagcatgcatgcctgcatgatcctctctcagattggtctggttggctgagtccagaatctgtggatagtagtagggaggaaggcaaaagggtttggtcctctccagtgacccagatgttgaggtggggtgctggggcacaatgaccaaacccaggttggatggctgcatcccaggtgggggctgatcagagagcatagtggacagtggctcatgtgcaactggtgtactttatctgatctgggctgtcacatgccgscaccaccacaccaccccacccccgcccggggtccagggtttgagatggccctcagcccctgacttgctggtctctctcctacaggtgtaccaagcaggcagtgggcagctcatgttcatgaacaagtaccatggacggaagctatcggtgcagggcttcaaggaggcacttttccagttcttccacaatgggcggtacctgcgccgtgaactcctgggccctgtgctcaagaagctgactgagctcaaggcagtgttggagcgacaggagtcctaccgcttctactcaagctccctgctggtcatttatgatggcaaggagcggcccgaagtggtcctggactcagatgctgaggatttggaggacctgtcagaggaatcagctgatgagtctgctggtgcctatgcctacaaacccatcggcgccagctctgtagatgtgcgcatgatcgactttgcacacaccacctgcaggctgtatggcgaggacaccgtggtgcatgagggccaggatgctggctatatcttcgggctccagagcctgatagacattgtcacagagataagtgaggagagtggggagtragcttgctagctgctccagtacttgagagcgactctgtgtcccaggcacagctgtgctgcgtcagggaggaagccagtatggccaggtggtggctcctgcagcctggagctgatgtgcagtggcctctgtgagccccagcctgagccagtcccagctgtgcttggagtctttatttattttaactatttcttcaacattccacatttgatgatgatacctctttcttccctgagtgtatatgttctaatacaaatctttttgtttwttgtatatagtgctcctgtcattctttccaagagcaggcagtccccctcccaagcctcaccacatgctgtgaccacctccctggctcagtattctcctggctgccacccccactccatggatcctaaagtcagcacaacctcttggcatggtgtacagtctccaacccagcatcctgaaggttacccagaaaggatccccaagttacataccttctggcgtctgtgctggctaagtgtctcagcacctctatccaaaaaccacatgacgcttgacacaggtcttctcatgggccgtatgcagcttaagccaattagatagcaggtgatccaaaccttgggtccagcttttaatccctcctatgccactggcagcagctaattggctggctattgtgatagatgtcctggaagcaatactagggtctctagcctcgggtctggtccattggcagccatggactgtgttgtaaaggggcccaggtgatggagggtaccataaaaaggcgtgtttgggcaggtagggtggtcctcttggccacaccacctgtcaccactcctgcccagccctagtccccattgcaatttcaccagtcttattcttcaggcagtcccagacagcacagaccccgagattctgccctgccccaggagggcttctgggaggaggaagggccaagagaggtcttgaactgaagagccagacctggtgcagagaaggcagggtctggatgtcagtttctagcagttctacccctcacctgaacctcacactaggcctatgtactttaggcctaaaaataggcaactgggtcagacagacacccataatcccaacactggaaggccaaggtgggaggactgcttgagtccgggaatttgagactagccagagcaacatagcaagaccttgtctctactaaaaaaaaaaaaaaaaaaaaaaaaaaaaaaagctgagtgtggtggtgcatgcctgtagtcccagagacagtaggcttgagcctggaagatcaaggctgcaatgagcttgatcatcccactgcactccagcctggacgacagagcaagaccctgtctcaaaaaataaatacagataaaaatagaaaacttgcacacactggcctgtacacgcctcctgcttcctgggctcgggcttcctgtggagcgtagctggaccattctcagccacagtctctccaggaccctgagggcctcttccctgggtcttccaggcactcttattacacggatttcatatatctggagatctgggctgactggaaagctgggtggatcaaataggctcttaaggccaccgtggtaccccactccctctttcagccctcctctatgctctcagaaaggggcatcgcaaatcttaagtcctataaagacaataaaacacagcaagatgatagcgattgatgggggtgggagcttgacggacaaatactataggagagggaagggaaaattgtcccaggtagagggaacagaatatgcaaaggcccaatatagagaaaaccagccatagctgaagagagaggaggagtaggggtggggagcaaagatgggagggctttagacagggaatagccccgcctggtttctgcttttgtggcccccttctccccacacttgctccccactggccaccaccggcactcggtgaagacaggtggtgaggcctagacacaccgagagccgggccccgcggggcttccaagtgtcggatcagcaagatcatcctttcgaggtcgccgtccttgcaattagtagatgggacccactgccccagggcggtaggggcgcacccgctacgagcggagcgcgctttcaccgggaggtaggacgggacgcagcgctcggacttaagcggggaaagggagcagagggctggacgggtgaaactgaggccggggtgaggagtgagggtgcggtgtccggggatgaggggcctggagccgggagggaccagaggagacagcgagctgtcgaccccagccccgccgcacctcttggggccgcgcgggggcgctgctctccgatgcgtggaacgatacagcccggggcggggcttcggcgggcgggcgcgccgcgctgcgtagtgtgtcacggggcgggacaaccgcggcgcgggtcgcgctcccggcctggcgttgtggcgccgcagcccttgccaccttccctgcacctgccctgcccggcctcatgtaccgcgcgctgtacgcttccgctcgggtgccaacgcgctgggttcgcgcgggacgaccttcctggtgctagagcgaagacgcgcactggtggctggcgcgcgcgcgcagtggtgagacgggctacgtgccgccagcctacctgcgccgcctgcaggtgagtgcgccccttcccgcccggcctccgcgccctgggcaggaccccttcacagccccgcgaaccgacccagggaccccaccctctccgggacccgaggccaggacctctatcagacagggagtttgagaacctgaccctgagacccccggaccacgggggactgagaccccaagtgtcagcatcacccacaaaagaccaggcccttgacagaccaactcccgatcgaccaaaagcctaactctgggactgagactcctcaggaccccagacccttcagtatcgagtccgccatctgaatggcgaccctgagccccaccgaatcctggccaattattcaaatccctgagaccccagatccttaatatgccccttctctggattcctaggaccccacaaccaacctccctccctccctccctccctccctccctccctcccttccttcttcccccaaccccgcgccttgccccccgttggagccaccactgagacctggaccaccttggacaccacctgtttccctagccattctccaggtcctcaaccccccaacttggaccctagagccatagacacctccatcccctatgtaacacccaagctttggtacttcagtgtctttcactagcctgtgttcagccaccctctaagctcttcttaagtctctaccaaccttatttgaaccaaggacccatgcccctgctgacactgtctgctccactccccaaccctgacttctcaaactttcttgctttgaaaatgggttccatccctacttgttcccagcctggagtggggactgctcacattgtgatgaagtgagttcttatagcttctcctggtctgatcgtggccccatttccttccagtggaagctgcagtcccagttcctgtttccctaagagtagccctgctgcgggggttggggtgcgtatctccagctggtctattctgaccacagggggaagaagggcccagagctgccgggcctgtgccagacacccccgccccgtcctagtccttatcctttaggaaacatcctgtcccagcccagttcaggacagaaataacgggataaatttggaagtgtcatctggtcttaccaggaaggatgggccctgggggcctaggggcttcctcatagacccttggcgtgatcccatctaggagtgccaggggtgggagtgggggccgtggacaccatggctgctgtgtgtcagacccaacctttttgggaatggggtctcattgaaggcctctgaggaaaagtcctgtctcttcccctactgggcataggtcaagggcctgtgagtcccctgccgccagccaggaccagtggggcaaggtgtttggggagggcagagaggctaccatcttctctgtcactgtctgtttctttctgcgtgtctctttctgtctggattgctgcgactctgtgcctctctgcctgtgtcgttccgactccacatgtgtgtgtttttgtttcttcctccggctccccccacactctggctttggctctgtttctttctgcgttgtttccctctgtctgcctctccgttcctctctgagctcctctctttccccattcctttctttctctctctctctgtgtgtgtgtgtgtgtgtgtgtgtgtgtgtgtgtgtgtgtcttcatgtctttctatccccctgtctcctctccctgcactctggcacacctcataccacctggagggctttgctgacctctgtgcccacctgtctgtgcccatcagggaagcttctcaaacccatggtggaatgagttcatctcagctccgggactcctatgtagcctgatggactacgtgtgccagggccaggggagggctgggggtagctggtttgatagctgctaccctacactccccatgtcagataggcagagtagactggatccctggaatgttggggatggcagtacagagcctggaacaggggctaggcccctctctcatgtttatcctttgccacaaacacagaactgcttcccagggtgggtctggaagcttactgagacatcttgtggggatgagggccagcagcagggttggggagggcaagtccctttgacccattctcagctcccagggcttacagagggcccttacaaggacagggctgttctggggtatgaccttggttttgtgaaagatcagcaagatgcagagtgatgtattaaggattccagatactggagacttcctgtttggcatctcaacctgggctctgagccaagaccagggatagacgaggtatgcgctcctggctgcaagctgggagcccctgggctatgtttttgctttagacctctgattttcagaaacatcttagccaagagccttgctgtggggtaaaatcctgatcaggacctaatatgtaatgtggcagcatgggggtcaccctgtgcctcagctccctgagtgatacagtttgagaaccccattccatattctggttcaactttttgtgctatgtctagcattccaggctttcgctatattggttctctgccctgggttctatctcgggctgggcctgggctgagcacctccgtttggccttcaggtctaactgctgtcccctgccccccccagggcctggagcaggatgtcctccaggccattgaccgggccatcgaggctgtacacaacacagccatgcgggatggtggcaagtacagcctggaacagcgtggagtcctccagtgagtgttgaggggagtgaagtgggacctcccggtgagcatggtggggtggggttcttcaatgagtgtcatggggcaggtgggcctgggaaatgcgagggttggcaagggtggtgggggaatggcacctcccagtgagcaaggtggggtcgggtccttcagtgagcaccaggggtgtgcagagcgcaggactgaggatagtatggggtactgtaggctggggtggagcatggaggagatggggatgtctgaggggcctgggctatggggtcccagcatcccacaggggcatatgaggactttgagctgtgagatgcaaccccccaatagtcttcctgtccttccatcaggaagctgatccaccaccggaaagagaccctgtcacgcagaggcccttcagcctccagtgttgcagttatgacctcatcaaccagtgaccaccacttggatgctgctgcagccaggcagcccaatggggtgtgtcgagctgggttcgagcggcagcacagcctacccagttctgagcatcttggggcagatggaggcctctaccaggtgtgtggggaggacatcgtggagaagggaggtgggtggaacttgaggcttcatccagaggctcaaggggtccactcaggagtgatgcggcccagagccatagtcctgcccacagccagggctcagggcccgagcctcgctgrygctctagatgtcagtctgtcctccaagatcctacttccatcttccagatcccacttccatcttcccagatcccaccacagcctcgccgagcagcacccaccacaccgcccccaccagtgaagcgccgagaccgcgaggccctgatggcctctgggagtggtaagaaggcagggttaggggaattcaggtggaggcaccctatk

SEQ ID NO: 96054 - DNA, 23037 bp, Homo sapiens
gcaggagtgcagtggcgcaatctcggctcactgcaacctctgcctcctgggttcatgccattctccagcctcggcttcctgagtagccgggactacaggtgtctgccaccatacccagctaattttttttgtactttttttttttttttttttttttgagacggagtctcgctctgtcgcccaggctggagtgcagtggcgggatctcggctcactgcaagctctgcctcccgggttcacgccattctcctgcctcagcctcccaagtagctgggactacaggcgcccgccactacgcccggctaattttttgtatttttagtagagacggggtttcaccgttttagccgggatggtctcgatctcctgacctcgtgatccgcccgcctcggcctcccaaagtgctgggattacaggcgtgagccaccgcgcccggcattttttttgtatttttagtagagacggggtttcactgtgttagccaggatggtctctgtctcctgacctcgtgatcttcctgccttggcctcccaaagtgctgggattacaggcgtaagccactgcgcccagcctttttttttttttgagacagagtttcgctcttgttgcccaggctggagtgcaatggcatgatcttggctcaccacagcctctgcctcccgggttcaagcaattctcctgcctcagcctcctgagtagctgggattacaggcatgcgccaccatgccctactaattttgtatttttagtagagacggggtttatccatgttggtcaggctggtcttgaactcctgacctgaggtgatccacccacctaataaaagtttcaaaacaaggcaatatgacaattagaaacatttatgtgcctaacggagccccaaaaataatgaaacaaaaattatcagaattgaaagtagtcagctctacaattatagttcatatttcaaccccccactttcaataatgaatagaacaggcaggcgtggtggctcacgcctgtaatcccaggactttgggaggctgaggtgggcggatcacctgaggtcaggagttcgagaccagcctggtcaagatggtgaaaccttgtctctactaaaaatacaaaaactatctgtgcatggagacaggcccctgtaatcccagctacttgggaggctgaggcatgagacttgcttgaaccaggaggtggaggttgcagtgagcctagatcacaccactgcactccatccaacctgagcaacaagagcaaactccgtctcaaaaaaaaaaaaaaaaaaaagctgcgtgcagtggctcatgcctgtaatcccagcactttgtgagaccaaggcaggagaatcacttgagcccaggagttcgagaccaagctgggtaatgtggcaaaatcccatctctatttaaaaaaattaaaagtaaatttaaaaaataaaaagaaacatctagaagaataaataggtgaatgtatcaaacagagtaagaagggtaagttgagtgccagagccctccctacagaacacagcctgcatggacctggtacaagtttgagaatctatgggatgatagagggaacaacagagatgggtagggaaacagggcctcatcaagaaacggtgttacaaaatttagtttgccttttagggggagagaggatattttgaccttacctcactctatataccaagtaaattccagagaatcaatgagtcaccaaacactgttgcaaaattattgcaatgatcactgcttgcacttaaccttttagtaatatttcctgttttgaccaaccccttgaaacgcatcgttcccaaccagcatcagacttcctagttgtctcctacttcaatggccttcccttcttagcccagggtagcagtgggtataggtagggaggctaggtgactgggtttaggaatatttcatttgggaggctgaggtgggaggatcacttgagcctaggagttcaagaccagactggggaatatagtgagaccccatctctagaaaaatgtttttaaaaattagctgggtgtgatggtgcatgcctatatagttccagctactcaggaggctggagtgggaagatggcttgagctggaaggttgaggctgcagtgagccatgatcacaccactgcattccagcctgagtgacagaaagccagaccctctcaaaaaaaaaaaagaaagagagagaaaggaagggaggaaggaaggaaggaaaggaaggagggagggaaggaaggaaggaaggaaaggaagcaggcaggccgggtgcggtggctcacacctgtaatcccagcactttgggaggccaaggtgggtggatcacctgaggttgggagtttgagaccagcctgactaacatggagaaaccccatctctactaaaaatacaaaattagctaggcgtgatggcacatgcctgtagtcccagctactcgggagactgaggcatgagcatcgcttgaacccgggaggcagaggttgctgataagattgcgccattgcactccaacctgggcaacaagagcgaaactcggtctcaaaaataaaaaaggtcgggcgtggtagctcatgcctgtaatcccagcactttggcagatcacgaggtcaagagatcgagaccatcctggccaacatggtgaaatcccatctctactaaaactacaaaaattagctgggtgtggtggcacatgccttagtcccagctacttgggagcctgaggcaggagaatcgcttgaacccaggaggcggatgttgcagtgagccaagatcatgccactgcactccagcctggcaacagagcgagactccatctcaaaaaaaaaaaaaaaagagatcacgtccaggggcggtggctcacatctgtagtcccagcactttgggaggccaaggcaggaggctcacttgagcctggagtttgagaccagcctgggccacatagtgaaatcctgtctctacaaaaaatataaaagttagctgggtatgatggtgtgcacctgtgttcccagctactcaggagcctgaggtagaaggatcacttgagccagggcatggtggcgtgtggcgtcccagctacttggaaggctgaggcaggagaattgcttgaatccaggaggctgaggttgcagtgagccaagatcacgccactgcacttcagcctgggtgacagaatgagactctgtcaaaaattagcgatgttggcatgtgcctgcagttccagctactcgggaggccgaggcaggagaattgcttgaacctgggagatggaggttgcagtgagcagagatcctgccactgcactccagcctgggtgacagaatgagactctgtctcaaaaaagaaagaaaaaaatagagatcataagactgagagaatgaaccctttgtagcaataagataccaaagtataaacaagacattaaggccatgccaggcaagagttaagccgttcaccaaagaataaactatgttctaactgctgcaaggtttttctttttctccagcagctaaacaagcactggccttgagataagcaatatagaaacaattgcagttcatccatcaccagacactgaccccacaagccataactatagctttgattgcacaagagatggattttggtgactttttcctaataagagaccactgaccagggactggcttcagttggtttatggaacctgtgcactgagtgcttttgtatccttcattttgacatatggtgctaattgtatttcttttcttttttttttttttttttgagatggagtctccctctgtagcccaggctggagtgcagtggtgcgatcttggctcactgcaacctccgcttcccggtttcaagtgattctccttcctcaccctcctgagtagctgggactacaggcatacgccaccacgcccagctaatttttgtatttttagtagagacggggttttactgtgttggccaggatggtcttgatcttctgacctcgtgagccacccacctcggcttcccaaagtgctgggattataggcgtgagccaccgcacccggcctgtaatgtatttcaatgttaagtctccaccccaaagtgaacatgggtcatatacaacacacatgtttattcagtatacttgcattaggacccccttcatgagtatctatagctcttcctgtaacctgttgaatatggtattttttgtttttgttttttcttttttgagacagagtctcgctctgtcacccaggctggagtgcagtggcgcgatctcggctcactgcaacctccgcctcccaggttcaagcgattcttctgcctcagcttcccgagtagctgggattataggcacatgccatcatgcctggcagattttttgtatttttagtagagacggggtttcaccatgttagccaggatggtctcaatctcctgaccttgtgatccgcccacctcggcctcccaaagtttgggattacaggtgtgagccaccgtgcccggccgaatatgtatgtttagccaagccattcgacataaagctcctgcctctttttaagggtctgtctctggttttgaccagaagcccacctcccagcctgcaggttgtaaccctttataagaaataaagtcagcctggcacggtggctcatgactgtaatcccagcactttgggaggctgaggtaggaggatcacttgagctcaggagtttaagatcagcctgggcaacataatgagacccccgtctccacaaaaaataaaaaaaaattagctgggtgtggtgtgagagcctgtggtcatggcatctggcatgatttttataaagatagttttattttaagtataagagtagtttttgggtaaggtgtggtggctcacccctgtaatcctagcactttgggaggctgaggtgggtggattgcttgaggccaggagtttgatatcagcctggccaacatggtaaaaaatgcaatgatcctagcccttgcctcttcctgtacttaagatactgtctgacaggattaatgattatgcttctgtgacctataaacagatgtactcttgcacccaaaccttgatgagatttatgctctaatgtaacttctgagcacatttgatgtaatttctgagcacatggagagccgccaccaccagtgtataaactgtcggaaacactgctttggagcagtctagcagaaactccctgaaaggctctcccgggttgcaattcttggtaagacttctgaatagaactaactttaaatatttaaaagcttgtttttttttttctttagttgacataacaaagcataccttagaagtctttttttttttttttttttttttttgagacggagtttcgctcttgttgcccaggctggaaatggcgcgatctcggctcaccgcaacctccgcctcccgggttcaagtgattctcctgcctcagcctctggagtagctaggattacaggcatgcgccaccacgcccgtctacttttgtatttttagtagagacggggtttctccatgtcggtcaggctggtctcaaattcccgacctcaggtgatccgcccacctcggccttccaaagtgctgggattacaggcatgagccactgcacccagccagaattctttttcctcttacagaaaaggaaaggtttcaccatgttggccaggctggtcttggactcctcgcctcaagtgatccacctgcctcggcctcccaaagtgttgggattacaggagtgagccaccgctcccggcctgtacttagttcttttaaagagaaaactggcagggcgcaaaactggccaacatggagaaaccttgtctcttctaaagaaacaaaaattaccgggcataatcccagctactcgggaggctgaggcaggagaatcgcttgaagccgggaggcggaggttgcagtgagccgagatcgcgccattgcactccagcctgggcgacagagcgagaccctgtctcagaaaataaaaaataaataaagagaaaaaaatactgactttcagcaccaacttgtggtcccaggtaagtttccacgctggtactttagccctgggctcgaacctgcggacacgctgtggctgcaactccccgcccgccagacctcagtacgcagcgcggctggtgagaaacataatgcactctgacttccacgcgtggaatggggagatggactgcacggcgggcggacctgctcgggctgatggacggcaggtggactgatgtgcgcagggactggcggcagcgcggtcagagccagtcagccaaagccaggccagcacaatagactgtcccggttcccgccaggagggcagcccagcaccaactgtacggtactgcgcctgcgccgcgaccgccaacgcgcccagtctacgcttgccggcgcaacagggccgactgcagctggaagatggcggcgtccgtggtctgtcgggccgctaccgccggggcacaagtgctattgcgcgcccgccgctcggtgaggtggtggcgagagcgcggggcttcgggacagggcttcgggaagcggacaggtgtgggctgttagcagtggcaggtcgaggtggggaggacgcggggtcagggccgtgggaaggtcacggcggagggcggggaaaggtatctcgccgcttgcctaggggcggggttcgggggtcctcctgaggacctgggaggtggggagcgatcccctgaccgagtcctcactcgcggctgttcccttccacagccggccctgctgcggacgccagccttgcggagtacggcaaccttcgctcaggcgctccagttcgtgccggagacgcaggttagcctgctggacaacggcctgcgtgtggcctccgagcagtcctctcagcccacttgcacggtgagttggggacgcttttggggagagggcctccaggttgggcctgccgtcttttccctggttggggtgtgaccttgggctcgagtcttcccgtttgtggtttgggttcggacccaggaccactcaccccgagaatggccccattccctaccctagccacgccttggcttcacgggacaatcttcactataagccaacattatttagcatataatgcccgttaagtaggcggccaaattcttttccagccttttgttaaggagcccatataagggaagtgatcatgtctcctcttataatgcggaaaatgggattcagacaccttaggtgacttgcaggggtccaggtctgtcagcctcactgcccaaggtcataatctccaggctagaccagaaatacattttaggaagcaaatgcattttaacagtacaatgaaatgtgtgattttccaaaaaatacaaattctctaaattgacacaagaaatcttgagtcacagatagatatatgaataggtgagaagattcccaagaaataattatctcctcctcctttcagcccccagccccagggccagatgtttttattgacacatccttttagttttccagaaacaatgtcctgcgatttaaattgttactaagcataggaaaaggtggcctgcaacttccttgttatatgtcacttgttatagtaaagaatgctatattacatgaactctaaaatgtgctagattgtaaggagctgtctgtgctccagygccagagaaagaatctcaagaatcttgccaattttaatcaaaggatactatagattgtaaaatgcctcttgcattccaagatgttagatgtgaaatacatgttcatctaagattgtgtgatatatggtatatgcattgacatctcttaggaaagcaaatatcacatgttctcacttatcagtgggagctaaaaaatacgtacatacagatgtagagagtggaatgatggacagtgaagacttggaaggatgaaggggtggatgatgagaaactacttaatgggtccaggcctggaggctcacacctgtaatctcagcactttgggagaccaaggcaggcggatcagctgaggccaggagttcaagaccagcctggcaaacatagtgaagccccatctctactaaaaatacaaaaattagccatgcatggcacacgcctgtaatcccagctcctggggagactgaggcaagagaatcgcttgaacccgggaggcagagattgcagtgagccgagatggagccactgcactccagcctgggtgagagagcgagagtccatctcaaaaaaaaaaaaagaaattacttaatgggtacaaggtttgttattctggtgatggataattcagaatccctgatttgactacttgtgcattctgtgcctgtaatgacatcacacttgtgggcggggcacagtggcttacaccagtaattccagggctttgagaggccaaagcaggaggatcgattgagcccaggaataagaggttgcagtgagccatgattatgtcactgtactctggcctgggtgacagagcaaggccctctgtcttaaaaaaaaaaaaaaagaaaaaaatggagtttcaggtgtggatagaaatttctaaaaattgtgcttgtaccccataaatttatacaataaaaaaaagtcttggctgggcgcagtggctcatgcctataatcccagcactttgggagaccgaggcaggcggatcacgaggtcaagagattgagaccatcctggccaacatggtgaaaccccgcctctactaaaaatacaaaaattaggctagacgcggtggctcacgcctgtaatcccagcactttgggaggccgaggcgggcgaatcacaaggtcaggagatygagaccatcctggctaacacggtgaaaccccgtctctactaaaaatacaaaaaattagccgggcgtggtggcgggcgcctgtagttccagctactcgggaggctgaggcaggagaatgccatgaacctgggaggcagagcttgcagtgagccaagatcgcaccactgcactccagcctgggtgacagagcgagactccgtctcaaaaaaaaaacacacacacacaaaaaaacaaaaattagctgggcgtggtggtgcacgcctgtagttccagctactcgggaggctgaggcgggagaatcacttgaacccaggaagcagaggttgagtgagccgacatcacaccactgcactcgtctcgtgacagagtgagactccatgtcaaaaaaaaaaaaaagtacttaggaaagtagatgtgaaaaacttaaatcagctgtgaacaaatagtaaattaaaagactagaccgtgtgaccaagtggggtgagtggtacgtrtttcttttacattttttttttttttttgagatggagtctctctgtcacccaggctggagtgcagtggcacgatcttggctcactacatcctctgcctcttgggttcaagcaattctgcctcagcctcccaagtagctaggactacaggcacgtgccaccacacctggctaatttttgtatttttagtagagacagggtttcactatattggccaggctggtctcgaactgctgacctcgtaatccacctgccttggcctcccaaagtgctgggattacaggtataagccaccgcgcccagcctgtggtgcrtgtttcacagcaaccaggaggctgtcaagaaaattaatattaccttattgggtgccaaggcaacactgtttggtgttcagagctgattaaaaacaacaacaaaaaagatattataggaacaatatttagtgtgataaaatatacagtctaaaccaatagtcccttccttaatgatgaaaggataaaatcattgccagaacaaaggcagcgtgtaatttttagaaaggaaaaaataagttgttrtttgcaaatgatatgttgtatgcttagacaaaaacaaataattaactgaaaattgagagtgaatttaaggatttgtatgctggtgagaccaggtaaatgtgcacagttagaagtgtccctgtgggtccttgatagccaatcaggagagcaatgatgtggtgtgacgagtcattcggctgcccctgttttccaagcatgactgtgtccccaagcacaggggtcctgctggggcagctctccctgactccaggattcataagtccctgcctggggcttgtactgagtcactcaggtggggtgtgagtagggggctggggagtggtttgtttgtaaccttttctggtggcttcttgaccaggtgggagtgtggattgatgttggcagccgttttgagactgagaagaataatggggcaggctactttttggagcatctggctttcaaggtgaggctcttaaagtctgtctcctctgggcttagggctgcctgttgtccctcctgaggatgaaggtcagaaaaattagcctgattatgggcctcagttgcggggctgatgtctggctggctttcctaaaaggagccacatgagcttaacctctcctgagtgggcacgtatctgatgagcccctgcctgaggccctcagagccaagaggacccaaggaaccataggagccccacttttcaccagagaagccaggcctgtggaacacacgtagatatgcacatgcattttaacaaacccacagacatgggcatgcatgcttgcttatgaaatgttcttctctggtggaatatctaggcatcccttggttgtaaagacccatgttttttaaaggaatgaaaaacatggagaaggattatggggtgggcagggccatggagccatagtaggcaacctagccagctgcaatgtcacaggtatgtgtgcagaattaacgtgtgtgtgcacaccaagagatagcaccactgttctccacacacaggactaggattgggtcccacagaggccactagcatgtattcacaaacatacagtcatgggaatggcatgggaggagtgggttctatcacttgaacacaggtgtgggcttacctgaccatggctgtcaataaggaggggggaggtgtactggtaatgatccccacagcttgttggtaagctgttacaggagctttaggcaacacttgctctggccatgcccttcagtcctggccctggctatctctgttctgttggcgcatgatgccatggttttggtcacctcaaggcctgcttagtgcttggtaaacagactctgggatctgtgtccccagagtctatgctgagggaggtacctgtggaccagtggtcctgctgggtgtttagcctctgaggacagggttcttgggttcctgtgtagctcctgattgttctggttgatatctggttccagggaacaaagaatcggcctggcagtgccctggagaaggaggtggagagcatgggggcccatcttaatgcctacagcacccgggagcacacagcttactacatcaaggcgctgtccaaggatctgccgaaaggtaacacctggaggaagaggcggggacagagggcagggaagcagaggacagctacctaggagcccctggctgaccacagaatcatattacccttagcgtatggctttgcagcygggcaactaggggtgggcagcaggagatgccaggcctggggattttgtgctgtcgttggtctgcagtggtccacctggcacctaaacatgtcctccttgcatctagctgtggagctcctgggtgacattgtgcagaactgtagtctggaagactcacagattgagaaggaacgtgatgtgatcctgcgggagatgcaggagaatgatgcatctatgcgagatgtggtctttaactacctgcatgccacagcattccagggcacacctctagcccaggctgtggaggggcccagtgagaatgtcaggtgagagttggctggccttgtggggggatgcttgctccattctggcctggccagaccctttccaggtcacatttttagttggctagctgtcggggttattttcctgagttatgcaactggagacagtttctgtatccatgtggtccagtgagtcttttttaatggctttgtgggcttcacttgaattttgggctttgttttaaggtatgttttggtgcatgtcctgacagtccaagggcgaagtgtctgggtgtcccctccatgtggtctcttgtctcctttgtggatggctccgggagctttgatgctgcccttttgagagtcccacagtgttggctcacgccttctcagagaagactatgagcctgtcctgaagtcaggcatgaggcaagggcagacaagggttgccctctgggccctggaggggtgggtggcagagacaggggaagggggttgggsagtgtgctagggcccactcttcggagaaaccatgcctctcctagtctgcctcctcagtcccattcatgcatgtaccccaactcactccagtgtggtagaggtgttgacacactgaccatatgtcttgtaggaagctgtctcgtgcagacttgaccgagtacctcagcacacattacaaggcccctcgaatggtgctggcagcagctggaggtgagtgatggaatcactgaagtcctgggtagtggggtcccagccttggttatcaaagccgaggkcctggttcccaccataggggacctttcaccccaggggactctgctcccaccctaaccttgaggggaatgaccttcctcctgtgctctctraggtgggataggattctaccctgccgccaccactgggactggttacacaggatgctgtccctctggtacaggtctgtcttagccccacctggttctaggatactgagttcatgggctggtaggggatrtaagctcctggccttgttccttgtggccttgcccttgggagagccagccattagttgtgtgttgatgcatgcctgataacaaaccaagaagtgccttgaaaggaaggcacagaagggtggggaagatttcactggggactcagagttggagtttgggggaggggctttttaaagcacctgtagtttgaacagaagcctgaaaggtggtgagtgttatttaggtggggtgtggggagctgagcgcaggggaagagcagtgtcatggtctaaggtttgctctgctgctgtgtggggtcacagtgcaggtaggctggctagagaggggctgtggcagggactgggcaggagatggcaggagcaagggggagcagtagatggactccaggtggttttatagatggaacctggttggggtctggacatgggtaaggaactgaggtcaaggtgcttcccatcttggctggtcgtggtggctcacgcctgtaatcctagcactttggaaggccgaggtgggtgaatcacctgaggtaaggagttcgagaccagcccagccaacgtgacaaaaccccgtctctggtaaaaatacaaaaattagccaggcttggtggcagttgcctataatcccagctacttggaaggctgaggcaggagaatcccttgaacccgggggacggaggttgcagcgagctgagattgtaccactgcactccggcctgcacaacagagtgaaactccatctcaaaaaaaaaaaaaaaaacaaacatgcttcccagcttatgaccttggcggctgagtgtgcagaaaagaccaataggaagagcatgaccaggggctttggagctggggaacctgggggcaagagcaatctgacgtgtgtgtcagactagcagggcttgagctcatggaaggaaggaatgaaaggccaacgcaggccgggcgcggtggctcacgcctgtaatcccagcactttgggaggccgaggcgggcggatcacaagatcaggagctcgagaccatcctggctaacacagtgaaaccccgtctctactgaaaatacaaaaaaattagccaggcgtggtggcgggcgcctatagtcccagctactcgggaggctgaggcaggagaatggcgtggacccgggaggtggagcttgcagttagctgagattgcaccactgtgctccagcctgggcaacagagcgagactccgtctcaaaaaaaaaaaaaaaggccaatgcaactggtggcaccacagagccctcctcttgtggaggtgaggaggcaagatccaaggagtcctagggtatacgtttgtaacattatttgcaaatgtccccagctctcaggggacccaagagctaatcacagccctgtaatagctcctctttctgccccctcacttgccaccccctgcagggccagcagccagaaatacttgagggagagctagagggaaaaggcaggccaggtggctttgtgcccaggagtaccagtcttgtccttgatgtaggtggaatgcatcttctcaagtgagaacccacacttggatcacatggcagcccattttgaaactctgaacgcttttgctctcctgggactgaggccatgggagctatttggccctgaggtgcctgtcctgtccacaaggcagggtctgtctgaggaggaccttctttcctcaccctgttctaatgtcacatactcctggtttctcccactaagacaggacatgggggtcctctgcctgtctgtgaatcgccccaccctgtgccttgggccctggctggtcagtaatgccactgtctgtctcagcaggagtggagcaccagcaactgttagacctcgcccagaagcacctcggtggcatcccatggacatatgcagaggacgctgtgcccactcttactccatgccrcttcactggcagtgaggtatgctgccttttgggcaggagtagtgctcagctgggggcctgtgggaggacccccatgtgcatggttatcctggtgactccagagatacctcagcagttgggaaggggttctgtggctgctgcatcacaggcacacatgttcacacacatacaccctctacccacacctgccaccttttctgttcccctggcagtctggctgttcctcagccttgtcatgtactgtttcagatccgccaccgtgatgatgctctaccttttgcccacgtggccattgcagtagagggtcctggctgggccagcccggacaatgtggccttgcaagtggccaatgccatcatcggccactatgactgcacttatggtggtggcgtggtgagtgccagcgcgagcatgggacctcgccttcagggaagagagggtgctggggctgtgtgctcctgtgcgtgggggtcacagtgtgcgttgaagacaagagggtgggtgctgaccacctatccccctggcagcacctgtccagcccactggcttcaggtgctgtggccaacaagctatgccagagtttccagaccttcagcatctgctatgcagagacgggcttgctgggtgcacactttgtctgtgaccgaatgaaaatcgatgacatgatgttcgtcctgcaagggcagtggtaagtggcagcctggtattcctaggtgggatggcggctttaaccagcacagtgggaggctgagagatgacacactggctcagaatgaataccacccacccccccactttaggatgcgcctgtgtaccagtgccacggagagtgaggtggcccggggcaaaaacatcctcagaaatgccctggtatctcatctagatggtgagtcctacagctcagcggggaggggtagagtacatcttgccagcgacagcaccaaggtggccactgctcctaactaaccaaggttagaaaggaaaactttgaagaccacgccatgccccatcaccccacccttggagatgcaggcaggtgtgagacaggtccacagcccatcactgccataataggtgaccatagaagagagggctgtgatctgagtcagcatgaggtcagggaggtccttgtcaacctgaggctggagattgtttgtgtacctgtgggtccaggattgggctgggtggacctctgagccttctctcacccttaaaggcactactcctgtgtgtgaggacatcggacgcagcctcctgacctatggccgccgcatccccctggctgaatgggaaagccggattgcggtaacatggacccctgggagaggttctggagtcttggcctggcagacacctgggaggtgtagggttggggcctggcatarcgcagcctgctcctataggcatccctggtgtcctaggcagctgtcacctgcaggggtagcatagtgggagggcagggcataggtgctgatggctgtggagatgggcggggcccatggaggtctatagcagggatcccttctgcctttcctcttttgggctggggacagctgcatgctgcctgtgggagatctctgctagttggatgatgctgactggctgaggtggtggccaggtgcccgttagccagtatgccctctgcctcaccctgcaggaggtggatgccagtgtggtacgtgagatctgctccaagtacatctatgaccagtgcccagcagtggctggatatggtaagtggcctagggggtctgctctttgtttatttcctcaggccgttctcttggcctccccttccacctctgctcccgcactgctgctcagcttacagagcagccagttaaggccccaagcagctctccccagtcccctggctgccagggagttcttgctcagaaaacctgtcccagcagttccttgactgcctgccaaggtgccttcatcaataccctgcacccgtcaggtaacgggcacctccatgtggggtggggcttcaagggccagaacatgaagggacaggctcagcacccctgggggaatgttctctcctctctttccactcaaagcctgtcttgtgctgctctgggcagcatctccgagctgggtgcggcacagggccaggtgtccctgtgcaggccaggtaccccaccctgacgctccaccctatccccacaggccccattgagcagctcccagactacaaccggatccgtagcggcatgttctggctgcgcttytaggcgggaagyctatgtaagcaagagggcagggccggggtttgtggtccccccycmaccacaaacacagcacttcggctcctctaacctgtgccacaggtgaccaccaataaaatcctctgctgagaagtgtgtcatccctcttttggcattggcatggagtccatggggcagtagatggggagcaaggacttccctctagttctgtggctcctggatcctcctgccttcccacaggctgatgtgtcctcagccaggggcaagcgtgggggttgcagctgaggccggaagtctttgatgcctacagggagctgagcccagatgtttccactcagccacttaggggagttcctcagccagctggtcccaagattgggctgtgggagtccataggaagtgtaaacccagcctttgcccctgtaggagtcccagcctggaatccctgcaggctcaggtgggaaacccctcactgtggaccttgtgccaagtcaccccctggtggtccctggtggaccagaaggggccaaggggtgtctccaaggatgcctcttgtgtgtgtttactctgcattctgggaggaggatagcctggggcatagtgttctcatttggtttctaactgctgcctggacaagcagggcaggaatcctttgcctccgctgactcaggctccaagaatagccctgagctcagtggggcccgagccccctccctctactacatttgtcccaggcaagtccagagctgctggcctgacaatcccctccccattttcctgaggcagccaggacctggtacagctcttagctacctagtccctctgttatctcttttggctctggtccccatggtgggtgcgcaggtaggctgctcctcctgcaccccccagtgcttccacagtcaggttctctgggatcccagggggaagttgaaagcgaggggcccaattttcctttgaggaagtcgctgcctggcagtcacaagcagggtgctgggacaaggtcttttagaagatggctgttcagaagtccccccagcatcgtagcttggaagtagcccaaggaacccttgtatcactatcaccctgccccactgcctttccctcaccattggttgccatacgttgccaattcggagacatttgttaagcaccttctacggcccgggactggggcattgcgcagatcattctactttgtgaacggctggagagaagatgctgggcagcgcagaaccctgacaggcccaaccctgggtgctcatggaggtgcaacacccaggcaggggaacaagtgccaagtctgttgtcaagtttgagctcctggaggatggggcttcatttctaagcccagcctggcccttagaggctacaggtgtgctggacacgagagcttgagttgctgggagtggtctggttctaagggaccttgcgtaccaagccagggactctggtctttaccctggagccatgctggggaggtgtgttggaggttactgtgaagagaagtgacttggtcagagttgagattcagcatggggactctcaggccatatttctgtatcagtcttggtgagctgtgctgtggcagaacagaggtcatggccacacgaactggagccagctgtaggggacacaaagaggactacattcccagcagggctgggagacgcggaggcacgagtgggttggaggagggtaatcttccatagtccagtgaggagtttggtggtgtccagggtacagtgggatgtgtggggctgggacctgataaagaggccctggttggaaacagatggggtgaggtagtgactgaggccagggaaggaaatgttcagggaaagcttgggagggagaaggatgtgctctgggggctccaccgccctgatggggttgcaggtaggcactggcctcgggctgtgccctaggctgtgttcctcccaggaggccagagctggggcttcagagggccacactcctgctcgtgagtctcatagaagctccagacgtggagtcattccaaccttactcctaccttctcaacagcctctcccagcaccctttgagagaccctctcacagcagcctgtcctttcttttggaggcacctcaattctgatgaggtttgcctgagcacccaccctcccagctgggcctcctgtctcccctaagactggcccacgtgtgcacatatgtctgtaccgtactgtccatgccactggcctgctcttgcccgccctggctgcacgggaggaggtgacagtcttagggggaaggggctgcctgtgtgataacatacctggttctctgcagccccccacctggagcacaccttgcagggatggggggtcctgggacatggctgaggagaccctgaccttggaataaggtcatagcactatgccccaggatagtttggggggtcagtaataagggatagagccccagccttccttgggcaataggaaagcaggcagcatggatggtcttcactgcctccagctctggccacaccagagtcctcgggctgtggaggagtccagccagtgctgtccccatatctccctgtggatcccaggggaggctgtggggccgggcatattagaaggggcccagcagccttggtgagtatagatgtgctttctgggctgcccagagttattcaggattagcaggaaaaaaagggggagcaggacccagatgggggcctgcccttcttagcagtgcctctctgccttagtgtcacccatctaatggagagatatgcatatacagagccccacctccttcggacagtggccctggcgtggtgtgtgttggaggactgtccacagcctcagaagcgaagctgggggagggtgtgaagtcagcctgggtaaggggacaggagtaaggtagggggcagttatgaagctggaagctacaggtaccatgagggcagtgaggaaaggaggaaggggcccaaggggacctcggcctggtaggggagatgggtggcagggacctacaagaaaagtagatggaaggagaggatgcctgtgggtgaggacatgtaggtagggggacctggcctggggcatggagggctcgattcctgagagatgagctgtcactgtgggtggtcccgccctccacagatgggcggccccctccctgcaggcacagctggattgcatctgcctgtgacatggtaggggatgtgggacactgggatgtatgcataagcatgacacaggttctctcctccttccggcttatcccctacaaagagggggtgagttacttggatccaggccaaggggaccttggtttccctaagaccggcccagagtcactcatttgccagggcttcttgcctgtcaaggagatccgggtggggcccaggaggcccaccagacagatggctgaatcacaggagtggccggcgggacccatggcctgagggcttgtctgggcacccccactggattgggggtgagtcatccccaactgcagccccaccccccacggcgctgctgccttgtggctctgcaggaacctgtccactcctcagcctggtcactgtgattgacctaaagcagccaagacctgtgaccttagatggagttaggggtactccctcagcatctgcccatgcagaaccttctgggaaattcccagaagccacggggggtcggggggtttatagttaagtgcgtcatatcgtttgtctgggggaggggtggggggggcggcgacctctcagggatatgggtgagggcgggtgcctgggttcccgcctgccgctccgccccccgagatcagggacttttctctgctctgcccgagagactgcagcggcggcggcgggagcgggcggacgcgcaggcaagaccaggactcgggctggaggggcgctgggctcggacctgccaaggccacgggggwgcaagggacagaggcgggggtcctagctgacggcttttactgcctaggatgacgctgcggcttctggtggccgcgctctgcgccgggatcctggcagaggcsccccgagtgcgagcccagcacagggagagaggtgggcaccgcaagggaggacccggcccggggcactgcaccgtgccaccctccgctccactcggccttcatccccaacaccccccgcccacaacccagccaactccacgacgccccgcggattcctcctaattctgggactccccgaaccctccgcgatcggtgctgggttccctaaaccgcctcctatcctgttcctacccaaattctggctccctggatgcgtgcggggtcccctgccttatgccaatccacgccggcccctagaggctgacctcagtcccaagtccacacccgtgctggcgactctccctcccccgcacacccccaaccctccgcgggagtctgctctgggacccaccgagctcaactccctccaaggccctcaggctcaggccgattcggccctggtttgcataagatgaggcctactctccccaccatcccaagtcccagtgaggccaccgtgcgggtaggcgggtggttggcctcccagaagaggccctgatctctcctgcccgccccagtgacctgcacgcgcctttacgccgctgacattgtgttcttactggatggctcctcatccattggccgcagcaatttccgcgaggtccgcagctttctcgaagggctggtgctgcctttctctggagcagccagtgcacagggtgtgcgctttgccacagtgcagtacagcgatgacccacggtgagtaggggccctgggggctggggaccacgagatccccaccaagactccttccccagagagggaggagaccctggaaaccccaggccaggtctttgcagaaacaagttttggggaacctagagaccccctagccaggacctcctttggagacagaggtaaggattccctaggtagaaccttcgtgccctgaggcacctccaggctactgcaagacaggaaggtgcaagacagtgaggctgtgttttctgatctggagatggggagcccaggagggggcccccacgcctgttggattctccacgttctagccctctaacccttgcagccgttcaccagaggtgctccatctggccagcatccactttcctacatctggacccctcctcctgcaattatttaattaagcagcatcttgttccccacagactgtgagcccctaagggctccttcaggtctgcccaggcccacctgcagatggtgcacaaaggagcccctggggagtttgttaacctgggggttccagaggcaagtgggtgtggagaatgacagaacgaagggacccctcaagagagcctgatacccgtaaccctcaccctagaggcctcctcaaggccagggccagaagagatcctgagtcctagcctgttgccacccctaccctccaacaggacagagttcggcctggatgcacttggctctgggggtgatgtgatccgcgccatccgtgagcttagctacaaggggggcaacactcgcacaggggctgcaattctccatgtggctgaccatgtcttcctgccccagctggcccgacctggtgtccccaaggtgatccctacccctaccatgcctcccaagatgaccccaaatgaagtgtccaggggaaccgtgatttgacccctgcacctgtcccaggtctgcatcctgatcacagacgggaagtcccaggacctggtggacacagctgcccaaaggctgaaggggcagggggtcaagctatttgctgtgggtaaggaccgagcaggagtgacaggtcagctggggggtgggggcagtcagagagcatgtgggtgactgagtcctgatgggtcgtcacttcagggatcaagaatgctgaccctgaggagctgaagcgagttgcctcayagcccaccagtgacttcttcttcttcgtcaatgacttcagcatcttgaggacactactgcccctcgtttcccggagagtgtgcacgactgctggtggcgtgcctgtgaccygacctcgtgagttcctgcccacacggtgtaccctgacctagaccccggaccccaatccccacttggcagtgctgattccatcctatgtgctcctgaccccgacccc

SEQ ID NO: 96055 - DNA, 51138 bp, Homo sapiens
  misc_feature (1)...(51138): n = A,T,C or G
gctgcccagagccactgcagccccacccgccaccctggctcgcgcattgtcctatcgctggatgtccccatcggcctcttgcagatcttactggagcaagcccgggccagggctgccagggagcaggccaccaccaacgcccgcatcctggcccgtgtcggccactgctgagcctgagagagggggtcacagtgatagggccaccctggatgggaagacctggagggcagccacacagctggayggatgctgccacatctgggcatacagtgtctggacgctgccacatctgggcatacagtgtctggacactgccacatggagccactgtcatgcaggtcatatcagatctgagtgccccacagagtcacagtgtgtctggacagcctggacattggacattgctaagttgggtcactgccacatggagtcttgccatgcctgtgtgccccacagacctaatatatgtccggacagcttggatgctgccacgtaaggtcactgctgtggcgagtcttgctatgtctgggtgccccatagtcacagaacacctggacaccgccacatgcagtcatcatcatgttactttcaggagcctcaacacgagagctcaacactgcctccgaccagtccctctgaggcccacaggtctgtcatcccataggccaccacacagagaaatgctggctgagggtcacttgcttgctctgtgccccatgaggcagcacctgccccagatggacggggctgtgaggggtgtctccaggcacaaaggcccgaacacaggaagcctgtgaccatggcagccttgtcttatgggcgcatatgtgcgtgtgtggctgagtctctgacagctgtgagtgtgtgtgagcagggtaagggtacgtgaggggtctgagaggagtgggtgcttgtcccccaaacctgcatgaagcaagaacaactcctggccaggccctgtcctccccacgtacccctgcatccccagcctcgacccagggacatgcagggctcacaggagacagggctcaggctgccggagctccaaccaaactctgtcccacttcacgcacggactgtcctgggcaaaggtgttcacctttccgagcctcggtttccttatctgtaaagcaaagcgacaccagcaagcctgtgagcattgtgtatatagcagacatggaggtcctgcagcaggaggtgctcaataaacacaaagcgactgaaggatgggatgtgcgagaatcccagtggtgtgcacccaggccgcgacacatggtgggtgagtcatacctggcttctctgccttcctccctagctccccggttaactgacctggtcccttggtttggaaggactaggttttgcctgatttcacagcccaactccattgctgggccagagacagaactgactttccaggcagtgtggacgggcttgcccgcagagggggcaggcactctgggctgtgcagacaactctaggtggacatgaaggcagacgctgggtggcatgggcagctctggcgggagagggagactgtactggccacagcgtggccggctgactggagtgggggcactggcgctgccctcacagttgtaagcagccctgtgggggcgggcctacagtgggctggggaggcggggctgcaggagccgcaggagtcgcttctctctcttcagagtgctaggcggggttaccccactctggagctgcagggggcagtggccctggccagtttggttgcaggatggacagaggctcgttaggaggcagctccctgaccgacctggggccggggagcagcaggcggggtaggcacggsacagcgtggggagggtggagggttagggaaagacctggatgaagtcagggtggtgctggaggggtgcgagagtgttggggggtctctcctggtttaggggtgctctgagggccattcatctgtcagtggcccgaaggagggggaaaactgtcgccctgcaagggagagggggctgggccaagggggaactataaatagtgtcttcctccagcccagggggagggaccgccagctggcgctgcccaggccctcctgctctgctctttgctggcctccaagggatcatgtttgtccaggtttcctcttggggtcacaccagtttggggaagtctagaggctcatttaggatgggtttcacatgatgtggctttagcccttaaaccagcacttctagggtgtctgctgtgtgccctgtgccagtcctgagcttctctgaacacctgctgtgtactcagtttggtcatgaacctctctgaaccctttctgtgtgcccttgctggtcctgaatccctaagcacctactgtacgccctgtggcaggctggaaggaggaagtgcagatcagggttcccaggctgcttggtgacatggttctataacctgaagtcagaacttcacactccttgtgagccctgggcccagggagacacaggggacaatcctttgctggaaatggccagaggaagctggaattcctggaaactcctgaacctcccagtggacagcagggctgggggtggagagatatatgtgggaagggaggcagcagagagcagcaggccccactgcagcctgcctgtctctgcacatgctggggtgcaggacttgtgagtgtgtgtgcgtctgtgtgtgcatgtgcagctgtgccagtgtctctgtgtgcatcagtgtgtgggcctgtgtggcatgcactgaaacccctgggtctttatgctgcaaagggtggtttgtgggccagatgtggtggctaatggctataaacccagggctttgggaggttgaggcgggaggatcgcttgaggccaggagttcaaggctgcagtgagccatgattgcactatgtgctccaggctgggtaacaggagcgagactgtgtgtgtgtgtgtgtgtgtgtgtggtgggatggtttggcagttctgtcaggactggccagtagatacagggactgggaagagtttgagctttgagaactggccaccacatggcttctaggctgggacactgggaggaagtccagtggtcagtgcagagggcaccctgggagccaaccagggtcaggccagccaggttcatggtgggcagaggctgagcagaacatgttcacacgtgtgtacagacatcccagcatacttcccacgcctgggacagaacagctggctcactttcggatatactgaggaggaaaaagccatgagggccagagattctaccgggcatccgctgatgctgagagagcagacgctgggacagcatctccatggagaggacacaggggagtgggagcacacatgtgaaggtggactgtgcgattccactgtagtgtggcaggcaaggtctggaaggctgggagttgagctgagtccatgctgcactgtggactcgctttgtgatcttggacccttctccctcttcctgaccctcagtttcccacctgacaaacagggccatgggaggggagatggagaatatcctcagagcagatgtggacggtggccttggggaggaaccccaggcatctcctgatgttgacctgtggccttccagctggacatagggccttgaaggagggtgcctgggtcagccacgggtagactttctggggaagagaggaaggtgcagagctgttgcatttcctgggaaccaggctcatcctgtctgggtgtgaggatgccttcccagagatagccctggccccctgcccaggccagctgtcctctacccccagcccttgattagcatcccaggaggtctgggaagagaatggacaggccagaggaggtgctgggtgtctgtagatatcagaggagatagcttttgcaatgagtgctgcgggttagacagggtgtgggcatgtggtaatgaggtctcagaggccacggtggccccaagatggccttggcagtggccagaagacaagagggctggctgtgtcacgaacagaatgagtggctttggagaagtagggagcaggtcacgaggggcacccagctcatcaggagccgcccatggatgtgctcagatctgctgggactggggtggaggaataagcgggtagatactgcaaaaggaggatgaggaaggaggaagttgttgactctgcctggggcagggtgttcccagggcaagcagctagagctggtttgggggagggtccagatgggcttccagcatgtggacctttggaatcttcagttcctatgaagtgggcaagacatctgtgtcagtcatcttaagggtccttgccaagctttaaagagctgggtggacttggactgatccaaggcagggctgtggcagggagggcatgggagggggtgctacacctatagcccacgaggccagtcttgttgccagtcccatgccctcaacacctggctcctggctgggtacacactgggcagagagaacctgaggatgcagggcacctgccaggggtgttgtggatgacatcgctagagggcagtgtggctcaggttgaagccgtgttggtgggggctggggcagagagtgtacaaagcttggagaggcggggctggggatcccgaggaggcgggaaactgcaggagtccggtgggggccaaacaagaaagtgagccaggggtttaggaacttctggatctctcccttgttccttgtccccagtgcattttcaaagacaagagggagatacaaatatagtaaaaggcaaccataacgtattttaaaatgaatttcttagagattgacatacttaatttatactgtaatactgtaagatagacaatgtgcacatcccattttcctgaagagaaaatgttattaacatattagtttcaaaaaatatgtaaaactttagttaaaaaaaccaaaatactaaaaatcaaaaaaaaattgtaaaaaatgaaattctggaaagacgattaagatactcccagggcttagtgagtacccaaagtacttggttactaagtgccacgcacggccgggcgcggtggctcacgcctgtaatcccagcactttggaaggctgaggagggcgtatcacctgaggtcaggagttcgagaccagcccggccaacgtggtgaaatcccgcctctactaaaaatacaaaaattagcagggcgtggtggtgggcgcctgtaatcccagctacttgggaacccgaggcaggagcatcccttgaacccgggaggcggaggttgcagtgagccaagatagcgccattgcactccagcctgggcaacaggagcgaaactccgtctcaaaaaaaaaaagtcccacgcatttgctcccagcagccaaagcaaagaaagaggaacaatattgaaatgtgttttgagtctctatccatgaggtaaaagagcttttccagcgtggttgagcatgctcctatggacggcggaagagtcccggggctcggagcagtcaagggggaccccgaggaggggcaggagggcgcagcggagttgacggctgggactgcaggcctactggcccctgtcggctctgaccaacctggccgtgcgggtcacgtaggcctcgtcccactgcatgaaaacccctccctcctgggggccctgggctccctagcaaggaggtagcagaattcacgcgtgccgctgctcagggatgcagcgccagggcggagcccgtaggtggggcctatgcaaatcagcgcgggcaggttgggagagctgagtttgcgcatccggggcgggcctgcacaatccgggccttgaactggggcgggaccagtacaatccggagttgagcatgcgcattctcgatcctggcctgaagaactgggcccacttgttccaaaacgggcgggtaggtgagttgggcatgcgtggtcggaggccgggcccctttcagctggggcggagcctactcactctggggcgggacctgcgggaagatagacatgggctgtcgcggcttgaggaggggcggggcccaaggggcgggacctcgggtggcccgaggtggcccggctgctgggttggaagcggcgcagtccgactcatcccggccccgggatggcgtccccacgggaattgacacagaaccccctgaagaagatctggatgccatacagcaatgggcggcccgctctgcacgcttgccagcgcggtggtgaggcggggtcctctgggaggaggtgggaggtgcaccgggatgggtgggtagggcggcctgggcgggggtctcgcatggagaaggggcgggagacagatggggaaccggggacaggtgaggttgccgtgactggggaggctgctggggacaggtgaggcggtcgtgacagtggtgggccagagacrggtgtggcagagcagggggcggggacaggtgtgtgggggcatatcggcttggcggtggctaggtctggccaccatcacctcggggagggctctggccccctcgcttccctctccaatccccatcgcccccagtctggggaggaccctgtgggcaccccaggcccttccctctctcctggccaaggagtgtgggccgggttgttggactggaactgagctgtgtggccctaggtgaattacttggcctctctgagcccagaactttcaaaggtgggctagttttccaacaggaggaagggtgcctcttggccttaaagctgagcttgggcaggaacttcagcagagatgtgctcaggatagagacagaaaagtatgccgtgtgggcctgtgtctgtgtcccgggacatgtaagtatccacctggggtcatgggtgtacagtaaaactggagagtgaaacagctaggagaatgctgaaattcatggaattgttaaggggctcacctctcctagggtcccaggtgtttaaaccgcttccttgagtttctgcctgtccttaaatgagctggcagttttttttttttttaagagatgagtctcgctcagtggcccaagctggagcaagtgcagtggcgcgatcatagttcactgcagccacgaccttctgggctcaagcaatcctcccacctcaacctcccgattagctgggattataggtgcgccaccacacccagcttttttttttcttttttctttttttttgtagagacagggtcttgctatgttgtctgggctggtctccaactcatggcttcaagtggatcctctggcctcggccttccgaagtgttgagattacaggcgtgggtcctggcctgcaacttttttattaccaggaaaagaaagatttgttttaggagtaactgaaacattgtaatgaatttgcagcttgtccagcacctcagagaacatctagtttaacagacagtgaaatggagatcaggagattgagtgacatgcctgggtctccctgtgatcctgcctctgcttatgtatgataagcaaggggagagttctttgtgctcatcctgctgcagcagcctggagccatggctttgatcatgatatgagtcctgggggaagggtgtgtgtatttctggccacactgtgagtcctggcaggggaaggccatgtttctgaccagaccaagtcgtggtaactcatggctttgattgtgatgtaggtcctggtggggctgtgctgtctataatgcacactcagtcctgagggctatggccacccctcctttgagactcttctggaggcggggaggctgagccagtctgtgttattagggctgtgtggtcctgacttaggggggtggctgctattactacataggggaaaggagtgaggacctggacttttttttttttttttttttgagacggagtttcactcttgttgcccaggttgtagtgcagtggtcctatctcagctcactgcaacctctacctcctgggttcaagcaattctcctgcctcagccttccaagttgctgggattacaggtatgcgccaccatggccggctaattttgtatttttagtaggatggagtttcaccatgttggccaggctcgtcttgaattcgttatctctaatgatctgccccccttggcctcccaaagtgttgggattacaggcatgagctgccatgcctagccaagtctgtgagcctttaaggagtaggtcctcaataagcggaggcagggtattctgtcatcactaccattctttctttgcttctcactacgtctgagtcagggattgatgcatcagctccaagccaacccccgttacaggtgagaggaagctgaggcccaatgggaaggtctcatagctcctgaggcagggmttgtgtttctccaggctctaagtgtggaactgaaatgtggctctggcctgagctgaggggctcgtgccatcacggtgtctcagggtgttggggtaggctgggttctaggtccgcactttttcctggaggaggaggtagcacctgagaggccaaagatgagacctgcaggttgtttggggatttgggcctcagggttcacagcagggagtgggtaagcagtgaatgaacatggaacccgcccatgcagcacctccagctcccagtgcctgcatttgggcaacactttaccctttgcatagtagacttgtaggttgagtgactgcaaggacagtctggacccggagggtgtgggtggggatggaagcggatttggtcccagggctttgtggggaggaagaagcaggacccactgctggtctgtgctttgtactgggttttctctggagtctagtccccagctcctcagggcactaggggctggtggactgagggatgtactgcacctcctccactcccacaggcacgcccccrcttgataaaatttaaagccacacctgagggcttgggaggcttttacctttcccatcattggcctccgagctcagacctggaggaactctgagggcaggtggggcaagagctgactcaggaaggactgcagaaaggacggtgtttgatggcttttctcagctgaaaggtggcaagactcttcctgggtaaggacatgactggtgtgtgcacagggcaacaggagagatgactttcagtcccctctgaaaagggcctccatggcacgttactttattttaaagagctcttccttccctagcctggcctaaggaggtgagagcagttgcagttcaggagtcaattctggcaccccctccagggacttgtggctgctccttgggtagaagtaatggaacatagacactgcccattgccaggcacgtctcaggccccttgggccccttcgctcctagagctcatggggcctgcagcgaatttacaggaaaggaacccatgagggaagttgggctgacatgtcttcacatttccttccgcacatgctcaatgttataaacagtgtgttcttttttttttttggagacagtcttgctttgtcccccaggctggagtgcagtggcacaatcttggctcactgcaacctctgcctcctgtgttaaagcaattctcctgtctcagcttcccgagtagctgggattacaggtgtgcaccaccacacccggctaatttttgtatttttagtagagacagggtttcaccatgttggccaagctggtctcgaactcctgacctcaggtgatctgcctgcctcggcctcccaaagtgctgggattacaggcatgtgccatcacgcccagctataaacagtgtattctaccatcctgtttgctcagtgtcagggtcctgtgggctcagagccacaggtgcagccgtgcacccagcccgcttagtccacgtgctctgtttygagagctgcaatgtgttccctccttgttgtgcctcagttggcaatttcttatggctggaatttcccagtgttttgctatggtaagcagagctgttgtgatacacttgaactttggttttcttttgggtcatttccttgggagcttatcttggggagcagaggagataggtaatttattgccttgttttgcacccaggcctgatttgctgccctgcctgcccaccttgtgctgcgcatgtgggtggaaggcgggaagggaaawgccaccaaatgccatgggaggaggctggagctgtctctgggaaaataggagatgtggagagggggtgcagatccccagtcctgaggttttgggagtccctgaaggagcagttggggggtggccccatcagcgggagcagggtagatgcaggatttcctcctgcttagcagctgtcgcactgcccttggttgcttgagagcccggccacctggccgggaactatgcaaacaatgcacaatgcgggcctcagctgtccaccggccctgaggaggcaaggccttgcctaacttgttttcctctcaccttagctaatactgagagttctctgcaagtttctccactctcactcagtcagcctgtttcatggggtctcctccttcccgcccctgaggctcaccatttgggtcacctttaaacaaggggaatgcacaggagtgatggagcccccactggcaagcaaggccctttgtttctctgcagggcctgcctggggccaggccaccgcctccatgccctgagtcccaagggcagtcggtgccgaggtacacctatggctttagctcagtatccgccagggtaggacagagggcacagcttcccagaagtgcccaggctcttggatagcactaggcttctctgagggatgactgccccattttacagctggggacaccgaggctcagagttcccaatgagtgtcagactcaagatggcaacccaggcctgactcctgatcccctgcggaagtgcttctggggcctctgtgctctgagggaaacaacttgttggtggggacagtctgtctaggcaaccaggtgaaggcacttgcagaaccaagaagaggggcagtgacaggtccccacatctgttcatctgcctgtctgctatggttttacctgacccaggtcctaaggatgaggaaaaggaagcttcctgaggcttctgacgtgagaccgcgtttgatggcactggaaactgagctgagggctgggctcacgcctgtaatcccagcactttgggaggacgaggcaggcagatcacctgaggtcaggaattcgagaccagcctgactaacataatgaaatcctgtctctactgaaaatacaaaaattagccaggtgtggtggcatgtgcttgtaatcccagctacttgagaggctgaggcacgagaattgcttgagcccgggaggcagaggttgcagtgagctgggtaccagtgtcctccagcactccagcctgggcaagggcgacagagcgagactccctctcaaaaaaaaaaaaaaaaaaaaaaaaaaaaaaagaaggctggaggtgatggctcacacctgtaatcccagcactttgggaggcccaggcagtcggatcacctgaggtcaggagttttgagaccagcctgaccaacatgccgaaaccccgtctctactgaaaatacaaaaattagccaggtgtggtggcaggtgtctgtaatcctagatacttgggaggctgaggcaggagaatcgcttgaacctgggaggcagaggttgcagtgagccaagatcgcaccactgccctccagcctgggcaacagagtgagactccgtctcaaaaaaaaaaaaaaaaaaagaaaagtgagctaggtcccataagatgaagctggcagttctgctgccttggtatctgttctagccagctgggaatatagggggctgtattcagatccttccgtgcctctagcctggcatcttctctggctggcacactgacctgtggcacatggatggtggtgggtgggctatcagagggactgtccttgtgggcatcagtctgggtctctggtctcaaccccttgtggtccttaccctgagagacttctagatgcctccctccctgatcctgcccacagttcctgagcaccagcgctgtgccaggccccagggccctaaagggctcagataccacagggcttcttctgctgtaagtgatcagtctagagagaagagtgtcattagtgaggtgaccaggattgagggtgaggggtkttcccggtggccatggagatgccttggggaaaggactcattgaggaagtgactttttagctgggctttgtatgatgaaaagaagttcaccacagggagggcatgcagtggggctatgtgttctgggagcactgagtgatggatggggtgggagagatgtaaaaaggttagggtatggattcctggatgacagaggcagggtgttgattaccctgctgggttttggtcctgtccttcatgcggtggggacccccctagccatgtttagccagtggcaagttcggttgactttatgcctggtggtgcacatcaggatgaaaagggctggagagatcccactgtgtctgccagagcccaggcgggcctggggaagggggacatgccaacggtggcttgaaaccagcatctggggccactccaggagctgtgtggggatgctaggaagccaagaagatacgtctgatgccagtcccatgccctgaggctgagagaccacaggctgagagggaggggtgcgctgggagggtcccagccctcatctgacactgtgctgcttgccttttagtgtgcatgaccaactgcccaactctcattgtcatggtgggcctgcccgccaggggcaagacctacatctccaagaagctgactcgatacctgaactggattggtgtgcccactcggggtgaggcttggccccagctgtctaaggrgagctttgtggggcatgacgaagagaatagagaaggcctattctctattatttggcctgggrttgggtcaaggtcagggttggtaggggttgctgttgctgtgaaagctgagcckctccttccctccagagttcaatgttggccagtatcgccgggacgtggtcaagacctacaaatcttttgaattttttctccccgacaatgaagagggcctgaaaatcaggaagtaagtatatgtgttgggtgtggggggagaggttgctgggggacccagtgtggagaaagctaacacattactgaccatttactgagaagcccctggagtggagctgctggtgaatgactgagctactcctgagccctggccttgcccagccctgatggctgtgtgacagggctgtgtgacaaggctggtctctggatctctcaggatgtggtgggggtgggaggtgatgggtttggggatgagaggagagggtgtgttgtgtggcctcctggtggctgggccattcctgccctggggttaaggaacccttgggaaggacagagcttcagggaggtaagaggggctcagcccatgcaggtcgttggagctgctgcctggaggtcacgctcgctcaccccagcgccccgtggggatggctgctgctggggaagggaacctgagtgagtgcaggcatacaggccttagggatggagctgggggtggggggcttcctcccttgccccaggataagctctctcctgtgtatttggagcatgttcttggtgtgtgattgctggtgcgattggctttgcattgacatctcctagatgctgctgggtragtcgttcacacttctgctgttactctggagatagaaatatgtatatgctaccgccccaccctcaacaactttcagacttgaactgagtcctttcttcaaggaactgagcaccagctggtggtctgagcagccatgctgtgcttttctcaggaggtgttagctgtggtcttgagaagccccttatcaacctagggtggcagagacttgctcttggcccagccatcaggatagggcagtgagcagaggttgacccagctctagtgacttccccaaatcaagcccagtggctaccaggctgccactggggtccacactaggctacccgttccttctctggccaccagggggcaggaactccctgctgtggggcttggaccttcagactggagactgcctttgttcttgcatcggtgtggctgggccaggctgtggcaccaagaagggaaggggagcctgatattcaggtttctatggccaaattgtgggtaaaaatcaaggctggaccctctggttatattgagccagataaaaagtagaggactaatgtctgaacctaccgtgtgctgggttcttgatgcccattgtcaccccctacttttacagatgaggaaactgaggctcagacaggccaggagtctcgcacaaaatagcaagtttacatcagcgcccagacttgaatctaagcccatccaccgctaaaaagtgtccatcattccaatattcctcaataggtaggtcaaggaacatcaaatgcaaattttatttatttattttaaaaattattattatttgtgtgtgtgtgtgatggagtctcactctgtcgcccaggctggaatgtagtagtgcaatctcagctgactgcaacctccgcctcccaggttcaagcaattcttctgcctcagccaacaaccccaagctgtggacgctgatagcctactgtctgatcttcccagcagcttctgtggtgggcggtgcctcacttttccagatgctgggaccaaggccagaaagtgatgggggtgccttgggtcactcagggtttgaatttgaagtccgtcctgcctgaatccatagtgtttgtggggagagtctgccagctgttccactctggctgtccccctaaggtagggatatttgggattaattcaaatgaagagacctagactcagagaggttgggaagctagtccaaggtcaccctgcaacagaagctggggacaggctcattgctgcctttctgcaggcataccctctggctgccctagaaaccctctctgctgtatccgaatcctggctctggctgggccacagggccatctcctattaatcagcccaaaatttcccaattagcaaaataaaaggaccagagtttttaaaatggaaaacctgggaagagacagctgcatttcccagaggcccagttactcacacagtgttgaggtccatctctgacactggacacagcagaagatctagaaaagtgcgtgcaaggccgggtgcagtgattcacgcctgtaatcccagcactttgggaggccgaggtgggtggatcacttgaggccaggagtttgagaccagcctggccaacatggcaaaaccccatctctactaaaattacaaaaattagccacatgtggtggggcgcctgtcatcccagctacatcaggaggctgaggcatgagaattgcttgaatctgggaggtggaggttgcaatgagccaagattgcgtctctgtgctccagcctgggtgacagagtaagactctgtctcaaaaacaaagtgtatgcaagggcataagtacacatattctaaacaggcacactcatactcctgcacacagtcctataccacacacaagccccctatgcacacacacacgtgggcacatgcatgcatgtgcatacctcataggcacacatccggacatgcgtataccatatgcacagggtacatacacatgcacaccccctgtgtacacagtcacgttatacataagggtatatgtacatgtgtgggcacctacacatataaatacttgggctcacttaagccacacgtaattcaagggccattacacacacgaaggcgcacatgttctcaccctgtatatacacacacacctgagcacgctcatacatggtgtgtagggggtccccaagactgccctcaggttcagtgatttgctagggtgactcccaggacttggcatatagctggactcatggctaagacttagtacggcaaaatgacacaaagcaaaatcagaaaaaggggcctggggtgaagtccagaggaaaccaggagcgagcatcaagattttctcctcatggagtcacacaggacgcacttaattcctcctgcattgaacattgacaacatgtgtaaaatgttgtctgccagggaaattcatcagagactcaacgaccaaggtttttactgggggctggtcatataggcaccctgtgcctagcatgtaccaaaattccagactcccagaaggaaagcagataatcaacataaaccatgttgtttgtataaacagtctatgcacagtgagctcctcttataattcagggaaagtttcatatcactagagggaactgtttaccatcaagttccccaaccccggccaagggccaacctcacaagcaggcctttcgaaggggaccattctcatacctgctgtgttaactcttccacacacatgcagtcacccactacacatgaaggtgggtgcacacacatatgcatacctcagagtcatgtgtgtgggcacatatacgcttgtgttcacctgtatgcacatgtggatctgtgcacatgtacacaccaagcatgatcgcatatgttctcacacagtcacatggcacatgaagacgtatacacacacaccatgtgtacacacatggtcacccccacatgcatactctgtatatgcttggacacacacacacaaacttatacacatgggtgcatgcacacacatcctgtgtgcacacatgtgggcacactcactcatacctgtgcccatttagtcacatacygcacacaggggttgtgcacgctcgtgtgtgtgcacctgtgctcatacatgggcccagggaatactcacacaggtacactcacagatttacatgtacacacttgggcacaacacacacataaccacccacacgtgtgkattcatgcacatatgcatctcttcaccccatttgcactctcttatacacacacacacacacgcacacacacaggctcccaggctcttccctcagcatctccaccggggccctgaggtctctcctgcatggtggtgtcatggccagagcagcccacaaaagagatcttagcccagaacgtggggctctaaggagaaatgtccctaccaatgccagttacctggactctcagaattcagatgtttttggcatgaggaagaaagcactttgaggctttaactggaagacccattggggcacagaaatggttacaagggctggacatagtagctcacatgtgtaatcccaatattttgggaggctgtggcgggaggatcactggaagctaggagttaaagaccagcctggggaacatagtgagaccctgtctcttaaaaaaaaaaaacaaaagaaagaaaagaaatgtcacaaggagccgtaagagtagagctcttttcagtgccctggactcagctctaccactgatttctttgtggttctcagatcagcttctgccgctgtatttcaggcatatcgtcctgatgagagccctttgactttgacatgctgggagtttaaacacaaaatccaaagatcaacaaagccaggagggctgggcactgtggctcaagcttgcaatcccagcacttgggaggctgaggagggtggatcacctgaggtcaggagttcaagacccacatggccaacatggtgaaatcccatctctactaaaaatacaaaaaattagctgggtgtggtggcacatgcctgtaatcccagctactcgagaggctgaggcaggataattgcttgaacccagaaggtggaggttgtagtgagctgagatcatgccactgcactccagcctgggcaacaaagtgagactctgtctcaaaaaacaaaaaacacaaagctaggagatctagctttacccttacatagaaaaagggaagataatagataaaaaggtaatttatctatctccagacctcataggataaattgatgagaataatcctggctgggtgcagtggctcgcgcctgtaatcccagcactttgggaggccaaagtgggcagatcacttgaagtcaggagttcgagaccagcctggctaacatggcgaaaccccatctctactgaaaatacaaaaattagccagatgtggtggcacgtgcccataatccctggtacttgggtggctgaggcacaagaattgcttgaacctgggaggcagaggttacagtgagctgagattgcaccactgcactccagcctgggcaacagagagtaagactcttgtctaaaaaaaaaacaaaccttctgtgtcaatccactttgcagcaataaatgaaaaagctgagaacttaaaaagattgtgtaagcctgggcaacatagcaagaccccatctctaaaagaaatttaaagattagccaggtgtggtggcatatccctgtagtttcagctactctggaggctgaggcaggaagattgcttgagcccaggagtttgggctgcagtgaggcatgatcccactgctgcactccagcctaggtggcagagcgagaccttatctcaaaaaaaaaaaaaaaaaaaaaaagatctgaaaactgtatagtcagtgttcggtcataggtgggggattcccattctggagggtatggatatgatagaagaagagatgcagaaccctccctcagaaggggtggtttggggaactctctttcaggaaagaaagttgagcactaagcctaacactgcccgagggccagccctagtgttcctcccatccccaccaccaactcctgacatgcacacaagaaaacggctgcttttaaaaatgcttattttgaaatataaaaattagctgggcgtggtggtgcacgcctgtaatcccagctactcagtaggctgaggcacgaaaattgcttgaaactgggtagaagttgcagtgagccgagatcgcaccactgcactccagcctgggtgacagagcgagactcagtctcaaaaaaaataaataaataaataaaaggcgggcgggggggggcttattttgataatcagggaaaatatatgacaattagaaatcatgaatgtggcacaatgacagcatggatttgtgcacaatgagaggatgagggaaaatacagaaacgtagtgcttaaaaaatgttcctaatagccaagagtgtatagccttccacctcacaggagcagagttagccaaacactgaacattatcctaaggaaagagaagggaaactttgaaaagagagcaagagacctcggggctgttccttctcctgtcatgtctcctcctgttgtgtgtccctggccaccctcctggagccagggtcgggtgctgggctgaccctgtgttttctctcctgaaggcagtgtgccctggcagccctccgtgacgtccggcggttccttagtgaggaggggggacatgtggcggtgagtgtgacaccctggtgacagctgggagtgacacatgggagcccatccacatctgtgcctttgctcgtcaggcatctggaggggaaggcagggtgtgtgtgccccagctgctctgggtgccagcccttgggaggaagtctgcaacagctatgcaggaggaagccagagactggatatgggccaggagtttccctctgggcatgtggtggccgcatttgaccctgcaggacttccctctggatgcttgtattcttggccaccccagaagttacaggtatcaggttgcctaagtctttagtaaatgtgatttctcctggtgtggggagaatcctgcccagcattactggttgttgtaggaacccactgaatcctggattaaggggattccacctgtgtgttggcccttctagtcagacggaagagcagaacagggctaaactggggtgtctgtgggaaacggctctaccccarccttatatagtcaaacacaggggctgttctttcccttccttcttcttcctggagtcatgccttctggagttctctgtccccagctacaatctgtgcctgtagcacagccattgcccttctctctcctgggttgaatgttctgcctgtggatcccacatcatcctctctttgacttactgatttgtttcattgaagcacatcctccagtaacttcctgagaaaggtgcttggggaggtaaattgtgtgagaccttgcacatctgaaatgtctttttttaatcctcacatttgatggttgggtatagaatttctaggtggaaagtgcttttcccttagaacttctacaacatcactctgatgtcttayggcttctagtgtggctgtggagaagtctcatgtcattctgatttgctgatcttcctaaaagcttcatctcttagagggagctgagagtttctcatgccccttccgcttgggaggcctttarggtcttcaaggtgatgtggtttgtggtgggtcttctctccaccatacatggtcctagggggccccttttcatcataacactcttgttctccaggtcagggaaattgtcatgtattatttctttgacaaatcacctctgcccctttctggcaactcactccatccctactcccattttctgagctgctttttctagaacttctggtggctacatgctagcttgattctgagattctgattttatcttttttctcttaattttctttctttctttttttttttttttgagacggagtctcgctctgtcacccaggctggagtgcagtggcgtgatctcggctcactacaagctcctcctcctgggttcacgccactctcctgcctcagcgtcctgagtagctgggactacaagcccccgccactgtgcccggctaattttttgtatttttagtagagatggggtttcaccatggtctcgatctcctgacctcgtgatccgcctgcctctgcctcccacagtgctgggattacaggcgtgagccaccacgcccagcctttctctttattttctctgttttttttggttgtttgttttgagaaagacttcttcaacattatcttacaagtatatgagtgttgttgttttttatttccttgagacatggtcctgctctgttgcccaggctggagtgtagtgtctcaatcatagctcactgcagcctgtctcctaggcttaagtgatcctcacacctcagcctcctgagtagctgggactacaggcacgtgccaccatgcttggctaattcttgtatttttcacagagacagggtttcaccttgttgagcaggcttgtctcaagctcctggcctcaagcaatttgcctgccccagcctccgaaagtgttaggattacaggcataagccactgcacccggcccaaatttctttttttgtttgtttgtttgatttagtttctgtttttcttgttaaaggttttgctggagtgtccagtgagccctggctggatgccctttttaaaaaagtgatgctgggctgacatggtggctcatgcctgtaatcccagcactttgggagtctgaggcaggaggactgcttgagcccaagagtttgagaccagcttacatagcgagactctgtgtctacagaaaaatttttaaattagccaggtgtgggccaggtgcggtggctcacacctgtaatcccagcactttgggaggctgaggcgggtggatcacgaggtcaggagatcaagaccatcctggctaatatagtgaaactccatctctactaaaaaaatacaaaaaattagctgggcgttgtggcaggcgcttgtagtcccagctactcgggaggctgaggcaggggaatggcctgaacccaggaggcagatgggagactgaggcaggagaatggcgtgaacctgggagacagagcttgcagcgagctgagatcgcgccactgcactccagcctgggtgacagagcaagactccgtctcaaaaaaaaaaaaaaaattagccagatgtggttgggcacagtggctcacccctgtaatcccagcactttgggaggccaaggctggcagatcatgaggtcaggagttcgagaccagcctgcccaacatggtgaaacctcgtctctactaaaaatacaaaaattagccaggcgtggtggcacaagtagctgtaatcccagctactcaggaggctgaggcaggagaatcgcttgaacccagtaggcggaggttgcagtgagccgagatcacgccactgcactgcagcctgggcgacagagcaagactctgtctcaaaaaaaaaaaaaaattagccaggtatggtggtacatgcctgtaatcccagctacttgggaggctgaggcgaaagaataacttaagcccaggaggttgaggctgcagtgagctatgattgctccactacgctccagcctgggcgacagagtgagaccctgtctcaaaaaaattttttttaaataaaaacaaaaaaatgatgctgtaaccgaggtgtggtgcacacttgtagtcccagctactcaggaggctactcagaggatgcttgtgcaggccccaggtacttctcaaagagctccagatgggtcagtgcctggctggatggggttgggaagggggcctgggcctccagctcttctttatcagccagctagtcctcccatttcgtccccacctttgtcccttttcttagcaatgccactgcaccctctggagtgctctggtcctgcacaggtggtgtgctctggttggccagcacctgtgtttggtttcctacatgactctgagtccgtcaccgtggatctctctgacagaattgtgttgatgtctccatctcctgttgtctcctttttctcctgtcatctctttttctctttatccttctgttcccattttactggggtgtcaggatggagtagaaataaacataggttcagtttactaggtttaactggtttcactgcaattcctgttggtcaaacacaaactgagtgcccactgtgtgcagagcagcactgagtaggttcttctgtgccacgggtctgctcccctgctgggagcacaggcatcctctccttctaacttccttggggcattctctccaaggaaggggagggccagcccagccgttgcaagtctggaggagactggccaggcaggtggacctggcagcagctggtccttatgagaaatccagtccccagagagcctgtgctgcggccctcactgcccacttcagggcccactctggccccttccttccccagggccagaggctgagttaaccctagtttggtcctaggtttttgatgccacaaacaccacccgagaacggagagcgaccatctttaattttggagaacagaatggctacaaggtgaggcctccttggctcctctccttggyggaactgtggcatgtcccctgccctccagggctcctttcaccgcctgcttatgcatgaggggcatggggctggcatggctcctgagtgtaatttgggatgagaggggctgtctccacttggggtttgctttccagagggaagggggttttcgtgggagagtctaggagagggcagcacctgctttagctctggactccttgacyccgcctccagccctctgaagcagggtttcagggcctggctgcttgtcagcatgggcctcaggggatggagagctccgaggagcaaggcgggaggccctgaacrtgtccgtgttcctccctcccaccaccccggcgcttctggtcctgccgcagaccttttttgtcgagtccatctgtgtggatcctgaggtcatagctgccaacatcgtggtgagtagtgcatctgaccttgtcagaaggtcgtgtgtgacagggacatcccttttcaggttttggctaaccttaatttgatcttgaaccttgtgggggtagggaggaagtgtaacttcaaatgctgggtcaggtatgcctcgccctctgtggatcactgtggaaggctgggtggctggtggacattcactcaccccacctccccctcgtaaccacctggacactaggagagcaccttcagcaggggtggaagggtgggtgaggggcatgttttatatttcagagaaagaaagactcattctttccttcccctcccccagtttatctgaggaatgggcatctgggtctgggaaaatgagagttcagggtggggaacggcctccaggcctccccctgtaccacaaggatgagggacttcaatccctggaccctcagtgataccctcttggcactggtgtgagaactcagaccagggagctgctggaccagcccccacctcagcttccagcctcaggttcccgcactggtctccggtgcaacctcctccagccccctgcccagcagtctccttggtctctggccccgcctggctcctgaccctgatatgtcctttctctgtgcctggctccggcagcaagtgaaactgggcagccctgactatgtcaaccgcgacagtgatgaggctacggaggacttcatgaggcgcattgagtgctatgagaactcctacgagtcgctagatgaggacctggataggtgagtcagggcagcgccaggccctgcagctgtgatggtgggcggcaggggtcatacttggctgcctcctatggctccccatggtggtggctggaggaccaaaaagcagagatggtctgacctttcttgtttatttccttggggcagaaatgtttggtcagaggtgacttgcagaacaccggttacctcatccaaaactctgcgagtcaggattttatactattccatcatgaaatcaagccgaatttctatgcaaggggtcttaaagcaggggttggcaaatattttctgtcaaagatcagagagtaaatattttatttagaccttggaggatgtacagtctctgttgcaggcactcactctgctgtcacagtacaaatgaaacatagatgatatgtaaatcaatgggcatagctgtgttccagtaaaacttgataaaaacagcccacggctgagttcgactggctggccacagtttaccaaatcctgtcttacagaacacatggggcagtggctgggtaaataataatgtagcccttggtgaagtattacagtcatcattacaactcgtcattgtggagagacatgggaaaatataatattgcattcagtgaaaaggctggaatacaaacttgtgcttaggttctgtaattctataagattgtgtaatacgggccgggcagagtggcttatgcctgtaatcctagcactttgggaggctgaggcgggaggattgcatgagcctaggattttgagaccagcctgggcaacatggtgaaaccccgtctctacaaaaaatacaaaaattagcctggtgtggtggcgcatggctgtagtcccagctactcgggaggctgaggtgggagaatcacctaagcccagggaggtcaaggctgtagtgagttgcagttgcaccactgcattccagcctgggtgacagagtgagaccctgtctcaaaaaaaaaaaaaaaaaaaaaaaaaggatgcacatgaaccaagaaacacaagcaactctgagatgaatgcttttggggtgtgcatagagcagggtcctcagctgggttctagagccagcccaggccgggcctgagctgaatggcayctgccacctgggcctctctatggctttcatggtcccccagcacagcatttctcttcatggttctgtgatgtgatccatttgtctggagcrgcttctgttggatttgtcagtaagcgttgctcttgcttttattggtggtgtcatcgtgacacccccaaaccaaggtcccaaggtccagacagtgagagctcaactgagaatatccagaggactctcagcctgaaccagagcccaccctgcacccccacacccagagactgatcaatgtgctgtccaagctgcagtgccacataggtccagagtagggaaagtggctgagctggacttatcggctgccaccaccagcaccatcctcctgtgcttcctgtctcatccaccagctgcccaggatggggtgtggcagctgctcagcacacttggatgaccaggactgggctctagtgggaggaggtcactggggaaggaaaggccaggtccttgtacagctgaccaggaagagtgagggcgtggagcgtttgccagctactcccaagtcaacaaccctcgggaaaactgtctcttggttcaacttacagacagtgtattgagagtgcggagataggccaacaggggccccagggacacatgagcagcggagaaagtcatgatgtggtatggcggaccccccactttggatgtcacctttgggaagcatgatgagtgacgagcacctcccatctcccgtctcccacagggtttgcctgtgcgtcacacgcactgtgttgctcccgcctcacccccatcactcgcacaccagctgacggtcctgagggttgtaatctctggtggttggaagtgcaaggcctcgcagctagattccgtggctagccagatgtgctctgtgagaaccctggccacgctcacaggcctctttctactttctctctgsacagggacctgtcctatatcaagatcatggatgtgggccagagctacgtggtgaaccgtgtggctgaccacatccagagccgcatcgtatattacctcatgaacatccacgtgaccccccgctccatctacctctgccggcacggggagagcgagctcaacctcaagggccggattggcggggacccaggactgtcccctcggggcagggaggtcagtgcatgtgtccctgcgtgcgcacacgggcctgcatttgtaccctgcgtggctgggtatatgcatgtgtgagtgcgctggggctaggctcccattcttttaatgtgcagtcgaggtgaatgaccttcattcaacctagaatcttcccatcatgtagggaaggtcatcaagcaacaggcaaatgcctggatctctggtttccatgtgagctgtcactcactgagccccttttgtcagaggcatgccacccttagagcgacctgagtccatacagtgtagcagatagctgtgccacagtccaggggagacctcagtggtcacgtagcacagggcacctggttgtggggaggcagtggccctgatgagtctcagctataactgtgctgctgtgctcagggtctgggagggtgcacaggaacagcacttgtgttcttgtgtgtcagcatgtgtgtcatcgacaagttagttcatgctttttaccaaacctgtagtgagtgttcaaggcgagggtgatctcatggaccctgcggctatgggatgctttaagggcagcccaagacctgtgggtctgagtttgcttatgatgtatttcagtttgccaagagtctagcccagttcatcagtgaccaaaatatcaaggatctgaaggtctggacaagccagatgaagaggacaatccagacggctgaggcactgggtgtgccctatgaacagtggaaggtcctcaacgagatcgatgcggtagttaccgtccctccctccctgtctacctcccagataccgcagggctgctgcatcatattgtaacaacagtgaccattgctccccttgggcaaaggagaggagagagaaaggatacaggaacctaggggctgggagcagagaggaaaaggcagcctaacaggatgggaccttgggtgagccctagaccattctcaggagtgagcctgggagttgacacctcaacctcactctcctccctccctgtggcctcctgctagggttcctcatggtctagctcaacaagaaatcagcggccacgggagcttggtagctgcagtcagccatagccaacctcccagggatctggagacacaaatgaggtgaaccagcacggcctttgtctctttaaagatgctgttctcgccaggtgcggtggctcacccttgtaatcccagcactttgggaggctgaggcgggcggatcacctcaagtcaggagtttgagtccagcctggccaacatggtgaaaccccatctctactgaaaatacaaaaattagccaggcatggtggtgggtacctgtaatcccacgtactcgggaggctgaggcaggagaattgcttgaacccaggagacagaggttgcagtgggctgagattgtgccactgcactccagcctgggcaacagagtgatgttctgtctcaaaaaaaaaaaaatgctcttctgctgacttctgggttgcattgtttctaagagaagtctgttgtcattctcatctttgctcttctggatataatgttacctcctttttctctgactgcctttaatattttcttttcttcttttttttttttttttcaagacaagatcttactctgtcacccaagctggagtgctgtggtgcaatcatagctcactgtagcctcaacttcctgggctcaagccatcctcccatctcaacctcctgactagctgggactacaggcacttgccaccatgccaggctaatcttttctaatttttgtagagacggagtctcatgatgttgcctaggctggaatattttctctttattgctgatttttagcaatttgattatgatgtatctcagtatggttttctttatgtttatcatccttggggtttattgagattctcggatttctgggtttctaaatataaaatgtgaagaattgttggccatcatttcttcaaaggtattttctgccaccccttctcccatcctggactcccactctgtgtgtgttagactgtttggtatcatcccacaggtcactgaacttctggttttttaatttcttctgttcatttcttctctgtctttttttccttccgagctttaatttagatagtttctactgctatgtcttcaaattcacttatctttacttctgcatttttattaaacccatccagtgaacttttcatatcagatgtggtgttttgaagctccaggaatttcattttgttccttttttgaatcttccattatttcttcattatgcttggctctgcagtccaggaagtgcctctgggcagtaagctgctgcctcctcccctcagcttgcttcccttctctcaaggatcacagtcctgcctagtctcgtgtctaaaaacagttgtttgatttgtccctttatttatttatttttttgagacggaggtttgctcctgttgtccaggctggagtgcaatggcacgatctcggctcactgccaccttcgtctcccgggttcaagcgattcttgtgcctcagcctccagagtagctgggattataggcacccgccaccacaccaactaatttttgtatttttagtagagacagggtttcaccacgttggccaggctggtcttgaattcctgacctcaggcaatccacccacctcaacctcccaaagttctaggattacaggtgtcagccacagcgccctgccaatttgtccttttttaataatagttgtttttgttggggccagagcaaatctggtaccagttgctccatcatggcttggtctttattatgggtggttcccatttcaatatgaaaagctttttctgtggatatatactttgactaatttgaatattaccacccctgcttttgtttttccatttttttttactgtggtaaaatatgcataacataaaatttaccatcatagctgttttgaagtgtacgtttcaggagtatgaagtacatttacattgttatgcaactctcaccaccatgcatctccagaactcttttaatctkgtaaaacagaaactctgtacccactgaacaataactcaagccagatgtgctggctcacacctatagtcccaggtacttgggaggctgaggtgggaggattgcttgagcccatgagtttgaggctgtggtgtgctatgatttcattcacgattggcccttgcactccagcctggacaacatagtgagaccccatctctaaaaaaattttaaaaagaaaaacaataactctatttgctactcccagcccctggcaaccactttctgtctttatgactttgactactttatatacctcatataagtgaaatcatatagtatttgtctttttgtaactggttactttagttagcataatatcctcaagsttcatccatgttgtagcttgtgcaagagtttccttcctgtttattttttaagacagcatctcactctgtcacccaggctacagtgcaatgtggaaatcactgcagcctcaaactcctagactcaacgattctcttgcctccctagtagctgggactaacaagtgcacaccaccatgcctagataatttttttattttttgtagagaagggaggctcactatattgcccaggttggtctcaaactcctagcctcaagcgattctaccactttggcctctcaaagtgctaggattacaaatgtgaaccatcacacccagccttaagaattttcttcctttctaaggcagaataagattctattgtataccacatttcgtgtatccattcatctgccaatggacacttggacagcttccactttttagctattgtggataatgcagctgtgaacatggatacaaatgtctctttgagaccctgctctcaattcaattctttttggtatagacctagaagtggaattgccagatcctatggtaattctgtttttattatttatttatttatttatttattttgaaacggaatctcgctctgtcgcccaggctggagggcagtggcatgatctcagctcactgcaacctccacctccctggttcaagcaattcccctgcctcagcctcctgagtagctgggattacaggcccacaccacgatgcctagctaattttttttgtatttttagtagagacagggtttcaccatgttggccagactggtctcaaactcccaacctcaggcaatccacccgcctcggcctcccagagtgctgggattacaggcgtgagccaccgcacccggcctctgtttttatttttttgaggaactgctgtactgtttcccatagcagctgcatcattttacatttctaccagaagtacacacaggttccaatttctccacatccttgtcaacacttgttgttttcttttcttttctttttttaatagtagccatcctaatgggtgtggtattgcatcttggttttgatttgttattcctgctttctgtccatatattttttcttttttttaagtgacagggtcttgctctgttgtcctggctggagtgcaatggcaccatcatggctcactgcagccttgacctcccaggttcaagtaatcctcccatcttagcctcccgagtagctaggactacaggcacacatcaccatacccagctaaatttaaaaaaaaaatttttttttggccgggtgcggtggctcatgcctgtaatccaagcactttgggaggccaaggtgggcagatcacctgaggtcaggagttggagacctgggaggcggaggttgtggtgagctgagatcacgccactgcactccagcctgggtaacaagagcaaaactccctctcaaaattaaaaaaaaaaaaaaaaaatttctgcttcccgggttcaagtgattctcttgcctcagcctcccgagtagctgggattacaggaatgagccaccaagcccagctaattttgtatttttagtagagacggagtttctccatgttggtcaggctggtcttgaactcctgacctcaggtgatcccacctcggcctcccaaattgctggtattacagtcatgagccactgcccctgtcctaaatttaaaaaatttttagagatgtggtcttgctgtgttgcccagggtggtcttgaactcctgggttcgagtgatctccttccttggcctcccaaagtgctgggattacaggcatgaaccaccatgcccaacctgtccatatttttttattatattttttcccttttatttttaacatttttgtatcattttctttagaataaagagcataggccaggcgcagtggctcatgcctgcaatcccagcactttgggagactgaggtgggtggatcacttgacatcaggagtttgagaccagcctgtccaagatggtgaaaccctgtctgtactaaaaatgtaaaaagtagctgagcgtggtggcgcatgcctgtaatcccagctacgtgggaggctgaagcaggagaattgcttgaacccaggaggaggaggttgcagtgagccaagatatgtcactacactccagcctgggtgacagagcaagactctgtctcaaaaacaaaagaaaagaaaasaaaacaaaacaaaacaaaagcatatacttgctttgagttttagcctagcccaagagcttttttcatcaaggcatctgcaaccacttaggtttattattatcattactggtatgtttgatcttgttttcaataccttggaattttctctttattccaatttttctgtgtagatatgatcttttttgttatttgaaaggtaggcaatgtttttattccaatagtctttaccttaaagcttttcaaagacattctcaggctggatgcacataattgaaatatacttaacaaagctcatactgtcacaggaaaataatttttgaccttctgttgggaaagatgatgttgtattattgccattcatttcctttttgctctgttttttcgatgtaattgggcagagtacagcatcatggttttattttattttatttttatttatttatttattttttgagaccaaatctcactctgtttcccaggctggagtgtagtggtgcaatctcagctcactgtaacctctacctcccgggtttaagtgattctcgtgcctcagcctcccgagtagctgggactacagttgtgagacaccatgcctggctaatttttgtatttttagtagagacagggtttcaccatgttggccaggctggtcttgaactcttgacctcaggtgatccacccgccttggcctcccaaagtgctgggattacaggtatgagccactatgcctggcctattttattttatttttgaaacagggtctggctctgtcacccaggctggagcgcagtagcaccatctcagctcactgcaacctccgcctcctggactcaagccatcttcccacctcagcctcctgagtagctgggaccacaggtgtgcaacactacgcctggctaatttttgtattttctgtaaagatggggcttcaccatattgcccaggctggtttcaaactcctgaactcaagttgtggttttattttttatctattctttctcttcagaattgataatctctttcaaaaaagtaagcaatttttataactcattttgtagctcatttaacccattttgtgcttggtgggggttatccagccactgatttctttctcacacaaacagcagctacctgaggcaggttataggacagtgtcttccctccaaatatatagatttgatgctaacattcagttttgcagagaagcctgcagccaccccagtttttttcctttgaagttaatctgattattttccaagatgcttgtggatttccttcatctttcaagttttgaaactattacagtttttatgatccattaatcatctttccatgtttatcttctgataaacagccttgagcttgtcttctattccaacattatgactttttcttagtttaatccacaatttattgccttatagttcctttaaaaaaatgatagctttattgagatataattcatataccatagaattcacccatttaaaatatacagttcaggccatttgtggtggcgcacacctgtaatcccagctactcggggggctgaggcaggagaatcacttgaacccaggaggtggaggttgcagtgagctgagatcgtgccattacactccagccttggagacaaggcgagactcagtctctaaaaaaataaataaataaataaataaataaataagtatacagttcagtggtttttagtgtgttcagagttgtgcaaccatcaccacaatcagttttagaacatttcatcaccccagatagaaatcctgtgcccatcaacagtcacttcccatttccctctaacccttccttctgccttaagctaccactaatgttttcaaggtttattcgtgtagcatgtagcagtatttcattcctttacattgccaaataacatcctattatataaatataccacacattatgtatccattcatcagttgatgggcatttgagttgttgccacttttgggctatgtggataatgctgctgtgaacattcatgtccaaggtgttttctatgtttgtttgtttgagacagggtcttgctttgttgcccaggctgagtgcagtagcacgatcttagctcactgcagcctccatctcctgggctcaagcaatcctcccacctctgtctcccaagtagctgggactacaggaactcgccaccacacccagctaatttttgtatttgtttgtagagatggggtttcatcatgttgcccaggctggtctcaaactcctgggctcaagagatctacctgccttggcctcccaaagtgctgggattacagacatgagccaccgcatccggcataagtttttgtgcggacttatatttttatttctcctcactgtacgctaggagtagaattgctgggtcatatggtaattatacattcaaccttttcagaaactgccacactgtttcgccatctcacattccctcccgcagtgtgtgagggctctgatttctccacatacccgcctgcgcttgttaccatcagtcttggttgtagccgtccaacatgggaactcagtttagccacattctctgccactttataacatggattaccttttctctagggtccaggaaaaggtacctcatttccccttgtgggctcacagaggcacctttaatgttcatatttctatcaacgttcttttcatgatgatatatgtgctctttacgatggtggaagctggccgggcgtagtggctcatgactgtaatcccagcactttgggaggccgagatgggcagatcacatgaggccaggagttcgagaccagcctggtcaacatggcgaaaccccgtctctactaaaaatacaaaaaattagccagccatggtggcctgtgcctgtaatcccagctactcaggaggctgaggcaggagaattgtttaaacatgggaggcagaggttgcagtgagctgagattgcaccactgcactccagcctgggcaacagagtgagaccctgtctcaaaaaaaaaaaaaaaaaaaaagatgatggacgctttctctgtcatcctcttcacttccttctgtgccttcaccagaataatctttaatgtctaaatttctactaacagtctcttcaagacagtctaagctttttatcatgcaccacaaaattcttccagcctctacccactatcccatttcataaccacttccacatttttagttctttattacagcagccagcagcacttcacctcctggtaccaaaatatgtgttagtattcaagtgtggtggcgcacacctgtagtcccagctacttgggaggctgaggtgggaggatcacctgagcctgggaagtttgaggctgcagtgagccaagatcacaccactggactccagcctgtgtgacagagtaagactgtctcaaaaaaaaaaaaaaaaccactaaatgttaaaaaaaaaaaaagtattagtttactagggctgccgtaacaaagcactacaggtgagtggcttaaaacaacatgaattgattctctcacagttctggaggctagaagtctgaaatcaaggcgtcagcggggccatgctccctctgaaggtgctaataaagaacgcttcctcacctcttcctagtttccagttgttgccggtaatccttggtatttcttggctcatagcctcatcactccaatcccacctctgtccacggtcatcacatggctttcttccctatgtatgtctgtctgtgccttcacatgacattctttttttttttttttttgagatggagtctcgctctgtcacccaggctggagtgcagtggcatgatctcagctccctgcaatctctgcctcccgggttcaagagattcttctgcctcagcctcccaagtagctgggactacaggcgtgagccaccacgcctggctaatttttgtatttttttagtagagacggggtttcaccatattggccaggctggtctcaaactcctgacctcatgatccacctgcctcagcctcccaaagtgctgggattacaggcatgagccactgtgcccggcctacatggcgttcttaaaaggacaccaatgactggatttaggacccactctaatccaatatgtccccatctttttttttttttttttgagacagagtctcattctcttccccaggctggagtgcagtggcgtaatcttggctcactgcaatctccacctyttgggtacatgcgattctcctgcttcagcctcctgagtagctgggactacaggcgtgcgccaccacgcccaactaatttttgtatttttagtagagacggggattcatcatgttgaccatgctggccttgaactcctgatctcaggtgatccacctgcctcagcctcccaaagtgctgggattacaggctgtgagctgtgagccaccacgcccagccaacttttctttttttttcttttcttttgagagggagtctctctctgttgcccaggctggagtgcagtggcacaatctcagcccactgcaaccactgcctcctccaccatgttggccaggctggtcttgaactcctgacctcaagtgatccgcctgcctcagcctcccaaagtgctgggattacaggcgtgagccatcgcgcccagccagctttttttttttaatggcatttgtagaagatgatctatgctctgtgtgtgtgtgtgtatcccaaataacacaagtgaagttttccttcatagtttgcataacaacctacactcacaagtactatttccacagcacagaaaagaaaaaacacatagcatctctgtgtgtattggatgggtgatggataggtggacaagaccatcctggtagctttttacaagcaaggaaccaccaatgatcagtgttcctagaggtcctcccctccttagacaggtttctgttcccttcacccaggaaatgcccgtgaacttggtctcttctgcttgatgctgcctcaccccacatgtccccaaggctcatcttctgggcctgtaggaggtgtgatgactgtggtatctccctagggcgtctgtgaggaaatgacctacgaggaaattcaggataattatccactggagttcgccctgcgggaccaggacaagtaccggtaccggtaccctaaaggggaggtaggtgggatttggggcttagtcccagccacctactgcccgcctgggagtaccacctgtggctgagggcctgtggggctctgcaggggctgcgtgggtagcagaaggggcctggtctcagaggcctgccagcctgggtgtgtggttcatctccaccccttcccagctatgcagcccaggccttagtcccttcctcaggtgtggagtgggcagtgccatgtagggcaggccttcaacctggagacctttggctccctgctctccattcttgtctttccccttcccaggggtggagaattcggaagggcagggcctgaggtgggggatctgcggagttaggctttcctgggacccctgtagacagtgtgcggtcccctggcattcccaggccagctcctttcccagcgagttgtcagccctttccggggcgctcaaatggctggggagttggggagaccatggcaggcctgggactcgggtctcagctcactcgagtccctgtctcgggcctcatccttcctttggatgcttcctcttgtcacaggctgagcccatcctgtccttcctgtggctccaggcaccacccccagccctggcaccagacccagggagaccttccacacatgagttggctaccacaagccactgcacttgtcaccttctctgacacagttcagcccaggccccaggtcagaaactgagggtcacctttgactgaggcatctccttccacttccaggaggtggcctggggcaggggccaaataaaaatacaccccgtcaacacacatatgtacacatatatatacacatgtagaagcacctccacccagaagccaggctgacaggtctctacactgtaccatcctcaggatagtatagctcttgggaacattaattattccccacattatgttaggccaagttcagatttagaaccaacccagataacggtcaggagaaacaaagcagctggctgctcaaacatgagaatacagtgaggagaattggttgagaaattcatgttaccaaaagaaccggtctaggattttctcagaactaccaggaactggcacaaatcagcgtgtcatttttgcttcctaatcaaagcttggggcacgttcagttctgactgctggaggccatttttgaaggaccactcattgtgtgcagaaggatgaaactgatgaaaatctctaaacctgccaggttgagaggcccagcaggggcctaaaccgtacatcacggcaggcatagggggaagatactgggcaggtagactgaggatagttcctggggaccccagctgtttctgatgagtcacactccagaaagttccaggtctttgctctcttccccttcgctcttgtcagtgcactctgtttgctgtgggctggaagcaggcgaggtcttctccaccagtcacatgaattctatagctgaggattcagtgcagagccccatgggtgggcactgaggtggaccctgggatggagcctgaggcctagctctgcgctctcaatcctaccaggacctagccctgaggtgggaaaggtggcccctttcctcagctgcccacccccatggcctcagaaggctaggctggaggaggcccagccacagcttcccagaatggtgagtagctgcaggagtggaaggtggcccagtgtccaggatgtgtctgtccctcccccggagccaggcctgagggacccctctctgcttgcccttgcagtcctacgaggacctggtccagagactggagcctgtcatcatggagctggagaggcaagagaatgtgctggtcatctgccaccaggctgtgatgcgctgcctgctggcctacttcctcgacaaggcagcaggtgtgggctgtgccccgggggaggtgggaaggttgtgtgagaaggtaggcmctgtcaccaggcatttctggtgtgctagccatccccctctgtgtctacagaacagctgccctacctcaagtgtccgctgcacacagtcctgaagctgactcctgtggcatatggtaaggaagcttcctgcacattgaccatgggtagccatgaccttggatctctgcacagttccatgattttctccgaattccttgaaaattgtgttaggagcccattcctccacctactaccccaccacctttcccaatttgctttttttctttgagacggagtctcgctttgtcacccaggctggagtgcaatggcgtgatctaggctcactacaacctccacytcccgggttcagatgattctcttgcctctgcctcccgagtagctaggattacaggcgcctgccaccatgcccagctaatttttgtatttttagtagagacagagtgtcaccatgttgtcaggctggtctcgaactcctgaccttaggtgatctacctgcctcggcctcccaaagtgctgggattacaggcgtgagctaccatcatgagctaccatctgcggccctaatttgcttttaaaaagtttgttctggggctgggtgcggtggctcatgcctgtaatcccagcactttgggaggccgaggtgggtggatcacgaggtcaagagatagagaccctcctggctaacatggtgaaaccccatctctactaaaaatacaaaaaaattagctgggcgtagtggcgggcacctgtagtcccagctacttgggaggctgaggcaggagaatggcatgaacccgggaggcggaacttgcagtgagccgagatcgcaccactgcactccagcctgggcgacagagcgagaccctgtctcaaaaaaaaaaaaaaagtttgttgtgaaaaagtttatgtggccacagaagacctccccagtgactttgcttaaccattgcctacctgcatgaggggcttttctactgatttttctgaacccccacaaggccccttggtcctcagggcctggactttattctgggtgcagggcagtgtgagtccccaccctgcctcttgctataccagcagagacttcaggcaacttcttcatctctcaggtcttagctcttcacctttaacacaggtgctcttgggggaatggctgtgaagcccagtggcagctgatgtcactccagtgtgtgacaatggcctcatcccccattgcactgtgcacctggcacacggttgactgggccttatatggtagagttggaatgtgggtggtttgggggccctgaagactttgagagtcagtaacctcaacttaggcctgctgttcccccgatccctctcggtcctggggttggggagcctggggcctctgtgtggccctgtctgggccgtcacatagatatgcgtgggtctgacagcgtgtctcatccttcctcccggggctccccagagctgcctaaagtggaagaactagagtgaggctgagatggctgctccattccacacgcccagacccccctccaagagaagtttctagcatctgcagctcagctgcctttcaggagtggggatggatttgcatcttccctttggcaggttgtaaagtggagtccatattcctgaacgtggctgctgtgaacacgcaccgggacaggcctcaggtagcaatggggtcactgctggggtagcggggtgttcctgatgtgggggtgtccagactgcacatcctccagggccaggcccagctgcggcacctgccagagggagcttgagtcttctgccaagactgttgtcccatcagcagggcggggccctggctctgggtggggcctgcatcaggccttcccaaggcacctgccctggggatggggaaatccctgactctgggccaccaggctcaggagtgcctgaacttgggtgtggttggagccccaggacttgaggagccacagggctcccaagcagcaacttggaggtctaagtcaagggggcccttgggctcagtgagaatgaggctggaggctaagaatgaggcttctggccttctgagggcaggtgggcactcttcccactccccatccctgcagccgaggcctcatgagcccctttcctaaccccagcacctttaaaaattaaaatgggatcatgtacttttggggaaagggccatgcagatactgaaggggcctcagcatggggtggagaccttggtccagaaaagcagtcaccacctgtgctccccaagtgccttgtggaaggtagaagctcctcagagtgtagctcagaaccactcttagtcccatgtggggtccctccacaatgttggctccctctcccactggggccaaggataggacctacacttctgggagccccggtcccagttcctggaggccactgcacggagaaggctcttgggcctcagtcatgcctcttgccatccatgatggggcctgcttgggctctgggtccctgctgaggatgcacgtcttgggctggaccaggacatctggccttggacctcacagcacaggtgtgtagatgtgtcctgtcccttcccaacaccactgcccccaagcaggaccagttaccctgcaggcctctcttcccattgctctgatagttcgtgcatgtcttggccaagttcagcccaggcccaatttggtacccacaagtcacaggggaacgtacctcccaacgggcatcctttgggccaaggaaggcccagatggcactgggcccccagcgctgacagagtgatggtaagagaggcccctgggttggcagggtgatggtaagagaggtccctgggcctggcagcccttgggagctgaccctaccagtccatcaccatagtgtggctggcggtcattctgcccactatgggtgggtgcttctgagaggcaaaccgctactaaccccaggttcctggatggctcccttctggcccatccattggggcaggctgtggtggaaaaggggcgcctcaggaagcctgcccagcagtaagaattatacctgcccctacaattccaggggccggtcctatgagcccaggctgtgggccatgggggccatgtctctctccctgaagatctgggcatgtcatgttgcatggggcagcagctcaggtcatcagtgacctgctcctgcaggtgatggttccggggcccacagctgggaggaggggccaccaggctctggggcacataagacagcctcagagagctaagggaagtttcagattccctattcctcaggcctgagactccctgagcccgacaggccaaggatgggactgagctctgcagtttggtggggtccttctatagctgagggcttcaggaggccctgtaccccagttctgaggggacagaccaggctgcagaccaggaaatgcccataggcttctggggcacctctgacacctgcgtgccaacactttaaactaggaaggaggcacccccaggagttgaaccccttccctgccccacagatgaggataaaatccccaagccaggggttcctcctcaattgactcagccctgagataggaggtgggagtggccttgctttgggtattgcctgacctggctgcagtggagcaggaaacgaggtggcatcctccaccgcacctttgttctattgtccatccacccgctatgtggcacgaagctcttggccatgtattcttagggaagcttgtggtctagagtcttgcggctgtggctgctacagtgagaatgtgaagcctgatgaaccacagtgatgaggacggcagacagcaggcatctcatctattcctgccatggagtgaacgctctgtgtttttattgtacagaacgtggacatctcaagacctccagaggaagcccttgtcacggtgcctgctcaccagtgaccatgttcatccacygtgaccactaggcaggcactgctctctgcagagggggtcattccaggccctccagtgtgtgtgatagtcaccatgccatgcagggatattcttgaagccacacatggctggcggaacccagagcccccaccccagcccacctggctctttgttgacagtcggcgacaaggttgtgcgtggctcctgacctgctgctaagagtcacttgaccagactgcatctgcatgggctgcgcggaggttgcccagccccagtttcttccggcgcagctcttaggtgttcactctcgccagctcagttggctttgtgaagtgtgaaaccctacaatgtgaaaggaaagtgcttgctgtgatgttcctactgtggcccagctgcccagcatggacctggtgactctccacagggcctctaccatcctctctgtggccacttcctgagccagaggccaggtcttcatggggccctgagcttctgctgcctctggtgagagggagagcccttcccatccttacccaccaggaactagagccccaaccacagcagatgcttcctgggcagccactggccaggccgttgtatccatgtcacccttagttgtgggcattcatgaaagcaatgcgcttgcttcagcacattgggatgcacagaaacgtgagggcaggggggcagttgtggtcgcccctccccagttgtgcatgtacccggctacttaggtatgcttaggggagctggtggccaggggtgccccttcaggcctgctctcacagtgaaaccacttcaagacagggcaggaagttaccttcctggtgcacacaccgaagtgctygagggagaggctgccgccccctctccccttccctggctgtggacactggcagccaatggggaggcggcctctcccctgttgctgcccgtgtccacacaggaatgtactctggtggcagaaacatgcatttgccataaataattcagaaacacttgtatggtcctgtaaaacttctctggtgtttgttgacttctgcctgtgggtctgaggaagggagaaggcagaacccataggcagtccctgggcaagggaggattttcccggccgcagcacagccttccattcatgtgcacgtgagtctggtgaaaatggccttgtgaagtccagtgtctgtcatgcccctgagttcttttggtcccagagaggcagcctgggcagtctgtttacagctggcaaacagactggctggcaagttgtggggctgggtcagaaagtgtctggacttgtaatcgggtgccctgctgtccacaggtggactctggggaagccaggcccctggatcccaagtcctttgtgtccggagcctttcctggcctgtgcctggagggtagcacatctttccagcctcccagggctttgcagcctgcagatgccacctgtccctgagagaagttagcgtccctggccctggccggtggtctctcatccttgtgtgctgctctgctaagagatgtccaaggcggagcyrgggcaagatccttccagactcatctgtcagagccccaagccctttagacccagagcccaaggaccatgcctttgggacattaggactgcagcctttgcttctgtgtattttggagttttggtgacttttgtcacctggacacactcatttgttagccatagtgggttcccttggtcagcaacagtgcatgtacctctggatgtcatctgaggtgagaccaccgaggccttttctctctgtgtacagaggggagttaggagttgctggactggatgcattacgaggactggggacagggtaragggacatccagggatcagggcatgagtgggggcaaccccccggcctctgccctggcatggtctccgcatgggctgaggtgtagctgattggctgccacatttcggccatgctggctggcgtgcccatgttgcagatattttcccgagttccccagaatggatggtattgaatctcagccacatgcaacactgtgtccagcattctttgcaataaatactttttaaaaaataatctcaggttgtatttggtagccagttctccatttgtgaagtgttttttttctggcctgctctgtcgacacctggtgctgtggtcttcctcgcaggtctgtgttgggatccttcgttcagcttccacccccatgttcactctcactgaagaggaattatgctgccctggagtgagtcctggcctggcatacatgggcaggcggcctgggtcttccctgggctgacctggggtatggggcccttggccctgaacatgaggcagatgtggagggggcagtgcagctggagtggagcactgttaagggaaggattctggggtccctgggaatgtgggctccaaatgcggcattcttggggaggaggccccgggagctgggtcaaggatgtagtggctgcgtgaggctgtggtgacagtatgctgaccagtgttttggtattttctttttctttttttatttttattttttggagacggagtttcactcttgttggccaggctggagtgcaatggcacgatcttggctcaccacgacctccgcctcgggttcaagcaattctcctgcctcagcctccccgagcagctgggattacaggcatgcaccatcatacccagctagtttttatatttttagtggagacagggtttttccatgttggtcaggcttgtcttgaactcccaaccttaggtgatgcacccgccttggcctcccaaagtgctgggattacaggcgtgaaccactgcaccyggcctattctggtattgtctttgtcacctgcatctggggtcgggaaggtggagacaaggggctgggtgttctctttcccatgcctcagaacatcatgggctgtccatacttcctgccctggagctggctttccgggaagtgggttgtaggcggggctcctctgtgggcaagatggggcagggcattgccgggtgttcgcctgtgctcctcccagtgtgtcagggcagaggatggctgtcgctgggctgcttctgggtggtttggggtggccagcagctatgtttctgccttctccaactatgccaaggtgtctgagggagaggcaactttgcaggattcaggtggtgactaacctctgcctggtgagagcctgggggacagcttcgggggtcctcacctgtctcttggctctgagttcctagggtggacacctgactccctttgaggcttctcagcacttttggaagaaggttttgaagattttagtagaaaacaataaaaggaatgaaatataacaatatcagagtttttcttcaggtccagtgttgtaccataacctagaaagggcaattatattattatgttgagtagcattttgggttactgggaaataatagccatcatatagggtcacaggatatttgttttttattttattttatttttttgagacggagtttcactcttgttgcccaggctggagtgcaatggcgtgatctccgctcactgcaacctgcccctcctgagttcaagcaattctcctacctcagcctcccaagtagctgggattacaggcatgcgccaccatgcccagctaattttgtatttttagtagagatggggtttcttcatgttgttcaggcttgtctagaactcctgacctcaggtgatctgcccgccttggccgcccaaagtgctgtgattacaggcgtgagccactgcacctggctattttcattttttcttacaccaataagaatgagcttgaaaggatcagataatatttggatagaatcaaatattgttgcaaagacataggtaggtttcagcaatattggatttatatctaaaaatatatatataatacttcttacttgcagagaagagtgttgccatatttggtttagactgatcattactgggtacattattgtttaaacgaaactattttatcttatttttgtaaaaacggggtcttgcaccgaacacagtagttcacacctgtaatcccagtgctttaagaggccgaggtgggagagttgtgtgagcccaggagtttgagaccagcctggggagcataatgagaccctatctctacaaaaaaaattttcaaatgactaagtgtggtggcacgtgtctacagtcctagctacttgggaggctgagacaagagaatacttgagcccagaagttggaggttgcagtgagccggggtcaggccactgcaacctgggcgacaaaataagaccctctctcaaaggcaaaaacaaaaacaggatcttgctctgtagctctggctggttatgaactcatgaccaagcgatcctcctgcctcagcctcctgagtagcttggggattacaagcacgtaccactgtattggcaaaactattttattaaaagtgaaannnnnnnnnnnnnnnnnnnnnnnnnnnnnnnnnnnnnnnnnnnnnnnnnnnnnnnnnnnnnnnnnnnnnnnnnnnnnnnnnnnnnnnnnnnnnnnnnnnnnnnnnnnnnnnnnnnnnnnnnnnnnnnnnnnnnnnnnnnnnnnnnnnnnnnnnnnnnnnnnaacttagctgggcatggtggtgcgtgcctgtaatcccagctactcaggaagtctgagggggggaggaccgcttgagcccagtaagttgaggctgcagtgagctatgattttgccactgcactccagcatgagtgacagagcgagactctgtctcaaaaaacagaaaagtgaaaaatggctttgtggtagaccacaagtatatctgccacacctggcttgtggccacaggtctctttggggagattgtgaggaaaatgccaggatgaatctgtgctgtttttacagggccctccttaagggtgcatgccccacctcgttcaggggcccctgagtttgcaaactgatttttatctagaaaattggtgagggtttcctctctgttgcagtagagtctctgtcagttggacctcacactctcttgttatataggtgggactctactggcctctccatctattttggtactaggggtctggtgatcgggtccctattgctaaagattcctgcaggttgctaaagatccctccaggtctgaccattcagataacctgtaaatcctgcattcccagtctgtgctcctctctctcctctggcagctcaacactgctgcttgacccttgtcaccccagactccttgtatctgcattgaaatcaaggagctggcttggtgcggtggctcacgcctgtaatctcagcactttgggaggctgaggtgggtggatcatttgaggtcaggagtttgagaccagcctagccaacacggtgaaaccctgtctctactaaaaatacaaaaaaattatctgggcctggtggtgcatgcctataatcctagctactggtggaggctgaggcaggagaattgcttgaacccgggaggtggaggttgcggtgagccaagatcgcgccattgcactccagcctgggtgacagagtgagactccgcctcaaaaaaaaaaaagcaatcaaggagccatttcaactctagtgtctcccactagaatccctaacctatggagaagagtctagaacccctaacctatggagaagagtctagaacccctaacctatggagaagagtgaccatggtgcttactatgcaccccccaccaatttatatgttgaagttctaacccctagtacttcagaatgtgaccttatgtggaaataaggtcattgcagatgtaataagttaagacaaagttnnnnnnnnnnnnnnnnnnnnnnnnnnnnnnnnnnnnnnnnnnnnnnnnnnnnnnnnnnnnnnnnnnnnnnnnnnnnnnnnnnnnnnnnnnnnnnnnnnnnnnnnnnnnnnnnnnnnnnnnnnnnnnnnnnnnnnnnnnnnnnnnnnnnnnnnnnnnnnnnnnnnnnnnnnnnnnnnnnnnnnnnnnnnnnnnnnnnnnnnnnnnnnnnnnnnnnnnnnnnnnnnnnnnnnnnnnnnnnnnnnnnnnnnnnnnnnnnnnnnnnnnnnnnnnnnnnnnnnnnnnnnnnnnnnnnnnnnnnnnnnnnnnnnnnnnnnnnnnnnnnnnnnnnnnnnnnnnnnnnnnnnnnnnnnnnnnnnnnnnnnnnnnnnnnnnnnnnnnnnnnnnnnnnnnnnnnnnnnnnnnnnnnnnnnnnnnnnnnnnnnnnnnnnnnnnnnnnnnnnnnnnnnnnnnnnnnnnnnnnnnnnnnnnnnnnnnnnnnnnnnnnnnnnnnnnnnnnnnnnnnnnnnnnnnnnnnnnnnnnnnnnnnnnnnnnnnnnnnnnnnnnnnnnnnnnnnnnnnnnnnnnnnnnnnnnnnnnnnnnnnnnnnnnnnnnnnnnnnnnnnnnnnnnnnnnnnnnnnnnnnnnnnnnnnnnnnnnnnnnnnnnntgtgtgtatttattttttgagatggagtcttgctctcctgagtagctgggattacaggcacccgccatcatgcccagctactttttgtatttttgtagggatggggtttcaccatgttggccagtctgatcttgaactcctgacctcaggtgatccacctgcttcggcctcccaaaatgctgggattacaggcgcgggccaccgcgcccggcctcaacatttattttgaatgaataaaaataaatacatcttcttaaggctttggattctttcctctgtgttatatcagggaacttttggcaccttaactgcattgagtgggatccagttttgttgtggagtctcgctctgtcgcctaggctggagtgcagtggagcaatctcggctcactgcaagctccgcctcccgggttcacgccatgctcttgcctcagcctctggagtagctgggactacagtcgcccgccaccacacctggctaatttttttgtgtttttagtagagacgggatttcactgtgttagccaggatggtctcgatctcctgacctcgtgatccgcccgcctcggcctcccaaagtgctgggattacaggagtgagccaccgcgcccggctgggatccagtttttattcagccaaccaaatagacgtgtggaacaacccccaacagcttgagctggtgcatggaatccaaatccttgctaagtgcacccatattgataaattcagcccaatataaacttatgttcttatctccttggtctaggacttcagtctgttcccacacatattctctatattttggccaacataaaataacagtcttgcaactcttttgatatgtgagcctcccgctctgggcttgactttgtgaaagggtctccagacatgctgaaatatctctctagttaaaagctctggaaatcataaggaattgggaggaggggccatgagaagagttagcttcctcttacagggtaactccttcatgatgtccatggtgtctttcaggggaggacacattgcttcagcaggcaaaggaggtgcagaagaggctaggggttggtgaggatctaattcctctnnnnnnnnnnnnnnnnnnnngtgcagtgatgtgatctcagcttactgcagcctcaacctcctgggttcaggtgatcctcccacctcagcctccctggtagctggactacaggtgcacaccaccacaaccagctaatttttttttctttttgtagaggtggggttttgccatgttgcccaggctggtcacgaactcctcggtggaaacaatctgcccacctcagcctcccaaagtgttgggattacagttgtgagccactgcaccccgcctgttttttttttttttttttttttttatttaaaatattgtttttgtagcgatgggggtctcactttgttgcccaggctggcctcaaacccacggcctcaagtgatcctcccaccttggcctcacaaagtactcagaatacaggcataagccacaatgcctagctgattcagcacatttattaagtgcccaccatgtgccaagcagtggggatacaggagtaagcactaccctgctgtcagagagagaatgttctagtw

SEQ ID NO: 96056 - DNA, 146784 bp, Homo sapiens
  misc_feature (1)...(146784): n = A,T,C or G
ctgaagtaatatttttcttgcctctattctcgctctctctgcatccttttccaactataagggtttaaaaaccagagttatcaagcttgggagggtttgaccataggcaggggaggggagaagtcaatgacttcatcccctttctcctgcaacaagctctaccttgagcaggagagagactttaactcaacgaacccggcatttcaatgtctgcagtgactgggttaattctttttctcttttcctttttcttttcttcctttcacatccaagttaacagaaaagttctgaggctgcctgagatttcatcagggtagaaggagagttagccctgaatagaatcaaagaacaagacaaagttgctttgagattaaatgccatgagtcatgtttgtttactctctagttatcttgtagttcttaacctagtgattttacacacacacacacacacacacatacacacatacatacacacagaaagggggcagagaagggagagagagaaactagacttggacagttagctatcttaagcatatttcttgctttggatttaatatcaggagagtctctatccaagtcttgctgtaagatacagtagtggataataggtggtgaacagagtggttatgaatgaagttgctggaaatgagaagaggaaataaaattgctgacattaaactttggatcccagcaacagatttcctctaaacattttgagtactaatttcaccccctctggaatctcacttgttctgctttttttaaataaatagagagctaatttaacatcatttgacattaagaattgttaggaataagaaagagagacatcaaaagagggtgtggcactattctgtggattctttatgcatcaacctggcactactttgaatatccatccatccattggacaaatctttattctgaacctactatatttgggccattgtattcggcactagggatgtctctattaataagataaatatggccactgacttaatgcctcttttgttctcccaggaaagacagacattgcgtcagtggaatgaaaggcttgaaggaggagtctagagaacacacagaaccagtaacaggcagaccaaatatactttgaaggtcacggaagggttctctgtggaaatgacgttgagactgaatcctggagaatgggtcagatttagctaggtaaacagtagttgcctaagaggttcaacatgatctgccactgcctaaatttccaacctcatcataagccactttcacgtttgctcaccattcgccagccacttgtcttctctcagttcctcatactgcctgcctggaacattatagtctaaacccactctctcctcactctgcatggctagctcctttttagtgctcaccctcaattattctttgtttctgcattttacttgtttccatcattttatacaactctatttccaattgtttcttttattttttggattccttgttttctgattgctttctagagatggaatctccaagagggaagggaatgtatctagctcctcacttttgcctctccagtcccttgaacaatgtttgacacatggtagttatgccttaaatgtttgttgactaaatgaatgaatagaagaggtaagttacagccctgagtgggaaagagcttgacacatttgaaggaaagaaaaccagtatggctttagcatagaaagcaaaagggaaagtagtggtatggggctgaggaagtagatagaaattcaattttgcaatcttttgcactagtattcttcaaattgctgttagtgagtcatgaaatcaattcagtgggctgttaccagcatttaaacaaaagtaatagactgaaatcagagtacattgtacttagcaaaagtatcacatgaaacttacttctatattttaaatatttgtctgtgtatatatttatgtattgtattgtgatatgcaaaggtttcttcgttttggtttgcagtaaatagatataaaagccaccattgtagaccatgttaaggatttctgatttttctactaagggaatagaaactcattgatgatattttcccagaagaataggttttaagatttccttccaattggagacattaatcataataaacagtgttactacttttagcaacatgcatgcatgaaaaatcaggctagcctgcatttattgctacccctagattgcctcattttgtttctacaaggtaagagctatgtcttatacactattgtttccccagtgcctactacagactaggtagatagtaaagatgtatttgttgaatgaacaaagtatctcctatgaagctactgttcgtgaattgaatggccataagtcccagaagatgctcttctgctatgccattctcattattacagcttttaacacagaaaactttggtgagaataactaccagaatcttgtttactttttgaggttccacttggagagtgtcaagtataaagtcaatagggccacaaagtttcatggtatacacctgtctgattcaccatttttttgctcccaagcaccttgcatagcacaaggcatattgtagatatttatttttaagtggcaaatatataaaaaaaacttattttctactgtcacaacaataattactacagatagtacatctttcaagtaaatatataatgttattagtgataagtctatgtaatgtttatcttaaaagcaaatcatatgcattgaatatttattatgggctaggtacctttcacagtactgttattcacattacaagcaagtaacctgggtcttagaatatgaaactggaacttgaattaaggtctttctagatcccataaccaatggtgttttcaccaaattatgctgcttcaataaagaaaataattggctttccttaatcctttgaatccctgatagtactgtcctagcattgtcctacatagacatttcagcttctggagagggaggacataagctctcaggaattaccactgctgcagcaatctaaaggcttcatgctcttgggcctaggagctttatgtggaccatcatatgcatagaacgcttcatattaagaaatcacttctgaggggaaatgatatgagggaaatatggatggtaaagatgaaaatgaggcaggtgattttatgttatatcatccataaaaatatattccacccacagctctagagtattagctggattctgacttgggaacggatgtagttctcatactttgaatttagttggcacgaaaacatcagccatactagtagaaagtcattgctgatcactttaaaaatgttgtaatagaaatagcacagaaaatgctgataatgggaagtgctgaatcgtaaggattatatcactcaatataggtatatatttcttgtattataaatttaactataaataccagagtaaaaattactctattgtagttttgcctgtattgttttataatgttatccaataaatataaaatgtagtttcaaaaatacttagagcctaatcaaagacacaatacagtataatagtaaatggataatcatgtttgtaagatgtgtgtaatatgtagttaattagggaaaaataataagagataaaggagaaactcatatcgatattgattaacagtgtaagacagcatagtagaacagaggatgagggatgagggtaatacaacttatggataaatagaaaatgaacatcccttgacttgagcaaaatgctttagtgtaactgggcttgaaaattatccctcttacctgtatatatatatcctatcattcattcattatttaacaaatatgtattaagggcccacatgtgcctacacagggactggaaatttcacaatgaatgaaacacacaaaaaacctgccttcatagaatttatattctaatgaagaagggagaagagatagtaacacaacaaaaactacataagtggatgttagatggtcataaagcaagaaagcagcggttttgccaattttaaataatacagtcagggaagactccactggaaagatgatattggaataaaatcctgaaasttactaacaatagcagccaggtccaatcaaaataacagaaatgtgaaagctgagtgccttagtctgtttcatgctgctataacagaatgtgacccactgggtaattaataaagtgaacaaatttattggcttacagttttggaagctgggaagtccaaggccaaggagccagcagttttggtgcctggtgaggctattcttttctttcaagatagccattgtccagaggagatgaaggctgtatctaaaatatggcagaaggcaaaagggctaagagagagagcccattccatgagcccctttaaaaaggtattaaacccacacatgaaggtgaaaccctcatcatctaatcacctctcaaaggccccacctcccaataccattacattagcaatgaaatttcaacatgatttttggagggaataataaaactatagcactaaagtagtttataattggttaatgttatcaggaaacttttctattaggtttaaaataagaaaacgcaaaacaaagattatagtaatttatcatgataaattagactcatagtttggcctcatctttatttaaaaagttgatttaaaatgctgtatacattttgagcctgattaatatgcatgataagataaaagtatttgtactttaggagcttaagaagtaagtgatgaaagtaaatagacgttttactttaaaaacattttttttcttgttggtacaaataatgatggttgatgcaccagaatgaagaacggggggaatccttattttttataattcttaaatagagaactatgggtgatttttaccattcatataatattgcttcatattttttacaaccaaatatagtgaagaaagtgagtttaaaaactcaagagcgtattagaagatcccatttttttaaaaaaaaatttaaatcctctcttttcctattgctttaagtattaagaaaaagcagtgaaaaggcctggaaagatacacatcataatgaaaatggtgattacactttattctttgttcacttcagcagtttttgtttgtgacaatgagcaggaatcatttttatatttttttaaagttgatgtttaaaaagaaagatcactaaaaatttaaaacgaatttgatttattttgaaataaaaacattttagaatttacatattaaagatagataataaagatatttgaaaaggtattccaaattagatgtaacttataaaatgctgaaatacaagtgtatgttgttttatgaaatctcaaggacttggtataatggaatagcaaagatgttcattcattaaatagttttttatttgattttaaataacagagtaagtgtagaagaaaaaaggaaagtatagagagtatttttccattaaaatatttttatttaactgcttccaaattaaactggtgtcttcaaatgaacaaacatttctttaaaaatgtcattactaaagttcaaattcaacatgaatgtacttttataattcctaacgaatagctaaggtgaaaatatctttcttttttattgtgaatttgtatattgctgaccctactgagaaaacaatgacatgtggcttaattatgatataaacagtacaaaaataattttaagtttccgtaatttcaacatatttctcataaaatacttggcaaatgaaaagcaacacaagccctgtagtttcctaataattattcacagtataaatttgaacaagtaaatatggaaaataaacagtatcatccaaacatgtttaccttttctctaagtgatgtgtgataacccattcgtatacacagggaactcaacctatctagtgtccttgggtagactttttcttcctaagacgcatactcataattgtttaaatcttagaactgcatccaagaggaagcttaacaatagtgattgtttattttgtaggttttaaagacgctagagtgccaaagaagactttgaagtgtgaaaacatttcctgtaattgaaaccaaaatgtcatttatagatccttaccagcacattatagtaagtcattcactgtttatgaattctttcttggagggggtctgatatgtttctgtgaatattgcgggtgttgctagtaaagtcaaactgtgacaacttctgcatttgttattaaactcatatgaacttaatataatacaaagaggctatggaacataataaaaataatttatctcttcattttattactgtaagtttccagaaaagaggaacttgaaaggaaaaaaatacccaaacaccataataataatggaacaataaaaaatgttgttatcacttagcaatcatcagcctgcatagtttacacccttcacatgagttggtggaaagaagaataaaagtaaaagaatttctgagtttagggctatgttatggtttgcattttcagggcaattaattctataaactttcccttagttagatatgtttaaataaattsttctatgggtgcttaattttagtgaagagttaagtaattcaaattttagtacataattttccgaactccagtggaagtatacatgctctcttctggtcaataaacagaagggagatttccttactgaattcaacatttgagactcaggtttatawgaagtagataaaggttttatggatatttaaggagtaatccatagcctcatttttacttgaaataaaatgctgttttcttactctgcatccatttctagatatcatcctctttcttgccctccttggatgaaaagtttaatatattataattatttgtaatgtcttcttcctgtccattcacaacttgaatcattgacctggactcagcccttccacttcacaaaaaggtctaattaattggcttctttggtgttaaatccaataaactcttcagtccccccactccttctacccaactctgctgctcattactgttttcttgaaactcttctcagatttttctggttttgtttcttctgtttccttgctgttggttacttctcagttttcttatgcaagctcttctttctgtctgactctctttttttaataaattgaggtataatatacataaagtgcataaatcttaattgttaagcttgatggatttttacatatgtattccacccacgaaaccatcactcagattataagtacccaggaagacttgctcatataccttctagtcaataacttgcctcaaaggtagccaatattttacctctattatcatgggtaagttctgcttatttttgaccttcatatacatttctgcattcaacgttgtgtctatgagattcattcatgttgttgtgagtagcacacttccacacttttacattgccwtgtggtttttcatcatttgaatgtcacaagctatttatttaatctactgataaccatcatattctttttgaatggcaatggtgatttcctataaatcaggctaccatatatgtgtggcttcatttcttttccgttttattagtcagatagtctgtgtttgccccaataccaatctatcctaatttctgtagtttgcgccaatactaatctatcctaatttctgtagctttaaaatatgtctttatgtatggcaatgtaaatcctccaattttttcttcttcaagaatatcctgtctagttatagttctttgcatttccatataatttttggattcattttgccaatttacacacacaaacacacacacacacactcatgcatgcatgtacacgcacatgcacacaaaattgctgggattttggttgggactgtaatgattctacagaggagagataatatgataacaatattgagtcttccaatccattaacaaaccatgaatctcatccacaactaaacgttacttaattttatctttaactatctcagtaatgtattatagttttctttaagaaatcttgtgtgtatatatatatatacatattttatatgtattttttgatatttgatgttttaatgtaattgtaaaagtatttgcaaactttattttccaattagttgttgcttttttttttttttgagatggagtctcactctgttgcccaagctggaatgctgtagtgctatcagagctcactgcaactaccatctctcgggttcaagcaattcgcgtgacttagcctcccctgtagctgggattataggcgtccactaccatgcctggctaattttcttgtatttttaatagagacggagttttgccatgttggccaggctggtattgaactcctgattgtttatgtttagcagaaaaatatgaaaaaattatttataataaccataagataatgtaagcctacagtgtaagggctctgataagagacaatgaagatcactctggagtacataacaggaagaattaataacaggaatccttctggaaaggatttctaggggaagtaagatgtcagcatagacctgaaggttagcagaaatttgtcagttaaagagagagaaaatgacttttctgaattggaaaaaataagcatatgtgaagtagtctgaaggcgggatataatagtacatgattcaaggaaatgaaagaagttcagtatggttggaacacaaaacatttcaaaaaatatgattattttgaatgactttaactcttctacttgatctgaccaggccttattactgactgccatgcagcccccacatgtgtctgccatgcagcccccacatatattatacatatataatatataatataattatataattatataatattctataatatatattatataattatataattacataatataatataattatataatatgtctgccatgttaaaagaagaaactgaatggccagttcaccagatcatctggcaagacacatgtgggggctgcatggcagtcagtaataaggctgactgccttatattatatgtatatattatatttatattatatgtaatataatataaatataatattatatatattataaatataatattatattcatatgtattatataaatgtaatataatatataatatatattatataatgtataatatatactatataaatatataatataatatataatatataacatgtataatatatatacaatatataacataatatactatatataatatataatataatataactatagaatataatatgaatatataatataaattataatattaatataaatataaaatatattatatatatttagtttttacattttttaaaattaaactttaagttctagggtacatgtgcacaacgtgtaggctacataggtatatatttgccatggtggtttgctgcacctattaactcatcatttacattaggtatttctgctaatgctatcccttccccagccccccacacccctgacaggcgttggtgtgtgatgttccccgctctgtgtccaagtgatctcattgttcagttcccacctatgagtgagaacacttggtgtttggttttctgttcctgtgttagtttgctgacaatgatggtttccagcttcatccatgtccctgcaaaggacatgaactcatccttttttgtggctgcatagtattccatggtgaatatgtgccacagtttcttaatccagtctatcattcattggtgaacatttgagttggttccaagtctttcctattgtgaatagtgccacaataaacatacatgtgcatgtgtctttatagtagcatgatttataatcctttgggtttatactcagtaatgggattgctgggccaaatggtaattctagctctagatccctgaggaatcgccacactgtcttccacaatggttgaactagtttacagtcccaccaacagtgtaaaagcattcctatttctccacatcctctccagaatctgttgtttcctgagttttttatkattgtcattctaactggcgtgagatggtttctcattgtggttttgatttgtatttctctgatgaccagtgatgatgagcattttttcatgtgtctgttggctgcatagatgtcttcttttgagaagtgtctgttcatatcctttgcccactttttgatagggttgtttttttcttgtaaatttgtttgagttctttgtagattctggatattagccctttgtcagatgggtagactgccaaaattttctcccattctgtaggttgcctgttcactctgatggtagtttcttttgaatggcagagtatatttaaaaatcaaacttcatctggacatctaaggttcagcactgggaccttttcttgaaaattttgttaactatagcaacatatttaggctatagtaattacctatgtggtaatrttatattataccatattacaaaacatgaataaaccatatattggtatcatgtttttcgttagtttctccaacatcaggcttagacagcaactagcattctaatttatagcccttttaaatgaagagatctgtgagctttacagttttctttattcttcttattctcgctatgtgtatatggaaaaaaaaccaactgtgggtgtgtgcgtgtgtgtgtgtgtgtgtgtgtaaattgttttaaaaaaaatttcctgctctgattttcacagaaagatatttttcaaaatatataaatgagcaagcacactcaacactgaatgatattagtgaaagggaaagttgagtgaatcaagccagcttactattaatagtaatgagctcttggtgccaaacaggctaacacagctttggttgcctcaaggccaggagactgggctcattttcaccattcctgtgatgcagggacatgttggagaatcctgtgggctgatgcagcaatttgcagccagcaagctctcttgcttccaatggtgcttggattttaagaagctggtaggaaaacagagtgacaaatacatgacagaatttagtttccttatgtttagaatcattacgaggtgccttccaacctcaaggatttttgtgccttcaaaatttattgaagttttttatttttttgaccaggagccatgaattttacaagaagaagtcaagtataaaatatttataacattttccatctttttactctgaaaatgtgagtcatatccctgaagtgaaaaaattcacacctctttctgccacctattaacaatggaggggcactgctccacatcccacagaaactaaggttgtcttcacattagggacagtaaaccatgtggatatggcagcatgattgcatagtaaaatacaagggctttcaaaaatataattgtaggatgactggaaattttaccaaaaatatagaaagctattattcagattattacagtaacacaggaaagaaaaccaccactgaataagtaatcaaagaactagtgttctggtaggagttctagtcttaaccagttacatgatcatggacacgtagactctgacttttacctgcctcatctggaaaatagggtatgaataggacctgctgtgtctgcttcacagagcttttataaatagtaaattgttatgtgcacaaaattattcctttgaaataatgaaataagatattttyagaaaagttagatgatgagatgtcgctactagaaaatcataaatatgaaagtggtagaactattattacaaaagcacaggactgtaaatgagttaataatgagttttttggcaaatagaatttctttgagcactaaaaatctagaaaaatgaggaagaagaaagctagtgtattagggttctctagaggatcaggaccaataggagatattaatttattaagtatgtggtattaattaatttattatgacaaacaggagatattaatttattaatttattatgagacattaattaattgataattgattaatgattggctcacacaattatggaggctgagcagtcctacgatctgccatctcaagctggaaatgctgtaaagttggggtgtattttggtcttagtctgaaggcctgagaaccaggggagctgataacgtaaatcccaatctgagggcaggacaaaatgcaaggagctgtctcgctcagtgaggtgagaataaatgggggtgaattcttccttcttccacctctgttctgtttgggctctcaacaaattgggtgatgcccaactgcatccaggagggcaatctactttactgagaccactgattcaaatggtaatgtcgtttagaaataccctcacaggcacacctaaaaacaatgtttaatctggacaacacatggcctaccgaaattgatgtgtaaaattaatcatcacagctaatggtaaacttctaacttttccttgatatcagccatgccctgccacaagcctcccttaggaggcaaaagtgcactaattcaaagtaatgtccatgtttctgcttctttaccacacaacatagatcagaaattcctagaaagtcactgggtttatgtttccgttctcaaatttctttttggttctttttaaaatcttctcagccattttttatactcccagttccatatagtcatatttcaatttgactttcttttccttgaacatcgtaagtatagtatagctgattaatgratgggtttatttctgtgcctgttgattaattatgctagtttgtagtcttggtgacatgactcgttatattcccagttatctttgattttgtgttgaacattatggtgaaaaatagaagtaatcctttagagataacttatttgcttccgtcaggcccctggggacactagcagtttgggacaaatgtaatcccagttccagattggttttctgggcagcttgtattacattaaaatgggttaccagtacatggaaaggatgttcatgcttagtcctatgtcacagtctatggagattttactttgaaacaggagtgtggtttaccagcgaccttatccttagaacgccgaggaatctctcaaggctgtgcagtctctccattctctcctcttccggatcagcaaatgcccctatggcaaaactgagctcacctctctgggtttttgtgctctttttcacctttgctctctgycttggtagttaatgctttcctatctagttagttctttcctacttttaggaaaatgtttatttttaaaaaacwttgtccagtttatagttacttttagtgggcaatggtcacccagattacttaatctgctgttatcatgagtggaattccctcattacttctttcacagtcagtcagtagtgcctccagacaatcccaaaaagttggataatcatcctattttataggagttccacagatgctaaagtcatcccccaaacttgacattcaacactgccctatgtgaaattctaatgttggagtctggatttgtgccagggaacccttgagaaaatcctgtgttattggccagactgttggttcttcaccatatgacagttattttctacatctagaatgtggatcttcactgctcagtaacatgagataaataaaggaaggactcctccccattgaaggctgtgtgctcagagtaagaaaacctcattttacccacgatatcattttacttagtgtataatattaagtaaaataatatatttaatttatatataattatataccaatgtaatatattattattaacatgagtgtagaaataataaaaatattgaaaactttacttttcaattttcagttatttttatatattgtcatttaattctcagaaaaatcatatgaagttggttttctgattgcctttttatatatgaagaaacaaaaacagaaaatataagagactttattgtaaatgcctttctgacttatgtctgtctcttttagttatgaacttttttttttttttttttttttgagacagggtctcacactgtcacccaggctggagtgcagtggtgagatcttggctcaytgcagcctctgcctcccgggttcaagcgattctcttgcctcagtctcccaagtagctgggattacaggcgtgggctaccacgctcagctamttttttgtatttttaatagcgatggtcaccatgttggccaggctggtctgaaactcctgaccttaagtaatccaccttcctcagtttcccaaagtgctgggattacaggcctgagccatcgcgcctggcctgaaccttttatttgttgcttaatgaaaagaacaagtaaagcagggaggtttttaagaagttcctcaaaatagggataaaatatmtaaaatagtatttgttagcatatccatattttcaagtgtattggatctattagccttaaggttcacatttgaaaaccatctgtgcaaagacatcttagatcttcatgaacatgacatatcatctagggcagtaattctaaaccaaataaatatgacttccccaaagcgccaaggatgtgtgagaaaaacttttcaaatgtacatgctacttcatgtgttctaatgagctcctctagaaaggtgaaggtgcacctgtttttcacagtccactcagtcactgttactccagaagaatgtagatttcctcataagtattgaggtaggaaaaggctgatgttcacactttttttgtgtgatgctatagatatttagttaccattggactagaatctatattacacttaaaatttaggtgctagatatttgggcagttgtttcatttcaatgttttaaggatattatagtcactataaactcatgatgaatatatcattaagtaaatattttaccattttcttttttaaagacagggtctgctatattgcctaggctggcctcgaactcctgggctcaagcgatccttctgtctgagcctctcaggtagctgtaactacaggtgtacaccatggcacccagttaaattagaactttagaaccaagctattaacattaatattttcttgtactggttttcactgctagagcaatccctgcaatctttttccttttttgtttgacacttcactttttaaaattctgtttttaattgacacatagtaattatatatatttatggggtacagtatgatgttccattgtattatacattgtgtaataattaaatcaagatttgtagcatattcatcatctcatacatttatcacatctttgtggtgagcacattaaaaatcttctcttctattttgaaatatgcagcatgttactattaaccatagtcatcctgctgtgctatagaacaccagtacttatttctcctacctaactttttacccgtttaccattctctcccccattttctccttcctcctatcttccctagcctctggtaaccactatcttactctctacttctatggcatcaacttctttagattccacatatgggtagatgttgtgctatttgtttttctgtgcaaatatataattttttttttttttkkggggacagagtctccctcttttgcccagactggagggcagtggcatgatctcagctcactgtaacctccgcctcccgggttcaagccattatcctgtctcagcctcctgagaagctgggattacaggtgcctgccaccacgcctggctaattttttatatttttagtagagatggggtttcaccatattggccgggctggtcttgaactcctgacctcaggtgatccaccttcctcggcctccctcccaaagtgctgggattataggcatgagccaccactcctgaccgcaaatatgtaactatttagcataatgtcctccaggttcatccctgttggaacaaatgacaggatttccttctttcttatggttgaatagtattccattgtgtatatgtaccacttttatttatccattcatccattgatgggcacttaggttgattccacatcttgattattgtgaatgatgttgcaataaacatgggagtgtttcctttagatatatgcccaatagtaggattgctggaccatatggtagtaccatttttaatttttttgaaaaacctccatactgttttacacaatggctatacaaatttagttttccaccaacagtgtataaatgtttctctttctctacatctatgccagcatttgtcatttttgtggtttttttaatggcaattctagttgggatgaggtaatatctcatcgtggttttgatttgcatttccctgaggataagtgatgttgagcagtttttcatatacttgttggccatttgagtgtcttcttttgagaaatgtctatttaagtcttttacttgttttaaaaatcagattattattattattattattattattttgttattgagttgagttccttatatattctggataccagtccctatactcgtgattaaaagaggacttaaaatcttcttactgcaataagaatgcactctatatttgcttttatttttaaaaatatatacaactataggccaggtgtggtggctcatgcctgtaatcccagcactttgggaggctgaggtgggcagattgcttgagcctaggagtttgacactagcctggcaarcaaggcaaaatcccatctctacaaaaacaaaaacaaaaaacaaaaattagctgggtttggtggtgtgtgcttgtaatccaagctacttgggaggctgaggtcggaagatcatctgatccactgaactctagcctgggtgatagaatgagactctgtctaaataaaataaaataaaaatatatacwtatatatatatataaaatataatatattgccaaacttaatgtatatacttgtgcaggtgataaatttcttgttcaaggggagaagaatctcaagtcatatttctgattttgattttcttttagtgatgtcttctagagctaacaaattatgttccaaattaggtgttttgagcattgagataatttctgcacatggccaacccatgtctgagaatttttaaaaaaagattagatagtattgttagactaaaaatagataatgctgatcattctttaaaaagtgtaggtgaataatagcaaaatgactgtgcttcacagttatattagaatgaaactccacacctgaaagcgaaactgaaaataagtatcttaccaaaaaaacctcaggatttattaatgacatcaatgcaactattaaaaaaaatttctgagaaggtgcctattgccagttgtggtgatcataatctctgggttcagtaatcacacatcatagtctttgtcatactaacagttttagttttaaaaattaggcaaagttaggttgaatagagaaaaacaatatttgcattcagaatctactttattttccatcaactttattttatgattgtttctttggttcttgtcttataacagtagagttttaaacagattaggaagatcatcaaattgatttggtataaattggttctttttttcaatgccaatcatagttacatatatcaatatacttatccagaatgaatttaatacagtagctgttttcctactgaatagaaaattgtaattttgaaatgaaaaattgtcttggtttttactatagaaatgattttaaatgcagaaagacactcaaagtaatccaaaacctgaaggcaaagcttaatctttgtgactaagtcggattgagcttagrtttgacatctcaattgaaatatgacatctctctctgccaactaccagccaccattgtcctgagtcattagtttcccttggagaatattggttgtgaattcagtaatataatttcctctggcactatccgtgagatataaccaaacatctcctatccaagttgaaacctagtgcagtctggactagtttgaaattgcatgtgatagtggccccaggaaacatggtaagcggttctcaaaagactatttggataatcatcgattgaaactgaacatctttctccaagaatatgtgcttactttattatagttactctcttattaatccttaaagctcttataaagagatgggcacagacacagaacagcaaggctgaattctagtaaaagttcaccatttactatctatgagtaactgggaaattactgagcctctcagagtctcattttactcatttataaatataatcacacctattctttagggttgtttggaatattaaatgacagttggtgtctagtagaatgtatgacatatggttcacattcaatgagtccttataataaaaacaatctttttgtacatgttattaataacatttagwatatgaatatatttgcagcaacttcaaaaatcaaatattaaataatggataaaaaatattgctcatagtttttatgatacaaggaaggttcctaggtatttgaaaacccatgtaatattagaagttcttagatatgcaaaaaagcatagatgattttgggaggggagcatcattatgtataataattattattgagatggttccttttgtggagaaagctaatttttaagttagattttcaagagcattttctcrttgtatttcaggcccagttatcatctgtgtagattcattttctgcatgtggatgtccagttgttccagcawcatttgttgaaaagactatctttgcttcattttattgtcttttctcctttgtcaaagatcagttgactttatttatgtgcgtctgttttctgttccattgatctggtttgtttgtttatttttttgtttgtattttttttattgccagtatcacactgtcttgattactgtagctttatagtaagtcttgaagttgcatagggtcagtcctctaatttttttcttctccttcaaatttgtgtttactattctgggtcttttgcctcttcatatgaattttagaatcagttacttgttttcacagaatattttgtgatttttattgggwctttgttgaatctatagatcacattggaaagaaatgacatctttacattattgagtcttcccatccatgaatatggaatatctctccatttatttagttcttccttgatttatttcatatgaattttgtattcttcctcatatagatcttctacatacattgttagatttataactatttcattttggggagtgctaatataagtagtattgtgtttttaatttcaaagtctacgtgttcatttctgtatatagaaaagcaattgacttttgtgtattaatcttatctcctgcaaacttgttatagtcacataattagttccaggagtttttttttaattgattatattgggttttctacatagacgttcatgttatctgtaaacaaagttttatttcttcattctcaatctatatgccttttatttccttttcttatcttattgcatcaaataggacttccagtacaatgttgaaaagggtgatgacagggaamctccttgccttgctcctgatcttttcggggaagcttccattttgtcatcattaaatatgacattaattataggttttttgtagatgtcctttatcaagttgataaagctcccttctatttctagctcactgaaattttttattattatggatggatgttaaattttgtcaaatgctttttattcatctgttgatatgatcatgtaatttttcttgtttagcttgttgatatatggattaaattaatagactgttgaatgctgaaccagccttgtgtatctgacataaaccccgcttggtcatggtgtataattctttttttttttttttttttttttgagacagagtcctgctggagtcccaggctggagtgcaatggcgctatcttgcttgctgcaaccactgctgccagggttcaagcaattctcttgcttcagcctcccaagtagctgggattacaggcacacaccaccatgcccggctaattttttttgtatttttagtagagatggggtttcaccatgttagccagcctggtctcaaactcctgacctcaggtgatccgcccgcttccgcctcccaaagtgctgggattacaggcgtgagccattgggccccgcccggtgtctaattctttttctatgttgttggacttgatttgctaatattttgatgagaactttggcaagtatgttcatgagaaatattggcttgtagttttcttttcttgtaatgactttgtctggttttggaattagggtaatggtggcctccaagaaagatttaagaagcattccctctgcttttatcttctggaaagattgtagataatcgatacaagaattgatatagtttcctcttaaacrtgtggtagaatttaacagtgaaaccatgtgaacatggtgctttctgttttgtaaggttattaattgttgattcaatttctttaatagatatgcacctatttagattgtctatttcttcttatgtaaattttggtagattctatcttttaagaaatcgatccatttcatctaggttatcaaattcgtgagcatagagttgtttgtagtatttcttctgttatcctttcaatgtccacgcgatctgtaataatgtcccttatcatttctgatattagtagttttgttctctctctctcatccttttttttttttttcttagcatggctaatggctcattgatcttattgattttttcaaagaaccaaagtttggttgcattgattttttctatttcctgtttccaattttattgatttctgttctaatttttattagtttttgtttaccttggatttaatttgctcttttttttccagtaccctaaggtggtaacttagattattgattttagttmtttcttcttttttaatatatgcattcagtgctataaatttcccattcagtactgctttcaaggcwtcattcaaattttgacaaggtgtactgtcaatttcatttagtttcaaatattcttatgattgatcatttatgtataataaaactttggctactcaactcttggatgttgaaggtatttctttttttaaataaagttgaataagcattattttgaaagatttttatgcttccctgcctttttaaacaaggtatgctcattattcatgtcttcacctctttgatgctgtactataaattgaaatattaattacattattgatggagtgatttctacagaagctattgagtgctgtctaatttttgtccatatattctactactgctggtccttatcaatctgtctacacttttgacaattttttttgcctccttgcatttagactgtcactgctcacttttcagtattgtcagtatctgagcctctttttaatcaattatgaacttttcaaccagttaagcaagcctactaaaattaagggaagtgaactctcctaagattaaaacaagaaatgtttgagttttagataaagaccttgtaatcttctcagttgctccaagaactatgtgagttcctgcttcctcattctgctttagtgagtagaattgtttgataactgtttcccatttaggtgaagtgtctaatgaagtcctctacctgttaatgttttattatgtttatgcaaggtgttaggctaatagcaaattttaatattcttgcatatgatttctaacaaatgcattacaattagtgcaatttgtttgctgcttattgccttggttccatagggttttgaaagctgtactggaaatgtcatgcagaaaagacttttgattgactgcttcagtgaacagcaacaacaacaaacgaatctagaatgtcttgctctgagttcacctttataagccagggcttcctagtcaacaagtacaaagcctgattgtgctcctagaatacctgcagtcctgatttacattttttaccaagtgcttggtaaactggactgcaaagaagtgctcatagtcaagctgtagtgacattttaaggcacaatctaaactcaatgattctgtgatgagagagaagagagtcaaaaaagaagcagccttacatcaaagaatgtttctggtatgcatgctacttgtttttaagtagaatattttaaattaatctcaaggaaaaaatgaggttctatgttggaagcttattttaaatttactgtcattttatttccaggtggagcaccagtattcccacaagtttacggtagtggtgttacgtgccaccaaagtgacaaagggggcctttggtgacatgcgtaagtgccctttttttctttgctgttaaacatgyaattatggttcagcctttaattgcttgagttccttgacaaatcggaggttctgccttcttcaaatgtggttatgtttgtctagatctttgaatgataacatttcaaacagttctctgatgctatctgtcagattagcattttacctgggccttaaattagccaaagtgacaaagggggcctttggtgacatgcgtaagagtgcccttattttctttgctgttaaacgtataattatggttcagcctttaattacttgagttccttgacaaatcagaggttctgccttcttcaaatgtggttatgtttgtctggatctttgaacgataacatttcgaacagttctctgatgctatctgtcagaacagcattttacctgggccttaaattagccgagatcacttggagtcagacaaaatgattttcttgtgacgtacacatcttgggaattcaaagaaattttgttcaattttgcttctaaaagaatactgagtaaagactttaaacaagctgcctctgtgaggtattatgcacttagaattgttaaaatgtagtttttctctagttcttatgcctttgagtgtgtttattttgtatggaatagccatagaaactggtataggacagcctgaaatgatgcgatccacagcctgaggataatgctgaattaacttgttgacagtatctttctccatgtttttaaaaaaggcaattttccttgtagaatcttattatttaaatcattggaattcgtgcaagtgggaatacaaataacaatggatacaacaaagtattatgatgatgaatttgataacatcttagatttaataatgtcttagatttaacatcttagattgttaatatgggaatggataatttaactctcaaaacaggttttgggaaagagaacagagattgcaatgtatcgtccaggaaacaggtagggttcccagcccaaatgacatttaaactggtacctaaaggagaagtatcttggtcatgagagcaagaagtcctaggcagagaaaacagcgtgttccaaagcaaaaagaccagaatgcttgtgaggagctagaaccgacccaatattactagagaatagataacggaggtgggggctggaagggcagatgagactaggatgataagccctggtaagacaaagacttaggactgagattttttcattaatgcaatggaaagaatttgatggcatttaagtagtaagtcacacaactgaattttcatttttcaaaatgttgtgactgtagtatgttaaatatattggagaggaatgtggaaaataggtttttcttttttttcaaagaacaggagggacttcagcctgttgaaatggcaatgaaaatgccagtaaagagggaggagttagatactaagaaaagaaagaatgtgagcttaaggctcataycatcagtgaatgaggagagtccaggaagttggtaaatgtctgaagcaaggagaggattgttaggtagaatctaacagcaagagttttggctgagcagtggttttcatgacaggtgaggagagcaatggcaatttcttcaaaactagcttcgatcagatgtttacattttaaattttatctcagacttcagtttaacccatctaatcatccctttattaatatttttctgaagttattcttattttgctttttacagttcttttcattttcaccattttaaatgagaatttactgaaagaaaggcccctgcgaaagagaagcctcattagaagctgtatttagacactattacccaccatactcttaagaaaaggcgtgcgttttacaaccaaagaggccacgctgtgtgttggaaaagccattcttaattccactaaattctgtgtcagtagcttgtcaggcatgcaaaagacagagctaatttgactttcaaaaatacagctattatctgttagataaagcagcagcaatccccccaccccttttttttaatcaatgaagcgttctgttgtgtagagacaacggctgttattgtgcttaagatgagtccaacagcagttcaaactttatactccatgagtctctttcaactggtgtggatctgattttctagcaacttcatggtaggcccaggcactttggcaatggttatttattataattagaatagggaaaaaagtaatgctgaaagtttcattttaaatctctttgaattgatattgataatattactagaagaatgaacctgagatattaattaatctcctgggacagggaacatttaggttttggttccccacagtgtacataacacagattagactcttaattttagaagcttcctttttaaagtgaaggacccatggaaggaatggccactgaagattaattgctgtggcagaaaggacagtgytatggcattctgttagaatttttattcagcatttgtaattggatttttttttgaattgttacttttgtgtgtgtgtggggagggagttgttgtcgaccatttatatcaccttaatgagtgcacaagagtcgggaagagacaaaaagaacatgaaggagtgttagagaaataaatatagtgataaagttactaaggaaaagtgaatagatgatatatagtgccaaccactttatttttgaaaagttgtgggagactctggtgagaaaaggcacaggtattagccatcacttttctgagaggaattttgatgatatttcttggagagcttgatctatacaaattaccaaatagctgaatttggggtgtttgtatatagcagttctttaaacatagacaagaatagaactataagaactatttttaaaagtcctaagatctgtgaagaccaggatcgcagaattctacatcctcttctgttgttgatagtgtctgcacttatttataaaggtagagttccataaaattctacatcttggtaaagaagaatgatagattactattggagttttctgccttgcttgtgtgtctgagtgctttctcaacggtaccaagacaaataaaaaatcaactagttaattcttggtaaaatattcatatctccttttaaagaggatagtgctaaggttatatctattttttattttgtcctttgataaatcatgctaccctaactacctacatttagaaatatgcttctgcactgttaaaacctcagaataaaatcagcaacaaccaataaactgtcttttgaagagtcagagatgacattttaatttatagcatctctttcattccttgttttcacttgagggcattgacaagccaagaataagacagctgccagttccttcccagacatggttgctaatttcagtgttactcaaatgcagcatttatacccagtgctctagtgatgactccttctgcattcttatgtttacagttcataggaagaggcagtttgaagttcacatttacacctgactcaaaatcatcgctctatttttatctttgaaataagtagcttgcactaatttggcaatattaatgtaacttttacttttaaacctacaggaagttgttgtagatgtgatatgtaacaagctacatgtcagcatcatgttgggtgctaaatgttgggttaatgtgtgttaaactctatactctacattgtccctttcctcttttaacagaagatatgtttgcagaatggctgcagtgagtgtagtatttcaattggtcatagaattttctttgtgcctgtaagaaacagaacacacaactctggccacaaacttcattttataaccaaatgaaatagctgacacaaatgcaatagctaccttactgaatttctgcttcttttagaaagtgttggggaaaacacagatcctgaatgataatggaggctagccttaaaattcagaactattagagccatgtttcactccctgctatgagattagataagaaatgccatagtgttttttaagtgattaaataccacagaatattagagttttagaactatcctaattatggatatatatactgaggattctttccttgtctggcccctttattagacacataaactctttttctttacagaattagcatcataaacattagagcttccaagaacaggtgtaggattgcaggtggatctaactttacttaagtattcagatgacaacagtgtttaatgctcacatttatactctaataaaaaatrcatatgcttgggaaaattttgaactcattgtattcaagccaattttataagatcgtattaatatcttaacatacttctttaagattttcttaataacctcaagctcttaatattcaaaaagtctgtgcctgtaggtaaatgatattctgtttctgataacttcctggcaagatttggatcaagtttctaattttaaagggttgtgccatttgcagttctaaggctggacctaatcttccacaaacagtgcttcttaaattataatgtccatatgagtcactgggggtttttattcaaaatgcagattttgattctgtaggtttggggagtagattccgaatttctaacatacagctgatgtagacattgctgacccatgaaccacattttgaaagacaaggtctaggcaatttcttctagtttatgtttgcttaccctgagatctataggacttgtgagcagagcaaagactttaaaaatccatgatggaacaaagattctaagacttttgttttttgctgattttacttttgtaaaatgaaataatcatgaatacattaatactgtttatttttgaaattcttataaaaggatgcttaattacatgactcattatattatcaatgagaatgatagaaataaacacaaataccttaataccacaattataatgttaaattctgaaattattttatactaaaatcatgaaaataccagattacaagccatgagaaaacaagaacatattttttattgtttcaaaagtcacagtgctcacttcatgttaaatgattaatgcatgaaatgtactatacacacacacacacatttacaaatatattctttccctcatacatataaagataccttccacaaatagtttaatatataattctctttcagcttaattggtgattgtgtratatttgactgtgtgatatttgattgtgtgatatttgtgwtccatctaagaacccaggcagcgtcactctaggtaccctgcttttaaccactgcagcatggtaaaatactgttttattctctcctgyaaagagctttggttccgatgtggcatcctcatggtgtaatatgtttccactgtatgaagtttaggtaaatccttgctgctagtgaaaatatggctgttctcccaaagggaagattaaactttcacctttcacacattgtcagagaatgtaagcacaaaaccagggtgattccaaacggaatgaaaaagtttttttgaatgttttagaccacgtgctttcttgtggggacttgtgaaaacttgagtttgttctgccttatggccttgaggaaagaaggaacccactgtgccttcacctctcctttagtggagatgtgttgtctaggatgagtcagcaacagttctgatgtgggccttgtaatgtgagggatgcatgttgaacatttataagattcgcgaaataactatgaaagtttttttaacggtttattttgacagtatgctcatgcataaagtagatattctaaatatgtgcaaatgttcagttctttttaaatcacgctgtgttgctttttatgtctttgaagtcctgtggaaaaatttctaaaagtgaacacatcaccgtgtaagggtgtggatagtctctatattcttgcttagggccatgaaatctccccttatatgatttttccaaatcacattaattttgattgtgagccctattccctagagaaggtgggggaattcagtgatctccctcactccaaggtcctacaggaattctaggcatttataattgcctataaattaggagtagggcttgcataatctttgctgtttgccatcactggcatcaacccgtctgttaaatgttgtcttcgtggattctggccatccactttttggcaggcactaaaatgcctttcagagcagtcttccccagcgatcacgcagcacaccagggagattttactgctgttctccgggtgatggtgtttagagttcagactccatggccatcctgtagtcaccatgcagtgtacaatgcacaagaagcatgggcttctaaaacttgtagaaactaaagaaaacccaaatgcataacattttcccgaagggtaaccctctttccttcagctttatctctccaatgttgcagcctcagtcctctcacctgtagggcgacctgcttaatcctcttcagaggtcccacctctcaatacaaagtgttaatcattcccttggaaaaaggagcttagaactcaatcttcctatttgtaaatattggggtgagaagcagggtgttggatatttagggaaacattatctatttaatcttttaagagtcttctttagcaataagagcatgtaggaatcaatatgaaaataaatgatctgtttggtagctattcttgagtttcacagtgatcagaagctccaggaaagatggagagggcagactactcrcgtgtcctgtgtccttgggcagattacttctcctgtctctgccttccactatcttgggagatattgagatatagaacgagttgacgtatgcaaagtacttatatgcctaacacacagtaagtgctcaataaatgtgacccattattatcwcaattgtttcgaacacaattatgaaaagacatctatttcttcaacgtcatctttgtatgaaccaagaatattcttttgggtagtctgtgcatttgactaattttcaatttttcaccttagagacaagaaatgtccattatgaatttctgtgttgagcaaattattggacccttctttctcagcttgagagaacaaaatggagaatggtatctccattgttaaacacttttccgaaaacacttgggtatatttcactccctgtgctccctcagcagctgtctagatttctttgtaacacttgtcacatgggagtataatcatgcacttttaagactaaggcctgaggcttactcacaaaaaaaaaaaaaaaaaaaaaaaaagaagcttaattctgattctggcatagcagtaagatctcagggaatattggatgaatgagtaaaatatatgaaagtgtgtgattattacttttttttgatattgcttccttttttgcttcagtgagacagaattttagaaaacaattttatacttcactttttaaagattataaatgactcttatttctatccactactaactagaatttttctgaggttgcatgcacaggaaattttacaacacctttgagtgaatttaattaatcttttttacattaattatggagtttcaaatcttattttttataaatgacattgctgttggtctatactttggctaaagtatatactaaaatatatcttttctgatatattttatatatatctatataaatatatcttttctgatatattttatatatatctatataaatatatcttttctgatatattttatatatatctatataaatatatcttttctgatatattttatatatatctatataaatatrtcttttctgatatattttatatatatctatataaatatatcttttctgatatattttatatatatctatataaatatatcttttctgatatattttatatatatctatataaatatatcttttctgatatttttatatatatctatataaatatatcttttctgatatattttatatatatatataaatatatcttttctgatataaatatttccttaaatcagtcttcaggttatgactgaacatgagttttagtttattaatggttttggaatgttttagagtatccacccaagattttaaaaattctaagtataatgaaattgtttcccaatggtcttttcatggaagataatttcaagatgagtaaagtgtttcataacgcatgtctctctcacatctcttatcttgtcttttctgtgtagtggagaaatataatgtgttagtaaggcactgttgttccttcctcatctgcttagaatgtcaggtagtttacgaagttgttaagtggttttatgaatacagttaatcctttccatctctgtactttattagatttttttgtttgtgtatgtgtgtattcatgtgttttaggtcggatgaacacagtgaataatattctatgatatttcaataatgtcaattgatcaaaaaccatatgccacttctgtagagaaagtatgtgattaaaatctaatggaattaaatttaaacagagactaaatrtttcttaaattaccaaggacaagtatgttcttaaagtgtttatgtctaagagaatacctctgctrctctaaaaatttaaacatttatgtgaaaatgcttactatatgttattttagtatatcttaatattataaaatctttcttaaaaataaaaattaggtaatgtagagactgaaatgatggattaaacttagctgagctgtggtctgagggtctctgtaaattttactggctccttggatgcactttttcattctcactcctcacttaatatatcaatatattttaatgaaataatttagataaaattccagacaaaaatatttttagttgatgtataagaataatgcaaatctccagatgcaaaacaaaatgacaacgttgagattttaacttcgaaatgaaatattaaagaaatataacccagtgcgtattccagcaaggcctgactaatgtccacatcagtaattgctgagtatgtgctatgtagttagtacttatttagtaccttgaaaattacaagaaaaataatgataatatctactgtgggtaactttatggagtgtgtaatttataacaaagaggaagcattgtttagtggtttaaacaaggactctgaaactgtcttgcttgggttcaaatctcccttctgctacttattaaccatgtgaacttggacaagttacttggctgttttatgtctcagtttcttcaactgttaaatgggagtaataatcctactattatttatgaagcttaaatgaaattatggcatagtatgcacaatataagtgtttcttaaataaacaaaaatcctaagcaaacttcttaggactttacattatacatactttatgtattcatttcagtgatactttgagatatgtactgtctttattttaatttttttattttaatttttgtttatttttatttatttatatatatttttttattatattttaagttctagggtacttgtgcacaacatgcaggtttgttacatatgtatacatgtgccatgttggtgtgctgcacccattaactcgtcatttacattaggtatatctcctaatgctatccctccctcctcctcccaccccacaacaggccctgtgtaagaactttggttaaagtttagttaacatagtccagratcacagagctgttatgttttggggctggaactcaaacttgcctcacttcaatgtttacttgtgcagcagctttgcctgtgagcagtgtgtggggtaagtgggaagatgaaatgggcttaaataaccctttggaaaaatgctgccaataagagaagactttacagcttgaatgtagattgagatgggctttataacttaggtagccttttaatatatggaatgggtaggggttgcatttcaattttggaaaagaaaatcataagaacaatatttaaagtgagattgacataatctgtccaatatatattatttagggagcttagctatttttttatgatttatgctagtgaataaatatcaagaattatgtcttgctttagtgcagtggttctaaactgggaaacaattttgcctcctggtgcacactgggcaatattctagagacatttttgtcaaaatcgggtatttctattggcatctagcagctagaagtcagggacaacaccatagagcaaagagttacctggcccaaaatgtcaatagcattaaggttaagaatctctttttaatgaaaaagaataatttttcttgcctacagtaagtggaattcatatatatttaaatccatatagctaaaatgaataatatgaataaattaatatgttttatcacggtatataagaatttctggagaattactctttctattcaatctagaaagattccaagaaacatccgtacattctaagcatttaaaacattccaagcatagatacagattccaaagatatgttttttccctccaagaagatatcacagaagtttaagtaaaatgacactgcaggcaacaacgacactttcaattctgttttagatctacatttagtcttctttgtgttgttttggcgtatatttctccccattttcccatgaatatcaacatctttgcaataaatcatttttattgtataccaactctcagttagctattcattaatgtactaaatcaattgctagtacgaaatgtaccaagttgatcatgagtggatactattgtgctrtcttgctgacatccatttgactgatggcactttctgatagtgtcatgctgccttacactcccttacaaaaggaaatgtgactttagaaagcactattatacatattcagcctatgagaaaaaaggaaatgwaatgtacagcttaacttggagactgcctaataaagggatttcaacatagtgttaataaaactgcattgtaatttcaaatgagggaaaggcattccacatttgagttcctaggcaatgctcaagttgttgtaaaatctttactcctttctccccacagaattactgcccaagttctgtttactaaaccacattggattcttcactaacttttccagcttctgcactcccagcaattcccaggaattgtctttcagcatctatagccataacgcttataattttgatctctttctggagggagcaggggctgctacatgtaaacaagtcctgtggcactctgcctattccttggagttattatgaagggaggtaagctgaggttcaggtttttttaatataaaattaatacttacaaataaaggttaattacaaatatacttggaagaaatgactgacattgatttatattacaatccaaataaacaggttggggacaaacaccaggagggttgagacctattaccaaagagtaaaatgaagtttgagtggagactgttgtgcctatgataaaggtgacctgytccacagtatcggttagggtcagtccatcatcctttcttttagtaatgtgtatcatgttcctatatctcagacttyatgtgagactcttggacacaggagtgaataggaaggctgtgctcactgctatcatggagtttacagtttcatagagacaaaaagaggtagaagttattagtactggaatatttgactgagcaagaactctggtttcagaaagactgggttaaaaccccaactctgaatgaacttgctcarctcactaaatgcctctgagtctcaatttcttcacctctgatggaaataataatacctaatcagcaggttgaagctttatgtggaattatttttattttatgcagatgtatctagataaaacctctggggaacttgatttaaagttgccagtttcacccaataggaaaacaaaacaactagttgactagggaagtggggactagataaggaaagaatggagagaacatctcattccccatatttcttaactgtaccgtctttggactcttatcttggatattcttgggacaagaacaacaacttgaataaactttagctatcagctaaaacgtcaaaagaaaacataacaacatgtacaactaaaagtacagcaaagatctgttagaatgaatatttctgccatcaatatgcctgtgtggaatgtttgaaatgtgtagattccaaagatgcctctttgccgtagagtgatattccagtgaatggctgagaagggtcactgactagagggagaaccttgggtttgatggggggttgggagggagcctttaagtctttctcaccatatttaggcctgacttggtaggcagtgaaggtcaaaagtgtgtttcagaaggatagttgtggttgcattatagaaggtgccttgagaataagcaactaagagattatgctaatagtctatgtgagaggtggtgcttagttgaatcggggcaattattttgaatgaaatgaaggagtcagatgttaacatcattttgcaagtgaaaagctaaaacttagagacagattggatatttgaatcgtgaagaaaagacaactctcgtgtttctaggccagacggttagaaaagatgacatcattaaataaaataggaaagaaagtgaggaaaaataacaagtttttattttagtttttttttgttttgtattaatttttgtcttacatttaggaaaagaatgatgaaaataagtttgctttgtaaatattgagtttgaggtatctttaaggtattcaaggtatttttgaggcatttgagagcagatttaagatttcagaatggaggtagggctcacagatgtagattagggagacactgacatttatgtgcaaggcagaactaaaggagtgttaaagaaaatccagaactgattcagagtaactaaacaggattgaactatttcaaaatatattacttaagaatagattatatgttaacatataatcaagaacctcatatttgtcatgtttatacttcttcccccttgtagccttgaggatatgaaggaatgcattgtagctgccatttaaaccttgaagataatcaactttaaaggatctgagattaactagactacacaattaatgcatgtcatgtgatatgaggggtgcatattgagtgttttcaagaccatataaataactgcgatcattcctttgcaacttggttttgactacatgagcaatacagtgttcaaaggcctcgcttccttttgaagaattctaataagagatttgtaagggacacaagaagaaagtccacagtttagtgatgagttgaggtggagaaagctggtgaaagatatagaggaactatttagagaggtaggtaggaaatcacaaaataatgatatattagacacaaaagaaagataattgcaccaaggatgttgcatatgtgttaagtaaagtgagaaaaagctcactgaatttggcattgaagttaggttcgagagaatgaaccgattagggtaacagaagaaggcagaggacagtaggttggaaacttatggaataatgagatttagaagcagtaagtgtagactatatttttccaaaatctttgatgtaggagagaaaagatctggaagaattgtaagaattaatgaaattttgttcatttttttaaggatgcccaatatttgtttatatttataagttgagagaaagtagctaaggcaaaaccaatatttacagattaaatttgaggctggggattaaaaaataagaaatatccgagagaagcggtattgagagaagagtgtaaggatacttttacttctaagataatagaggaagaacttaaatatgaatacattattaaattataaacatattttttaaattgtgagatatagggaaggaaaattgaaggactacatctaatcctcccccttttttttttttttttagtgaagtgtgagtctgaattgtgtcctcaaaagagaagtagtaagtagggtaggtggcttgaaaaaaacagtacatgttttagcagccatgtggagaatggtgggtggaggggaaggatagggatgattatagtttggccaagttaggaactaaatggtcactgaagtatgctaaagtgactaatagcagtgtatttacttttcctaagaacaacttaggaaacacatattaaattaatttttttaaatgtctagaggaatgaaaagctgatgagtaaactgggacttgagggactaagatctcagaagagaaataagccaggcttggcgtggtggctcatgcctataatcccagcattttggggagccaaggcagatgaattgtttgagcccaggagttcgagaccaggcctggacaacatggtaaaaccccatctctactaaaaacacaaaaaattagctgagcatgatggtgtgagcttgtagtcccagctacttggggaagggggctaaagtgtgaggatcacctgaaaccaggaggttgaggctacagtgagctgagatggcaccatggtgccactgcactccaggctggttgacagagtaagatcctgtcttcaaaaaaaaaaaaaaagaaggaataagctcatattctgcaagccacgttttccctcagtctattagttagctgcatctaggtaggttggaggggagtgatagggatatgggaagtagccaagcagtgaagaggccaataatccagcagagctttgtcaacctcaaaggacttggggtataaagactggattttaggacaaaataagttgattttgagaagccaagttccttgagagaaagcctagagaagaagtatgcctgacagccagcaccttcatcacgaggcactagccaaattcttgattcatgcagggcaacagtctgagaagcaaaaataaaaacctgaaaaacaggacaaagatattggcagtctcataagaggaaacaaacaaacaaacaaacaaggagatcagagagaccaaattaaaaggggcctaataaatacccttgactttaagttgggagccttagagtgggagtgaacaagaggtagactaaccttacaaagaatgaaatcaatycatttgttaaaatgcaatagaggctatcagtcctactttctctgcctgccagagaataaagtgggtcatctgtggaggtagatctagctcttccataatttgtcataaaaaagtctggcattcagtcaaaggttgactgaattataaatattcagcggcttatagaatatgagtgtaacaaaaataagatcaagaaacaaacagatccacaagtattggatatggatcttaaaataactaagagtaatatgttcaagaaaatagatgctaagatggaggattttaccaggaaaccagatatatacaaaataatcaaatggaaaattttaaactgaaaaacacaagaaattaagaactcagtagatggttttactgtagtttgaaaacagttaaagagagaattactgaactgaaaaatargtctatagaaaatatccagactgaaacacaaaagacaaataaggaaataaaatatagaataaaaagctaaggaatatctggggtatgacaaaaagcattgggaagagagagggaatagggcaaaagtaatatttgaaaatataatggctgggtattttctgtagccaataaaatatattgaaaagcaaatgaccaagagtggatttctcaacaaaacagagaggaaccataagatattagytgacatctttgaggtgtggaaataaagcaactgccagtataatcctgaagatattgaacaaagttccaggacttagactacctgatattacaattaatataaaaatattataattaagacagtttggtataggcgtggtatagatgcaagcttaaatgatagattaatggactaatagacaaacgaagtccagaaacagacttacacttttatgtgaccacttgattaatgcaaagtttatactgcaatgcaagggctaaaggcagtattcccaataaataatgctgggtctattggttacacagggaaaaagactgaatcctaactcctacctcatacctcaaccagcttagtacatgggtagcgaaaaggttgacaatcgtaaaagctgctctaagatctctgtgtgtaattagcaatgttattacatcataaatatatcaaaggaatgaccacatctgagaatagtattcagaggcatttcgttcaacaaattttcatttaagttttggtcttacttcttctcgtttagtcatttctactttgttgataattgaagcataacatttgaagagcagtccatcaccttaaacagattgccaactaacacacccacacttaatttattcttgcatttattttctcgtggccatttgaaaatgtattttatgtctggagagaaatagaagtaaatgactggactgggcttaatctagtctatgggcagaataactccttgacagaagaacagtaactttgttgccttctcaatgtcaaaatgtttgtaatttttctgtgggtgttattatactcctgttctttagttcctcgtaatattataccttaagcccctgttcttcaaatgtctgaataataatcacctggtcaattgtcaaaatgcagatttccaggcccatgctggagaatatgattgaaggtgctaaggttctgcatttttaayggcactgcagatgaatccgtgaaggtcatggtatttcaatggactacatttggggaaacactgttttaagctcactgtcaytgaaccataggtattcagaatgggccatattttgactacacatttgggaggactttcccctttgggattttttttttcctatttatcacaagaattgtaacaaattacttgtaatctgtttttcaaacaagaggtttaagttgctactgatgaaggggaaataggcaaatagagaatatttaaaatagagctaggagtttagaagctgccatgagttcatgaatcacatgatatattacttggacaaagctgaaatgacaaatgggtctgttatgacttcaggcaggcgctccttaaactcctgaagtttagtagtaagttttaccaccctgaagctatttctggtgcatgtagtttcatgtcaactttatgggaagaaaaaagatctgtattccacacccccgacattttttgtttgtcaagatttagataaaaggatgagatgtaaaaggggtttttgcccacatattacatctttgcttcaccacatgtttggctgaaaataatgaagatgaggctgagttagtgactcaacacgcaattgccctataggtgttaattgacaaagccatgaaataagtataatgtacaggaaaaaacaaattctacatttaactttttctttaattcattccttgaaacttctctaaagtattgggctgtgtttactgtcaaagtgggctgccttccttttcaaatcttctaattctgtttgctaccatgccagtgatggttatagattatgcaaagaaactgagctatgtgattattgtaatccaactttaaactagcctcttaaaacttatttttatcctatctaccactgttatagatatttcttagcttacaatgattagagctgatgcagattgcaaaatcaaagtgtgcagttttggtagttttccactgtccagcatcctttgacatcttaactctgaagtctctggctaaagaatcaagaggagaaattagaaacgctgccactctggacatacattttagaaagctgacttactttcaaagtaaaattaaataatgcaaatccaacatgacagctattaaactggattctgattttttaaacaaagtctgtggatgttttaatatataaacatggtgtgggtattgtttttatggtattttctttatcattttgtcagaattagaatttgttaaaaatatgacccattgagaatctaaaatggctgagaagatgggtagataatggtttgactcatggtgcttctcaatttgtcctttccttttcccatctggtgccttccaaggaacttcacttgcagcttgctccttcttgtttgggccaagtagacctcaccctcctctttcccaaagattcaagtaaagattaagtctgaaaaggcaatttccccacctacgatttgaccttatttgtgtgtaataatctgggtgactgagttactagtcactggggtagtgtaactgcttatcttcaatttaccttgcctctaaaattaggctattaacatttgactcacttccataatccgaattttcagtttagtgtttggctccctatcaaggctgaactgcttgtgaatgagcaatgcctggcatatagtaggcactcatgtatttgttgaatgaatgaatgatgtttgccatttgcatgcctccccttcccacacactcttgtattccacgttggtttttgcttggctttgtttttttyctattacttcttggaaaatggttaaaaaaagagcattggccttatgagaaaaatctggccctatgagatgatgtagggctatgttttktaacacataatttgaagcattaattgaatactttccttaaaattacatatttttcttgataattttctaccaactgctattctaaatatggagttttacttctgatttgcaatcctgagcactggtgatatggtagaaacatggttaaggaaaagaagcagtcacctcctggttgaaaatgtgataatgttaccctatgacatgttctcttcttctttggcccatttcaccttatcatccttcccactcaatctttttgttctctaatttgtattccatggtcctgttgagagttataagcactgagttagaaatgagaatgactggctttccccttttgtctaaaataggatatcaaaagtgtgaccagaagatgatccacatcagtgtcagctagactatttgttaaaaattgcaagcccttaattccactacagatatgcagacagtgggtcttcggggatgaaggtcggggtctatgtttttacaataaccctgggcatttgtgttgcactctcacttttgccccactgctctttaccaatgatgtataaggtccaagccggaaaattaaaggcagcctcaaaggctgataccttgtttgtagatcctcccgttttataataacaaccactaaacatacacatgcatctaaagaagctgatgactacataaagaactaggagcaatactgaacaattaagtgaaagacattgattacgttttttgatgaccatagctgttgttgacagacaacatctatttaaatttttttgggggggaaacccaatcaataggtcagaaactattatttttgcttttcctttattttcaactgttggatctttttgtttagacctcctctgtacttcttctctcccccctccctccctcactcttgcactcaccctctctttctcttcctctaattccagctcctctttccatagaatccataccctgtaatctaatttttgttactgaggaacatgatgtaataagagaatgattgttgtagtcaaatgacccaggttcaagaacttgacctgatacttattagctatgtgatattggacagaatgcttaatatttctcagttcctgttactttaacactaaaataaagtacttacattatagcgcgattgtgagatttaaatgagactaatgtgtgtaaagtacttaacacagatccctgtagtcattacttagttatttgttgtttttgttattaattataatggccgcatggaaaagcacctgttaaacgggaaagtcaagtcgataggttaggaaaccttaaatattgtaattgtcgctttctgttgttagcttctgaagatgtacagctgaggaagacaagatctttgccctcaagttgtttatagtcttgtaggaaaagacagatagatgtataatttcatccataaagtatagtgtgtccagtgctgtaagacattaaaggattcggtggaatcctaaaaaaggagtgatcaatacttgcacagtttgggtcactcgctttgttgctaagtgtatatgtaatgggaggaaattaaaataatttctttatttgcaattgttttgttctatttcagtgggcacacatatcataccctgattcaagtgggtatttatgtgaaatagaaaaaaccgttactggccgggcatggtggctcatgcctgtaatcccagcacttcgggagtctgaggcgggcagatcaggaggtcaggagatcgagaccatcctggccaacatggtgtaaccctgtctctactgaatatacaaaaattagccgggcatagtggcatgtgcctgtaatcccagctactctggaggctgaggcacgaaaattgcttgaaccaggaggccgaggttgcagtgagctgagattgtgccactgcactccagcctggcaacagagcaagactctgtctcaaaaaaaaaaaaaaaaggaaaagaaaaaaattgttgcttcatagagacacctcatttccatctgaatattgccataataaatacatgttgatttttaatatgagtgccaccccttaaagttgttcagtgtacaacctgtacaaccatacaaggcaactctataacaataaacaatattcttctcacaatgacttccattattttatctgataaagtaagcaggatgatttttctaacattgacaaatataatcttttttttaaaaaaaagtatttttcaattttttttcttttttactttttacttttactttttaatttttatgggtacatagtaggtgtatatatttatggggtaagtgaagtgttttgatataggtatgcagtgtaaagtaatcacatcatggagaatagggtatccatcctctgaagcatttatgatttgttgcaaataatccaattacactcttttagttacttttaagtgaacaattaggttattattgactatcgtcaccctgttgtgttatcaaatagcaagtcttattcatttttctgttgtgttttttttgtatccattaaccatccccacctcccctccagccccctactacccttcccagcctctggtaatcatccttctgccccctccatgggttcaactgttttgattcttagatcccacaaataagtgagaatatgtgctgtttgtctttctgtgcctggcttatttcacttaagataatgacttccagttccatccatgcaaatggcgagatctcattcttctttatggctgagtaacactccattgtgtatatgtaacacattttatttacccattcatctgttgatggacacttaggttgcttctaaatcttagctattgtaaatagtgctgcaataaacacaggagtacagatatctcttcagtatactgattccttttttttgagtatatactcagcagtgggattgcttggtcatatggtagctctatttttaggtttttgaggaacctccaaattattctccatagtggttgtgctaatttactttcccaccaacattatacaagagatcccttttctccacatccttgccagcatttgttattgcctggatataagccattttatccaggtgagatgagatctcattgtaattttgatttgcgtttctcttatgattaatgatgttcagcacttttcatatgcttgtttcccatttgtatgtcttcttttgagaaatgtctattcaaatcatttgctcattttgttggttacattattagatgtttttctacagttttttgagctccttatatattctggtgattaatttcttgtcagatgggtagtttgcaaatattttctcccattctgtgggttgtctcttcattttgttgattttttttcctttggtgtgcaaaaaagctttttaatttgatgtgatcccatttgcccatttttgctttggttgtctgtgcctgtgtggtattgctcaagaaatttttgcccagactgttctcctggagattttccccaatgttttcttgttgtagttttatattttgagatcttaacatttaaatttttaatccatttttattgattattgtatatggcaagagataggagtctagcttcattcttctgcatatggagatccagttttcccagcaccatttattgaagagactgttttttccccagtgtatgttcttggcacctttgtcaaaaatgagttcacagtaggtctgtgcatttgtctctagctttaagcccatgatcttgtcactatcacagtcctgggtgaaggtcatgttggcgttagctgggtgacattgttatcatcctgtagtagcttgactgagatgttgactgctttgaacctgtcctctctagatagatggaggaattctgaataaatcacttaataaacaattccctctcacaggactattatgaaggacagygacatatgtaaaaagtatctaccctatgatgtttttctattatgtgtatattatcttgtctcagacatttaaatacatcactacagattcattgagaataaactgacaacatatattaataaaaaaattaggaactatgaatcacatttctacctccttcttgtttgtgtttactatctgtagttgatactccagatccctatgtggaactttttatctctacaacccctgacagcaggaagagaacaagacatttcaataatgacataaaccctgtgtggaatgagacctttgaatttattttggatcctaatcaggaaaatgttttggaggtaagtgaaccatttggatgctgttagatggttgtgattcatgttgagagacatgcttgagtttgtccttttactgcctttttgttcctgttagctatagttggagttagactgggcagcttggtagrctagaatctaaatggtgtctgtcaagtaatatgagtgtctatcaggacatacaggagttaggtagggttgggaaaactgctgtcctccccacrtgctttggagaaaacatattttctgctatcaaggagagaatcccagtataacagaataaaaatattttaaattgcctttttaaaaagtgaaaattaatttttcccaaaatatttgtatcgattttctgcattaatatctttctcatattccaaagtagagaggagataaagtttcgtttttgaaaacatgataattgaataaatcaatcaggaaaatgtgaaaaattattatcttatagcaaacacagtactcagaaggaaaagattggccgggcactgtggctcaccccacagcattttcagagcaccaaggcaggcagatcacttgaggtcaggagctcgagaccagcctggccaacacggtgagaccctgtctctattaaaaatacaaaaatttgctggatgtggtggcgcttgcttgtaatcccagctactcaggaggctgaggcaggagattcgcttgaatctgggaggtgraggttgcagtgagccgagatcccgccactgcactccagcctggtgagtgagaccctgtctcaaaaaaaaaaaaaaaaaggaaaagataaaagtattgttactaattaaatattgagatcttcaaggactcttaaatatcatttgagagcttcatttttttaaatgtggtggaaattatagatgtcatttccaaagatccatgggaaattttatttttgtgctttacattttactctgtagattacgttaatggatgccaattatgtcatggatgaaactctagggacagcaacatttactgtatcttctatgaaggtgggagaaaagaaagaagttccttttattttcaaccaagtaagtaacactgcagaattatattccaaccttatgttagataaagtctattgattctgggaagttgggtttaacacttggaaaattgtatttatttgttcatagaatgtttgctttttaaagagaaaattttgtttttctttttactttttgtcctaattttaaaaattattctgacatctataaactttggttgaggtattataccaaacactactaaggctttaatctcctttgttgctccaaatgatgacattgggattcagcaatgcctttggactctaayggcaaaatttaatacaaaaaattggggaggataaaaagacatgcaaaatctgagagctgggggcagagagagagagagagagaacaagtaaacaaactcagtggaaaatgttaggaaattcagactattccaaaaccacatgtttagtaataaatctctctgggggaatatttctgtctcagagaatcctcaagtaaatagggacaaagcagtgaaaggccaaaaggattgatgggaggttattgttatctttgactttctaggtttgctacatttctgaaattttgatagtttattttggaataatgaaaccttaggtaaataattttgtacagaataaactcattggattttgaattctgtaagaaactaatttagtagtttgtagtaagaaatgtaaacaactggtgggcctgtatgtgtaaggctggttaccatactaatttcttkttgttgggagagacaatgtgtctctgcgcatctttagaatgactttccaagtccctacattcacctcaacctacctctcccttaactctcagcttctccatgttgcctttcctgttactgtcccaaatgagtcttcctcctttgagtctccatgataattatctatggtattcattgggactacattatttatactgttcaatgtttcattttcctcttgtaaactaaaatcctctaagtcaggaaacttgaaatactgattaaatgtgcctacagaattaattacatagatgacatttatggaatgaatgtgtacctatttagaaaccaacttagcccaaatgagcttcttgactagtccatgcaatcagaatggcccaggtaccttgaggatgctctggtccatgcactccttggtgcttccacctgctgcagaaagcatttcttctgtctcatgccaagagatgcactcaccacaattctgtcgaccccttttaaagctatttcattcattccttttacaaacatttattgaagatctgctgtgtgccagccattgtgttttgttcaaggaatatagagaataaggtacaggaagttcttccctcaattatctccctctgggaaggaggtgagtaaaggttgaaatgagaagtggaagtagggagatacatacgtgtgataaaaagaaatccccagacagtgagataagtaccaatgagacatgtatagagtgctatgggaaggcagaataaagaacgattgtgttgtgagaggaggctagggatgcctccatagcagtagctgattttgaacaagttgaacagtgaactgtggttaacactttggcattgaaagacaggctgtttggtgtttaaattccagttctgttccttgccatctgttttattctgggaaaataacacttaactcttcygttcctcagtttaatcatctgtaaaatggaaataatattttctaagggaatcattatgattaagcaagttaattttatttatgtatatataatacatgcatatgataatatataatataatgtatattacatatgaatacatttaattataatttgatatattttatggttcagtatatactgacatattatttagtttatatattaagcatataattcaataagtgattgaaagtgattaaaagtatgttaatactataaagtaattaaaataagtgattaaatatatcgatactatacacatatagatgtgcacatgtatacatacagggcttagaacagtttctggtacgtattaggcactatataaatgttacttgtcattgttgctgttattacaccttaagaaaagagcaggatttcatcagtaaagtagttatgagcattctgggcagaacagattgctgaaggccagagtcttgaaagaagaaagcaagctggggcatagcaagataaagggcttggcagatccattttgctgaatcatagggaagagagtgtagaggtggtcaaaggctaaaatcttcaggccttagttattgcatgtttctagcataggctctcagtaaatgtctgttgagggctttggaagcatggattggacctcctgaaatcatttttcttttctttcttcactttagttcatgatacaaagactgtttttgagagaagatattgtggacaacattcatttcctctcctctgtcatttcctatggctagatgtgtaatccctagggctctaaaaaggctttccacattcctgaatttaaagaagattatgtaactattttttttagtgtgcctgagaaaatagttgtccaagcaggcttttcttcattactctgttttcagacttctttgtagttttatctgaatgataatcctttgagctgcaggggtagttgggagagaagtaagcatgatggctaaggggagagtcccctgcttgttcctcagatcatgtgggagtgccctgtgccagccacccagctatccagcctctgccctcagcttggaatcccagtcttcctgatgatctttctacagtgtttacagaggttgtaagagagagaagttggtgagggagcaatgggagagaagagatgtaagccttgaagatggttatggcaacacagtggaggaaaaacagcacttagatttggtgaagggtaaacaaattcttcaaggcaaaatagtattagcaaaaactctttcatagttttgtcatccaaacgttaatactgagtcaacatagagtgatttctgtgtctaggagacagctggagaaataacaggagcttccaaatggagatgggcagattcccagagccctgctttattcacttggagtcgaaactgggaattgagagaatggaccctcgttttgtctctgtcattcatagctctccagaatgtttgaattgttatcctttctttctgagtcttattttcttcatctgtaaaatgaagggttggattaaatttttctaagctcctaatttgtaaaattctatgacctagaaagaatacttctcttcttttaaaaatattttatttttatttttatttatttattttttgagacagggtctcgctctgttgcccaggctggagtgcagtggcacaatcttgcttcactgcaacttctgcctcccaagttcaagccattcccgtgtctcagcctcccaagtagctgagattacaggcacgtgccatcatgcctggctaatttttgtatttttagtagagacggggtttcaccatgttggccaggctggtctcaaactcctaacctcaagttatcctcctgcctcagcctcccaaagtgctgggattgcaggcgtgagccaccacacccagcctgttttattttttatgttaggttcaggaggtacatgtacaggtttgttatatgggtatgttgcatgatactaaggtttgggcttctaatggtcctgtcatccaagtagtgaacatggtatccaataggtagtttttcaactcttgctcctctccttctctccttacttttggagtctccagtgtctatttttctcatcattrtgttcctgtgtacccaatgtttagcttgcacttataagtacaataccttattttcatttggccttcttcacccaaaagcttccaattcctctcattttacagatatggaagctaaatgataataatgcaagaataaaaatctatcakttatatagtattatataatttaaagatactaacttgtaaatagattgtgttattaatatgagaagaatataagcctctattgtgctcctaaaatgttgctaaatattaaaaaaactgcacaaaaagtacaattttcaaggaactaagaatctgtttggaaagtatactttcatgtgtaaacagacagataataataagcagtatcatggggtatctattcattgatttacttgagaagtttttattaaacaactgttatsttccagacagtattctaggtgatagacagtatcctgtgaactctctagggagcttgcattctaatagggaaagtaaacaggcaatgatgagcaaaagaatgatcaacacgccatcagctaatgagaaatactgtgaagaaaataaaggtatgcaacagaaaacagttggtgggcaactgaaatttgtatagtcacaggagacctctctaaagcattattattctttaaattttattataaaaatgtttgacatagaaaaagttgaaagatttatacagtgaacatcatataactgccacctagattctataactaccattttaccaaaaaaacttacttttctgatacatttaaaagcaggtggccaacaacagtatactttacccctacaaacttcagtgtatcattatctagagtttaatatttatgtataataaatggacagtgcaggcaatgtgtgcagtgagtcataagaagaaattatttattcattaattcattcatttgacaaataactattgagccctcactatgtggtagacactctttaggcactgcctatttcagcagtgaacaaaatgaacaagaatccctaccctcaggaaacttacattctacttagcgagacagatgaaaagcaaggtaaatatgtaaaagatactcctgccagatgatgataatgacaagtgctaactaaactaggggcagagaatggggcagtgtgtatatgtgtgtaaaggggtcacaaaggcagttccaaaaatttagttaagaaaggtatctttgaggatatctgaggacagaaggcactccaagtagaaaggctctgaagcagagttggcctggcaagatgagtaacagcaagtaggagagtgtggctggagcacaaagaaagactgggagggagaccgggaggagataaggtcagagaggtgaagacagggctgggggagcaggatcattgcgggtgacagtggacatcaatgkcttaggcatgtccttaaagaaagggtgtggttgaggtggttgggtctctaaaggggcagaaggtagtcctggtgaagagaacagcctatctgaaggcactggactagaaaggacagagcatgtttgggaaaccgtgcctagacaagtttgatgggaacagatcatccattcatgaaggaagaagaggtacactgggatgagactatggcagagcagaaatgtgagatgtaagagttctgatgttatcttacttacagtagtgggttatggaaggttcgtgaccaggtaatggggaactgagagggaacttctggctttttcctcagaagcattagcaagcaatgttarcaggtagagataccaagaatgttgatactgaaaatgaaaaggtgggtgcagcttaccacagactgcttctgtggaaagtgactagaatggcgagtgcagggtgacttgaggaaagtcacacttggcacagctttaatgtgtcaagtagagttgaatgcaatgattgcttagaagcagtgaggatccgctgaaggtggaaagctgaattacagtgaattcagctctttcttagactttgattttatcactcaacttttataactttgttttttggaggagaaagacaattttagggctgccattgataaaatctgggttaaactgtatttgttggagtcaaaaatttagaacatcagagttgttgtttgagagatgctggcacaacctgctgcttttgactcagactcagagtcagatggccacttcccaagatgaaatcatgattctcctacttattaaccatgtgatggtggacatgttatcttttctgcctttgccgtgcatcctcatctgtaaaacagggttacatgtagtacctacctcttaggttgtggttataattaaataggttaatgcgtaaaacatattaagatacttcctggcccattaagcactaaataaatattaaatattctcactctaattataattgaccagatttaactaaatgtgtatcatgtgctttatgaagctgatttaactggatatcaaacatacttatttgtttgaacttactgaccaaaatgaacttgttatttaaatactaaatgtagagcttatcaatgcagtgatcatttgtttcaggatagttcagaatgtgccagtcactcatgactgaatatgtcaaatgtggtttggggttatagtggcccattttaaagtgggaaggtctagaatcttcagaatttagagtgttttgtgtaaggaaagtagcccgcttcaaaagaatcatggaaatgcctaggcttagaagcaacacagataagattatgcttctttatttctctggatgaaattagtttgttttggccaatactttgaggaaagttgtctctaagttgaccttgtgttttagtttgccatctgtatttagaagttggtgttaaaaatagccattcctcatggctcctgtggcatctatctgattttggctgattgctttctttgattgttgcttattcatgagtgcaacttgaaaatgaataagatagttccacagaagagatagtgataaagctgaaaaaaagaagggagtttttatggctgaattcagaatgttgttagtctcaggatgatgtcattggaaaatcacgtattgatgtttgaaaacaaagagggcaatttacgtaagttattgagacaaagtggagtttggagggaaaacaagagaacgatgtaattttgtgagaaatttgagagacctttcgctaagatgttaaaactgttagatattgttgcaggacagagttcaaatgtggctcaagtaattcctggctttaatagagaatgcatttttattttgggtcactaacaattgaaacaagtgagacttttatgacttttatgacaatttataacttttaaattttagggtgtttcagaatgctcttgcattcttgggattcctctgttggatggtaagttctatcatggagtagaacgtgactagcttatttaccattgtgtacccatcctggcacacattaggcacttggatcatttttggatgaatgaatatatgaatgcacttacaggaggtgctataaacctgggaagtgcttagacaggagtagtgaaagtaatgaagtttaaaagagaaaagttagacagtctgagaaaaaagargtaatagagtggtttggtagtaatgctttaggaactctggtttcattgtatgaaagctaatggttacccagatcttcagaatttccactgatgtccatgtaggaaaaaggaccttaaattaaggaacatgagattatcatcaaatgtaaggaggaaactatgagagtgtggaatgtggccacagggaagacaatggtctttaaaagtctttcaagtctgttaagaacaatttttttgtgtgtgtgggtttggggggtggacacaattatcctgaaatcttgggtaatggattagatgattcatggtaggaaaagctaatttgttttactaaaaatattatgtgtagctatatgttgcktaacaatggggatacatgctgagaaatgcatccttaggtgacttcattattgtgtgaacatcataaagtatgcttacacaaacctagatggtacagcctgctatacacctaggctatatggtgtagcctattgctcctaagctgcaagcctgtatagcacgttactgcactgaatacaataggcatttgcagcacaatggtaagtatttgcatatctaaacaaacatatctaaacgtacaaaagatacaataaaaatatagcattataatcttatggggaccactattgcaaatatgtttcatcattaaaacatcactatgcagtacatgactgtatattgaaaaatgactctcaattcatacaaaaccacatccaggccatcatcaatcattctatacgacaaatgctccttctaacaaccccacaatatcaccccttatcacaaaatctttcttcagtttaatctctcccactctagttccatgctgcccctagtccggctcgaagcagccctgagaaacatcgcccattatctctccataccaccccccaaaatttttgctgcctcaacacttcaccactattttgttttgtttttcttattaattgcacgtacacatccaggtagcctgaggcaactgaagaacgacaaaagaagtgaaaatggccagttcctgccttaactgatgaccttaccttgtgacattccttctcctggacaataagtctccggagctccccactgagcaccttgttacccccgcccctgcccacaagagaacaatcctctttaactgtaattttctactacctacccaaatcctataaaactgccccacccctatctcccctatctccccttgctgactcctttttcggactcagtccgcctacaccctagtgattaaaaagctttattgctcaaaaaaaaaaaaaagaaaaaagaaaagaaaaagaaaaatgattttaccagtgtcttattcaacttttaaacatgcagaatttattagatgtgagtttgcatgtattgatagggttgtaatttctgctttgcacttggattgcctccttgtcagatccacatcctgttccttccttacacgattgaggtacaatgtacggaaacatgattctaagtaaaattgaccctttaaaaatgactttatttattatcctgcacaggtcaagtaaatatggataaagcagaacatattatgtaattctcttgaaagatgtgaataatgattgaatcaatatgatgattaattgctgtttgtttctacctagaaaaaaaaaagagtaaattagggatcagaattcaaaataatgttttattgaaagtaaatgttgtaaatattggagtacrtaagggaagtcatagcatatttgaagaaccctttactaataggatagattctcaagtttgaaattattttgctatatgcatcttttttgtaataatcattttaaagcaggggtccccaacccctggttctggtctatggcaagttaggacctaggctccgcagcaggaggtgagagttggacgaaggagcaaagcttcatctgtatttacagtagctccccatcactcgcattgctgctccgcctcctgtargatcagcrgtggcattacattctcacaggagcatgaaccctattgtgaactacaagtgtgaaggatctaggttcatgctgcttatgagaatataatgcctgaggatctgtcactgtcccccttcacccccacatggaagkcttagttgcaggaaacaagctcagggctcccactgattctatgttatggtgagttgtataattatttcattatatattacaatgtaataataatataaataaagtgcacaataaatgtaatgcacttgaatcacaaaaycatccctgctcctaccccgccaccctggtccatgttaaaattgtcttccacaaaaccggtccctggtgccaaaaatgttggggactgctgttttaaagcacttccttattttcaggcactatgcttgttgctttaagcttcactatttcaaaatgactctggagagttttcaagataattagtgggttagatcctttaaaaattatttgaaaggctgaaatggcttttagtttttatagtttatctcctccagttctccacactctcctttaactgaaaatctccaattgtaaacatctaaaattgctttccgctggggaatttaaagatgacattgctgcttttcacaagaatacataatggacacaaccaacttcttcctaaaaaaggtggagttctaattagttctagctctaagctaagtattagggtgttgggggaagcctggaagaggtgatcattcttctttctaattgccctaataatacaagcagcatggaagcctgtaatgcagagatgctttatgccatgtgtgggaagaagtttacagtaattgtttaatgcctcacaggaagtacgtttttatctgaatgacatgttctaggtaaaaggtgcagagagattataaatatcaagcttatcatgcatagcatgtctgaacatagtgcaccaagcaagaggattttaaatttcctcctggttgtgggtgacccacttgkgcaatgaggaagtgaggatcctaatccgtgtgacaagaaccttggcagcacagcctgtaacattcaaaatggcagaaaaatcctgtgccttctcttccgttatcctgcctttgtttaaagagtcttgtcactccatccaggatcatgaatgtcttagccaagaaatgttggtagatacataaagtgtgtgctaatggagaagacaaatttgactataaatgcagcattgttgattttccttttattcaatggagctgtcagaacaaacaggcakggatatatatatatwtattttttttgagacagaattttcactcttgttgcctaggctggagtacagtggcgcgatctcagctcactgcaacctccgcctgctgggttcaagtgattctcctacctcagcctcccgagtagctgagattacaagcatgggccaccatgcctggataatttttgtatttttagtagagatgggatttcgccatgttagccaggctggtttcgaactcctgacatcaggtgatccacctgccttggtctcccaaagtgctgggattacaggtgtgagccaccacacccagccaaacattggatatgtaattaataaattrcttggagacctgccagctgggaaaccagcattttcttgagcactttctgtcatgagacggcacaatgaaagaggccttgaatctttccatttattagaaaactctacatagagttgtaattgttaatgttatttccatccactcacratggctttacactctggtgataaaaacattaaatctagtatcattttaagggcaatttttatgtatttcttgaaaaaaaaagaccatgctttacccatatcttgctttcttctaaattgcattgtctgtttggtagccaatcaccctttgacgttacattcatctgagcatgcattattccatgtgtcctgggattctcaattagtttattaactttaaaaatatgtatatgcttctttgatgaaagaatgctcatagaattctatatataggaactgttttctgggtcagaccatcccatgattttgtccccaatagtaatcagctatttcttgatgagaaaagattgcctgatgcactcctcctcctcacacacacacacacacacacacacaaacgaacagtaatttgacaaatatgtgttatctgttgtatgccaaatactatacaatggactagtaataggaacctatataagacagagcttacagtttagtgagagaggcaaatttttgtatagatgttttcaataccttttgcttactcatraaattcagcactgagaatcaatcatctatgaacttattttaacctttttggaaacctccttctagtctgtgtttttcccttccttgaaactcaagagggtaaatctaataatctatagcattttatgttgattctaaaaatttcctctgcacatttcaagaggtatatcctagttctgttctacttgaagttattgaacaagttagctctatctatgttcttatggtaacctgatacaataaaaataataacacatttacaactgtgtagcaactttcaaagcattttctcatttggttcttataacaatctacaattacatttttcatagctaacgccagggataatattgaaaaggcctttctgtacaacagatttacagtctctggaaagacaactcttaatatcttaagtggatattaatcattttctttcctttacacaaaaattktctctctggcaggatgtcctccttcaatatgtttgataggctcaaatagtgttgaaataaataaaaaccagaggctccagatctcattagtagatgtttcccgagtcaactacagttggctggatcctaggtcctactgcctgccatgaatgggtgttgtattttcagcttactacagcctgcacttgtctcaattatacatgtgtgaactttcacccaggttgattctaacctctgggccattacagcttctgattttgtggcctgaggcagctcctaaataatagacacaacatctcagtagtttttatatctcaggcactttttatattttgtaaatagtagttgtggtgagctactttattttactgagggaggaaaacaaccaggcagagataattcttgtgtttgctaaaatgacgtactaagtagacttacaaaaaaaataccaaaaagttggtttactgaaatacgcctgtagtttagggtcttcatggagctgtgttacttttatttttagggttttgtttttttgattaaaaataatctggcactcaaaatttattttgagtttgtttccatgatataaacacatatctactttatgacctaatctgattaacatgtctttttttaggtcactgaaatggttctagaaatgtctcttgaagtttggtaagtgcatttatttagttggatgagaaatattgtgagtgatccactaatttattttaattgttaaagaatttttttatatataattctgcagctgtgaacatatagaagtgcattatgtttactttgcttttctttagttgtctgttaatacctacaaaatctttacaaacatattcttatattcattattcttatattttaatatgctttgcttatttttccaatagtttcatggtcatataataatgtcagaataagtgctttatgaaagagtcctccctctagtcgtacatctattcccatagaaatgaatgcagttatttaagcgcctcttctattgttgattcaggtagatattcaaaaacatagaagtgaacttaaacagaaactatataataatttttaaaattgagactgattttattcatactgacccagctggactactgctaataatgttccatgaagcatactgctctttcaaaatggcctccaaaactgaacgttagggaatcatgtacttattttcaaacggcgaattttagggtaggcaagtctgccttgatctaactgttctctgatgtaataatgagttcccttaacctctctgcatctctttgaacttccctgttgaacttgatttgaccaaagttattagtacatattttacacaaatgccacgaaaacaaattgaacattttcacatctggtgatttggcaaatgcatgataataggtacattgggtttaggcatttgtttattgtattttgatccctggaacatgtggatttgacttagcaagtgattggcataaatgtccacaacctgttaatataagtcagcaaatatcaaaggatagtccaagttattgtgttgcattattttgtattaagttcattcttgcttaaaagtggtatattttggcatgagattagaaacacttgttatttgactgactatggaagtaatgcttttgtttagcggggaatagtcttcactgaggtaattaggacatatttttataatattaaaaatttctttttttgtatgttaatttatgtcagctctagaayagaaattgttttcaaagaaaaattcaatttattcaaagaaaaattttccatgtcatgccttctattaaaaataacataaaagcaagaaagaattaattagaaagttaaaaataatgcataaaagtaaattaaccataattctactactgaatttataaaattactcagaattttttgaattttcatccagattttgaaaactgatatccttaaaacatctaggtcattatactgttcaaaaattttttaaaaatcatgattcttttttaaaaattatatataacagaacagtatattacagagaacatgacttccagaataataagacctagatttaattctactactttctaattatgttagtgattgatagatttctaatcacttatttactcactggtaaaataagaaaagaatactttctaagcatatcactgtgattaaatgaggtgttctttctaaagagtacatatacaataggaaattttcatacacgtataccacatgttaataatggtgctgcttgtaatagtttacaaaacattggaaattatttcaatatttatggataaawagattatagtatactaatataatgaaatactacataatagtaaaagtgtttgaattacttttatttatataagcacagatgattctcaaaaaaaagtgttcactggaaaaaataatttgcactaattactaaaaacctgcaaaatgaaaaccttatttagggacataaatatatattgtaaaattataaacatatatagaatgatgaagattaaatttaagtagtgattacctttaaggaacagaaaaggaaataaagttgaggaggtgtcatagaggcaactgtacaggtaagattttaatttcttttcttttctttttttttttttttttttttttgagacggagtcttgccctgtcacccargctggagtgcagtggcgcgatctcggctcactgcaagctctgcctcccaggttcacgccattctcctgcctcagcctcccgagtagctgggactacaggcgccagccaccacgcccggctaatttttttctatttttagtagagacggggtttcaccgtgttagctaggatggtctcgatttcctgacctcgtgatccgcctgcctcggcctcccaaagtgctgggattacaggcatgagccaccgcgcccggcctttaatttcttatagtgtttagaagatacctaacctaatatgtcattataaagaatagtaatagaaaagagtgtagcccaagattagacttaaaagtgttcatttggctgggcgtggtggctcatgcctgtaatcccagcactttgggaggctgaagtgggttgattacccgaggtcaggagttccagaccaggttgaccaacatggagaaaccctgtctctactaaaaatacaaaattagccaggtgtattggtgcgtgcctgtaatcccagctacttgggaggccgaggcaggagaatcgctggaacccaggaggcggaggttgtggtgagctgagattgtgccattgcactccagcctgggcaacaggagcgaaactccgtctcaaaaaaaaaaaaaaaaaaaaagttaactcactgtcttactcttttcccccgttacatgatttccaaaatcatatttaataattgtataacccaatacttttatatacagttcaacaaccgtttctttaaatgatctttaaaaagtttttggttacttcccttaagataggtttccagaagtagaattattaggccaaaaggaatctatgttctaattatttttgaacattccatattgctaatatgccaartttgaatactgcttaattgctttttaamaaacttatattcccaaaatggatgcatgagaatattagtgttatttttcctttctaggactagaaaataagtatttaaaatattttaatatcaattattttaataacagtatcatttaaattcactagtgaaattaaacttttttgttattaattctgctttctcttttgtgaggtacctatatttgtcctttgggaagtagtaawtaaactattatttgtaatggtcaaatatagccataaagaacatagctcagaggcttggtctctttctgtattttacaaggaaaaaatatactgaactaacagaaatgagatttaaaattgatttacaattaaggtaaggatttttatgaatggtaaagagacaaatattttattggtgataattcttgacttctgctttttggatttattcacactccaacataggctgacagatttttaaaaagtatttttaaattcagtagttggtatttagacttcagtattaagatatgtcttatatgttgcatggtgaaagtacatcacatgtttactctgtgatcctaacctctcagggcattagttttctaatttataaagctgcaatatataataatatattgtataataatatgtagtgatactcccatcgttcttgcaatgattcatacgtaatacctaatgtgacttctggcatagtgtagagaaattgctactgccttcattagcaagataaagtatatataatttaagggttctaaagtcctctagtggtaaactcatttatggttatctcaagttctgtgattagaagttcctttctttgttagaggggggcatccattagacaaggcaattaattaagacaatatttctgcaagtatgttcctcagaatgctggctctttgggatgttagaaagtaattatgatggtggaatagtgaagggtggagagataagggaaggaattcttggtcaagtaagtttgggatatcctgtgccaaacaaatataaacagggttctttactgaagcccttccaagtctttgttataatattcaacttatcagaggctgtttgtttgctcgtttattttatctaaagcattggaaagtcctttttctctgaamacatgctgtggaaaatgctgctttaagatagccatcattttatcctcttattttaggtcccttcttaggaaatggcttgagggaagcagtcagcatatatcagtgtagctcctagggacctggaaaagctacctggatggaaaaccagaccactgggagcactggctcatgactttatctgtttggtattacagctcatgcccagacctacgatttagtatggctctgtgtgatcaggagaagactttcagacaacagagaaaagaacacataagggagagcatgaagaaactcttgggtccaaagaatagtgaaggattgcattctgcacgtgatgtgagttggaaatttttcaagtgttactatactttaataataatttagcttggacaatttccccaataattttacccaaatatggcaatattgagattgagcattattcctttagttttttaaggtaaggtaagtgatttgtaaatgaaaactctttgaggaaggtcatcacaaatggtgccctagctggtaatatttatcagctatagtttttagttttatttttactttatattttagagcagtgttaagttcacaataaaattgagccaaaagcacagagagttccaatatgcttcttctccctgcacaacctcccaagtttagtcaggttctccagagaaacagaaccaaaagatatacacagtagatatgaggagatttattatgaagtttggctcacatgattatggaggccaagcagtcccacgatatgctttctgcaagctgaagaaccaggaaagcccgtggtgcaatttagtccaagacaaaggtgcaccagtggagtaactcccagtcagaggctgggcagttggagggggaggtgggagtcttgaagtctgaaagtaggagaacccggagcaacaatgtctaaaggcaggagaaaagggatgtctcagttcaaggacagagagacaattgcccaccttccacctttctgttctcctcaggccctccaaggatggaatgatgtgcgcacccattggcaagggtgggtctttactcagtgtgctgattcacttgtttttctttggaaaacaccctcattagcacccccagaaagaatgtttttctagtgatctgagtatcctttagtctggtcaggctaataaagaaaattaaccattatactccctaactatcaacatcccacaccagagtggtacatttgttacaatcagtgaacccacattgacacatcattatcatccaagtccatagtttacgctaggctcactgttggtggtctacattttatggggtttggacaaatgtgtaatgacatgcatccaccattatagtatcatacacagtagttcactgtcctagaaatcctctgtgctccacctatcatctctcctccctacccctggaccactgatacttttactgtctccatagctttgccttttgttagtttgcctaatgtagtatagttggaatcatacagtatgtagcctttccagataggcttctttcacttagtaatacgaatataagtttcctccatgtcttttcatggtttggatagcacatttcattttagtactaaataatattccattgtctggatgtaccacattttatttacttattcatatatatgtatatttatatatacatatatatacatatatatgtatatatatacataagtatatatatatgtatacttatatatatgtatatatatatatacatatatatgtatctaatataagtgtatgtatgtatttgtatataatatatatataaggcatacttacgcataaaggagtgttgattttatcaataggaaaagtttagcctcaaatataaaaggattaaaattacttaatttaaatgtaggctaaaattaaactgtggaaatcatcattatcgaacaagaagaaaatgccataaatcttgttaatgataatggaattaataaatgcaggcaaatgtgatggggagaaaaaagaaaatattccaaatctttatattttgtagtagagttaaacaatatttaaaattgaccaaattgaaggatcgtactttcaatatttgtttataatatatttgtattctatatttctctataattaggattataaaaatcattaagttgaagaaatgatttataatcctaattatggagaaatactggaatataaatataaacaaatattgaaagtaaaatccttcaattatagtttttttctttccttaaattccagtaaaatgtaatatcctttattactcaatcatatatcttaaaatctactttttggctatctatccattcatttatttcatctatgtatccatcaatcacctatctaatctgcttatctatttctctctttatatatctgtccatctttctatctgaaatctacaaagattaattgccacaatgatgctcatcaaatgataatgaagtttcttgttagtgacgtatcaggtaattatttacttatttatttagttgagctttcttgttaattgaatatgtcaaatgaatataatttattttcataaaaataatattttaaatacataagtaaacatatatgtgcatagtcttgtacactcttgaattatttctcgtaggaattaatttcattaagtttttcataaaataatttcataaataaattaatttcttggaattcattcttgtaggaatttgagattattgcaaattaagggcaggatacagttggaaatgagacataaattctgagtaagggagccaaatgatcacccctgtcccacatgtggttgcagatttgcaaatatgttttaggtgggggtagggttcaaaagccaacctactgatgctatagtgacttgtgttgttatgggagcagactctaagatgagatgctgcttaaggggaatttttgcttaaaggaaactaaggaaaccttcattaaagtttattttaaaaagagaggcttctcttcaatcctgcatcttttgttttgttttgtttttttgtgtttttttttgagacagggttttgctttgttgcccaggcaggagtgcagtagcacaatcatagctcactgcatcatcaaactcctgggcttaagtgatcctcttgcctcagtctcctaagtagccaggactatgcgtgcatgccactacacccagaaaatttatatatatatgttttttttctttctagagatggggatcttgctatattgcccaggttggtctcaaactcctgagctcaagcaacacttccacctctgcctgccaaagtgctagtgtagcaggacaagccacagacaaaaacccctcagacaccgagttaaagaaggaaggggtttgtttggccgggagcatcggcaagactcctgtytcaagagccgagctccctgagtgagtaattcctatcccttttaagggctcacaactctaagggggtcagcttgagagggtcgtgatcatttgagcaagcagggggtacatgactgggggctgcatgcaccagtaattagaacagaacagaataggacagggattttcacagtgcttttctatgcaatatctgtaatctatagataacataactgattaggtcaggggttgatgtttaactaccaggcccagggtgtggtgctgggctgtctgcttgtggatttcatttctgccttttagtttttacttcttctttctttggaggtagaaattgggcataagacaatatgaggggtggtctcctcccttatatcctccccatttgagactctcactcartagtgggagttctcactttcatttttactacccatgtcttcttgcaagacggatcaatagtgattcatatagtacacttgtgctgaagcattttggtgaactaaagtagcgatgaagctttttatcatttgaagaagtacaggtagcaaacaagggagcagtaagcaggttcctattactattataactcttattataagagttttaaatcctcctagtgctgggaaccattttccaaacatggccccaggatcaaatccatgccacacttgcacgggcatgtgtgccagttttgtcatatctctaactatgtcttcaactacktgcccttgatcatctatgtgtagacagcaattagtaaggttaaatttcccacagacccctccttcagctgctagcaagtagtcaagggccaatctattttgacagatagcatttctcatctgagtttcttgccgggccagaatagtcaaggctctgccggttttattagtgattatttctaagacagcttgtaactgtatgattcggttgatcatgtaaatgggggtccagtatccccacgagccaacttgtgcccaagtagcaggcccataatattgtatgattctctcagggggccattcattatctttctaattttttatagctatgcttctcttttcacggaaagcatagacagggaagcccaggaatttgcctgtttttatgggcagtaggaagaaagatggtttaatagtttcaataacacaactacctgcccactggtagttgtattattggaagctgtatgcccacatatccagtataatgccgtgggggctgtccagtcccagtgggactccgggtgggtccacacgatttgcagctttggaaatttactaaatggattcctctctgtgtgatttgagctccaccaagtgactgtttttgtggtaccattatacagtttctgtcccagacaactaagtcatcctacggggtgagtgaatttttttccttctctagctatgcaatattgtccagtaattgagggttttaggacccagaaattatcagggtaattcttttgagccrggaattcatcaggaactgggtctacaggtactaattctcgkgctttccatggccattgatatcccgttacggttcctccacagacataacatgaagtgacattgagaggctgggctacacactyggctagttgcaaaaacaaatttcttgtttttcctggaatttctggtactggcacatttagttcatcatagaaagtttgaaacactggctcaggagagcgttcgtaaacttctcctcgaaccaagatatttactcgaggatccagtctggccctgtcgattcctaaggtcacacgctccccttttttccagtgaggattaaggggattggttatcactagctctaaggggttacattgtcccttagtacaggaagggtcattctttcctttctgaaggtggactggatccttttcatttttttatccaagtggcccaaatgacacaagaccagtatccacattcatttccacacagtcctaattcatgacaaatgtacttatttttggtcatatagcctttttcccaactaaaatggccacatccccttcctagcttattgctattaatgatagcacaggcatcaaatttcaagattatgcgtttgggcacccctttttcttctgttctggctaatactttacttgtatcatttatgagtccccaccagtcttcagtccttaatcttatttcaaaaacagtggacatgggaggctcagaggggtcataacacacatctggtctgtcgtttcctgggctacatacctgtactgagtgtcattatataaacatgttccttttaaagttcctaggcattcatagtaactatagaacagaataattgttttaacttgttgccctacctcggtaacctgatgtatacactgagagcagtcctccatgcagggaaaatcagtggaagtgtctactatacaagtccaaattataaggaaaatgaatcccatgataattttcctcatgcttcggctgtgcatagaccagtcagcttctgggtgtgactggagcagggcttgtcgtcctcctcagagtcacttygcaggggttgtccgggctcggttttgccttccaggtttcagcggctgcaggtttcacacggctgtggtggatccagggtgggattccttctacctttacagctgtgggggtgttcaggatgatggtctgaggtcctttccaccgtggccgcaaaggggctacattccagtccttgattcatacgcgatcacctggagagaamgggtgaactggggagaataagctgatgggacacctctcatttacccaagttgagattgtttgtgtaatttttcctaaagcctgtagctgtcgctgtaattcaattcacctaactcttgggaagtgcctggaagctctcctagtataggaggaggcctatgatacagtatttcttaaggggagtatcctgttttcttagaaggagtgcatctaattttaaacaataccataggaagggcctgtatccactttaatcctgtttcctgacatactttccctaaactatttttgatagtccgattcattcgctccacctttccggaactctgaggtcagtaggcggtatgtagcttccaagtgattcctaatgcctttgctgtcttccgtaccaagtgagccacaaatgccggcccgttatctgagctgattcataagggcagtccaaacctaggaataagatcttggagaagcacatgggttaccttgtagggcttttcagttcgtgttggataagcctccacccacccagagtaagtacacgtaagaaccagcaaatacttgttacctccacattttggcatttctgtgaaatccacctgaagatcctcaaaaggagctgctccataagcttgtatgtggggcgaaacagtggggctttgcctcgcattgtgctgtcggcatgtaatgcacagttgtgctactgctttggcaaaggctggcaagtgtgagacgtagaagtaccggcctaacaattcttcaagtgactcttgccctaggtgagtggtttcgtgcatggccaatacgactgtggctcccagcaactgcagcacagctaccctcccatctggcagtctgattcatcctccttttattacttgccccctgtctgggtggaagaagtctttttcttccttagaataggtatgtaccaggtcaggtgtttgagggagtaagggggctgctatcgatgcccagtaaggggtagatgctgctttttgagcttctgaatcaggtcgagagtttcttaaggccactgaggtggaggctcgctggtgtcccctgcagtgcatgactgccaccttctgaggtttccacactgcctctaataattgtagaatttactgttgatattttatgtcctttcccccagagtttaacaggcccttttccttatataatgctccatgcacttggagggttagagaggcatatccagagtcagtgtagatgtttacagtcttaccttcactgagttctacagcccgagttaaagcaatgagctcagccttctgggctgaagtgccctgtagccacagtttggctttaatgacagcatccaaagttaccaccgcatatcctgcacatctttctccttgtgagttgatgaagctgctcccgtccatgtataactcccagtctactgatgatgcccatggctggtcccgaaggtcaggtctgctagaatagactgagtccaacacctctacacagttatgctcgcccgggctctctgatactgggagcagggtggtgggatttagggtgttacagacttcaatagttatgtggggattttcacatggcaagctttggtacttggttaatctagcatttgttagccaatgatgtccttcggtagtcatcaaagttaccacagcatggggggcctttatattcaggttttgcccaagggttagtttatctgcttcttgtgctaacagggctgttgctgccagggtccttagacatagtggccagcctttggaaacccatctagttgttttgagagataggccactggccttggccagggccccacagtctgggttaaaactccaactgccattttttctctttctgacacatagagtgtaaagggctttgtcaaatctggtagtcctagggctggggccracataagtttttcctttaacttacaaaaggcttgctgttgtagaggcccccattcaaaaggctcccaatcgcccctctttgtaaccccgtacaaaggtttggctaaaactgcaaagtttggaatccataatctgcaaaaccccacagctcctaggaattcccctacttgccttctggttccaggttccggtaggctacagatgacctgctttctttctgaccccaggctgcgctcccctttccgaatagtgaatcccaggtagcgtacctgctgtctgcagatatgagctttcttcttggacatcttatacctacagtcctccaggtgctgaagcaggacatccatcccttttgcacactcgactgccgtggagtgtcccagcagaaggtcgtccacgtacaggagcaagatgcagcctaggtctttggcaggaaatttttgtaggtctcaagccacggcctccctgaacatagtaggggagttcttgaacccttggggaagccgggtccaagtgtactgagtagtgacacctgactgcggatcttcccactgaaaggcaaacagcttctggctctcaggagctagtctgatgctaaagaaggcatcttttaagtccagacaggtaaaccagctgtcctcagccagcagcagccctaacaatgtgtaagggttaggaactgttgggtgcaaagtcactgtagcttggttgaccaagcgcaagtcctgtactggccggtagtccttggtccctggcttagggacaggcaggagggggggtgttccatggagactggcaaggaactataattccataggctttcaagcacctgcgatgaacctggattcctttgagagcttctctgggaaccggatactgcttttgtctaattggttgggccccaggcttaacgtctatgagcacgggggcttggttgaccgccagtcccggaggattatcatttgcccatacttgggccattgcttagctagagctggttttatctcttggcctggctcggttagaaaaagtcccctttcttcttcccaggggactgaccataagagccatgataattcctgttcctggtaactttagctgtaaagagccctgttttgtaagggagatggtggctctcagcttgctaagcaagtctcttcccagcaagggcaagggacagtcagaaatacacaagaactggtgaactatctcatgtccccccaccgagcaggtccgtggtaggcagaaagcctgcttagtggaaactcctgttgctctgattatatcaaagggggcgactggggtggtcactactgaatgttcagcaccaatatcgaccaaaaacttaatgtccttgcccccagttgtaatcctgaccgtgggctccttgggggcgcttgagcccggtccccttcagtccagtagcccttcagccagattaaacaaagctccctcatctttatctgaggtcttttgttccgaatcaccttgcttttccttcagttggggacacttatctttccaatgtcctatttccttacagtaggcgcattggttaggttgcaagcgtgggtgattagactgggtattcttcccagaaccccccttttcctctcctttcaggggaattcccctaawggccgtggccagtaagtcggcgtttcgcctagcctggcattcaccttctttatggctttctctgcggcttgttgcatctctattcacaaatacttgattggctatttccagtaactgtgaggtattcataygcgcaaacccagcctgtttctgcaattttctcctgatatcttccgcgctttgactaactaaggccatgttaatcatgtgctgattttcagggctatttggatcaaaaggagtgtacatagggtaagcctcacacagtctttcatagaattgtgstggactctcctcttttccttgggtgacctcagagaccttatttacatttgtagtcttttgagcccctttctttagaccttctattaatgcctcacggtaccgtcttagcctttccatgtctggtctcttgttcaggtcccattgggggtctgttcctggcagctgaattcttacatattcttgggggttttggtaatcagctaggacgtgctcctgtagccacttagttgccacctggagcaccctttgcctttcatctgtgtttaaaagttacatgagcagctagtggcaatcagcacaagtaggattatgagtctgtataatagtttggagcaagtcaattaaagcttgaggcttttcagtgtaagatggagtattatttttccaattgaggaggtcagcagaggtgaaaggttgatacacaaaggcacgcctttccaccatgtgtctgtcctcatctaccccagtatattgcttctctctcaggggcatttggattccagtcttgggccataagcaagctgtcaacggagragtttctcctgtggcttcacttcctcttctgtctactctgtgtgatctaggggtgtggttatctggtggaggtgtaggtgctgtggcctcaggagtggggagcccttccttttgataaggagggggtactgctgataccarttcctgccatgattcttctggagttgggtcggacaggacttttggtsccgacttccctcggtgggtggagggagaaccttccttaactaactgtccctttgctactagtactgctgctgcctgtcctcttgaccactgtggggggtccaaaactagctgtagccaataatttacatatggraactcatctgggtgccctgacttacaggttaccctgtgccatacctttgacacagggacctgtccaggcttccttctgatggccaacccacctctaatgctggccagtctatctcacagaaagttttaagttttcctgttgttatagtgactccatagtctcctttaaatccctttttgaaatttttccacatagttcctagtggggtgggcttactttgtgcctgacctgtgtttcctcgagacaaaagaccatgctcacaccacacacacatcacaaaacaaagaacgggtaaaaagggcacacacacacttttacagtttacaccaaaccagaatcaaaaccaaaatcagagtatcaagaaatccaagtcaggtcaaaaccagacccaaagtatcaagcaatccaagtcaagttgaaaacaaaaaccaaagtgccggtacaggcatgccgtgggtgatcaggccatgcttccactcaaatggagtgggcaagttccaaagactagtcttaccaagtttcagttgtccagactccaagtgccagttccttcctggtgttcagccactgtgttgatccttcacgggggcctgccacgcgctgctctggtgaggcattccactggggcagttgcctacctaggagtgctctcaggatctgctttgctcaagctggccagagtcccctgcagggatgcrccacagggcaggcctaagccacctaaggagctgcctcgaccgtctgttaatcaccttgcttcccagtcagggaaccaagaaatgtagcaggacaagcctcagacaaaacccctcagacaccaagttaaagaaggaaggggtttattcagcctggagcatcggcaagactcctgtctcaagagctgagctccctgagtgagcaattcctgtcccttttaagggctcacaactctaagggggtccacttgagtgggttgtgatcgattgagcaagcaggggttacgtgactgggggctgcatgcactggtaattagaacagaacagaataggacagggattttcacagtgcttttctatacaatgtctgtaatctatagataacataaccaattatgtcagtcgtcaatgtttaactaccaggtccagggtgtagtgccaggctgtctgcttgtggatttcatttctgccttttagtttttacttctttctttggaggcagaaattgggcataagacaatatgaggagtggtctcctcccttactgggattacaagcacaagccaccatgcctggccaaatcctgtatcttgcttgtcaatataatagactcttgttagaacttgtggttgtttatcatgtcaggctaattagttcttgaaaaaactgtcttcttcatatattattcagaaatttatagcttctctgaagtttttagtgtgtgtatgtgtgtttcttttaatatagaaaacttttcggtagcaattctacaacatttttctttttgtcaccatccttgtattggtataccctcaaaacagaaaaatgatattacaaattcttttcatttctaacatttgtaatttattgagatactgtgctaggcactagagaagaataaagctgagatggctagccctgaggagttaccttccttagtgattttaaagccttgtttggaagaatgatatttaagcaaacaaaaccaatgatgtgttaagttcttaataaagaggtgtgaactgagggatgcaagtgattgcaagaggatgactcaccctctgcagtagagatgatagaaatttcttttagagttgaagactgttggccatgccttgaggtatgagcttgctagaagaaaaaggaggaaattcatatttcttgtaagtcatgactgtcaactttatttgggagaacgtgccttgcaatctcagagtttccctgcctaattgctttctagttatttgcaacaattattttctttactgctaacggctgactacttcctgttcccctcatgacagatagacttgtctcctaatgatagagaaataaaaagttaggagatgacaaatccttcatttcttgctataaaattgacatactccataactgatgcctgtcttttgcaacctccctcgtagttcaatagagaatatactccctttgctttcaaatgcagatacccatcagatatggatcctaagctcctcttgaataccccaatatatctattattcagattttcccagatcactctcaacctgtattgtcaacgtctacctccgtgtggatatttgctataaaaatataaacatgttctaaactcagttataaaaagaaaataaagaacaaaaaacattttctggattctgtattctctcctcccttctgctctatttctctccttaccttcacaaacgtctccaacattttctatacaagctcattctacctcctttagacaccagtgctaataaatgcacaggatcttgttcttgccctatcttacctaaccttgcagatgcaaatgacagatgtctccttacattttgaaacattgtctactcttcacttactcccttttcacggtctttatcatgcctctttggtgttctttaccagctcttcttcatctgagcgttccttacatatagtaattcctcaagtcatagtcctaggtcctctttctcctcattctatttctttctttctttttttgagacagggtttcactttgtcatccaggctgcagtgcaatggcaccatcttggctcatggcagccttgacttcctgggttcaaatgatcctcctgcctcgacctcccaaagtgctgggattatggggtgcatgccaccatgccccatgagaaatacgtttttctaggcaattgggatttaaatccaggattctcagtcagggtgtggttgctctcacctgtaatcccagcattttgggaggccaaggtgggaggatcaagactggcccagccaacatggtgaaaacccatgtctgcaaaaaatacaaaaaaattaggtatggtagtgcgcacctgtagtcctagctacttgggaggctgaggcaggaggatcacttgaacccaggaagtagaggctgcggtgagccaagatggtgccactgcactccagcctgggtgacaaagtgagatcttgtctcaaacaacaacaacaaaaagaaatttctctctagcctatgatgtcacccaacaactgtgtgctaaggactttcacatgtgtatcaacaacttagaacctctcttctgagcttcagacctaaatatctacaaacttacttgatttctttacgtgtattcctgccagcatctcaaacttagcctatctaaatctgaacacaaagttttgtctctttctgtgccttktatagagaggacttacatatgtttgtgtattgagaggacttgtacttgtcttccctcttcccactttctttttacaatgaattcagagtgaatgtttcaaaacagaaacctatttctatccatcccaagtttaaaatccttccactgctcttagactcttctccacagcttctttctagcttcatttttgccagtttatcccaaatttctttactccctcccagtaagcacctcttagttctgtgtctctacagaatctttccccggttggaggtctcctgtacagcgctccctcttgctgcaataggcttcccctatacaatccctgtctccacttcaccccctttttaactaacactctcccatcctttaatgagcacacaggtaatttcttctgagactctcccaagtcatctcctccctctttacccctaagtctaagctagttctctcagttatgctctcttatggcatatatgaacattctcttctcagcatttcccatggttgtacttaaaaaaattcttgtaaaaatatttatttggtgactgtgactgttttctccattagaatttaagttttatgagggccaggacaacatctgtgttattcatctctatatttcaaccacctagcatagttcctagtatggtagatccttggtgaatattttgttgcatgcatgagggcacagatttaggcattgcatgcatggagtaaatttgctagagagagaggtcatggttttgaaacaggaacacgagtatcaggttgctagggaaacaccggttaaggagaaggttttgatgatatcttggcttagactcttgagttagaaatttatgtaggacacattggttggcattttttcttaggttcttcttttcaaaaagtaagtttctgctgccacctctagtcactcctccttttgtggaaaggattagtaagtcttcctgggaaaatataactttgcttcatgttcatacgaatgacagtaaaataacttttctgcaacagatggggaatgaggtaatcatggtttttctctgggctatccttcaaaaaaatattaaattcatgtgtttggaagtcatttattgaattaaaacttttgttgttgctttttttggtttcagcccacactgttttctcttggcagaaataatcagcttagaagttatcagtaccacccattcccataacaaaagtaacatttttctatttttatgttacttcttggatctcttaactttccacatcctttgtcccctatcaaagtcttcactttctgttcagtgctggccagttggcctccttaatgtatggaagagtgggctgttgtggcagtttgtacaatgaacaagaacagtcctattcatctcaatacagacagtatccagtttagacctcaacgttgaattaaatgttgaatgaatttgggtagtatatatttgggaacattgttttacctttgtgcgtcacttgtaaaatgatgataatgtctcctgttgtggcaaggggataagtacaaatgctcataaagcgtccagcaaaatgtataggggcacttaatgttactcagtagaacagtaatattatacatattcttgggtgctgccattctgtggcataacactcgtggtcaataattgttaaatttaccatggcctaatttttaaattagttttcctggctgtataatgaactagtcaaatagttaaggttttttaaagcctaagcgtttattctcttaagtactaagatttttgaaaaaaattattgattttgattatgtagatagaaatctttctgaaatgtgtaatttcttgctcagactgaaccaatttgggcattctcaggcctgcttcctttgcattcagctgcgattgttctgtgccctgtgttggctgcttgaagtgatttcttcacactgcccttttctctttcaactttgttgctctggaattcaaatctgataagcaaacttgctgttagaacagtgtctctaattaatataatttctttatgagaagagggctgagatcttttctttgagcaagatatatgactttgtgtatggggatttttggtgtgttttgatagttcagaagccactttttaaacttttcttgttctaaaatagtttctggtcagataaaattttcagattacagttgtgtctgtgaaatgaaatgttactrtccagtctctatgtcccctaaaaactagccataccataacgcggttggttgggggagtaaaatctggaattagagtagtaaagaaatgagagaagaaaagattcttcttgtcatcagagtgtaaaagagataatgctttttcttaaggaagacaataaggaccatatttcagtttaaacaaatagacagctttggatgaaaatagaagtaaaatatggaccttaagtaattaattctccgagtgccacttggtacttgtcatataagttaagtgaaagtctagagaaagacagatcatctagtcatggagggagaggcagagcaagacagtttcttctgaaggagataagagaaatcaaccttgagttgtcaataagcatttccattcctatgtttctgttgtttccttcatcgagaatatttcctcgcctctttccaccttcattctgacaatggcactttgtgctatcaatctttattcttctttcagttggtaaargtcgaaaggcaggcagtggagggctccctttagtggagtataggaacatgaactgagcaggcctgggcttgcaaaggtcaggtttcaggaatcaagaggtggagctgaatttttcttatctgaggaagtggtgggatataaacagccaaggaataaaacagagctggaaactggcctaactggtctagagagcaggttagatatccaagggayccagactgcactcagcaaggtggtgcactctgaggggcccaaagctcttgaccgctgagaaatrtaagctgtgagggaaacagggtcagggagaggcaagcaaatgtcccatatcagaagcaatggagaagcatataagaccaagtgctatattggctgccggtgttcttgcttactttgaataagcagattatccttactattataatgtgggtgggcctcatccaatctgttcaaggcctgaatatgacaaaaagacttgcctcactgagcaggagggaattctccagcagacttcccttgggcttcatctgcaccataggctctcctgggtatgaagctcgccagcccattttgcagatttggacttggctggtctccacaatggtgtaagacaattcattataataaatctctttctgtatatctactcatcctgttggttctgtttctttgaaaaaccctgactaatatggggggccaaggagagaaatgtttttatgtaattgtctatgaaaaacaaaaatattcttgaatacttcagaattttcttttgaaagggaggcaattaataatgttagtaagcttgcgtaccaggataattaaatcaaaacgcaaggtttttggtaaatgaaaactcatttcctgtaatcatatgaagtatgagaaatatttattgacatcatttatatctaaatactggtgatattaggtccaaatataaccccagaccttctcagcagcacttayttgattctcttagaattagagccatgactaacagctgaaccttataactttcgtgttatttctttgaacattatttcagaatgagcaagactattaaaactccaaacttagtctttgtttattacataaaattgtcctgacattatttgaagtgatacataatttgaaatatagtttgaccaaacatcaatggtttctctccgtaaaggttacccctttctttctgagcaatgataaaggaaagagcaaggaattttgatgccagacatacctcagttcaaatcttgattgtattacttattagctatctatctatggacaaggtattatctgcactcctcacttgaaaaatgaaacaaacaatgacttccttttgagagttgggaagattaaatgaaataaattgtgtgaaagtgtccatgagagagtgcaaggcacatacaatatgttcttgacacatctaatttcccattcttttttatagttcatagttacaattttatagttttataattcatgtttctgtaggtgttacagaatctagaatgttactagttgctaaaagcttcaggatcaatatttttatatatcaatatatcaagatcaatattcttatatataagtaaactgagcccacagagtrttttcttggccttaggacacagcattagttggggaaaagcaggggctatttgtttggagagacaaagtagagcatagtgaaataatagctttgttatgtggcagacccaactttgactccaaataccactttctagctttgwgacattggaaaaaaaatcttctttatgtttaaattgctttatttttaaaaatggggttataggcccagtgtggtagcccatgcttataatcccagcaagttgggagggcaaggtgggcagatcccttgagcccaggaatttgagacaagcctgggcaacatggtgaaaccttgtctttacaaaaaatacaaaaattagccaggtgtggtgcacctttagttccagctacttgggaggccaaggtgggtggatcccttgagcccaggagtttaagaccatcctgggcaacatggcaaaaccccgtctctatgccagtacactccaacctgrgtgacagagactccagcttgggtgagagagagagagaccctatctcaaaaacaaaacaaacaaacaaacaaacggagtaatagtatgtactgacaggttatgaaaattaaatgtataatgtaaatgcatgcttaacaaatgaaggtaattataatctgcacagccaattatttgattattcaactttacgtacaaatatctgaayattttccttcccctgatgacaacagaagtatctgaattaaaaccctgacctgaaaacctccttcagaattccttcaaagcaataatgagaacagcaggttacctaacatatgaattcyagtttaataggaggctgtttccagaaaattccaagcaacataccataagcatcttcagtatgtgtcgggctgttggcatttggagaaggacatctgggaagttgttttttcaggattagagaagctcttatgttcatttttccagtttctcttattaaatctcttgctgaataacagtgcaggctgtttgctgtgtgttgaaatgaattgtataatctgttactaagaactttttttctctattctaaactacgtgatttgtattgggttggttatttttaataatacaatgctacaattaaccatacctatagactcaaatgcccccatataatttttgaataagaacaacctatcttttacagtattaatcttgaaattgtttttcctcaatgcccttcgtaatcctattttcccaactccctaatatacacctgctacaatactaagaccccaagtattttggtacccaaattgcataccctttcctgcttatgcctatcttggcctgaaccttaggcccagaactgagcacatagcaatgttaaatgtttgcttttattgttatcattattgttattatactgcctgtaaactcaaccccctttcaagactgaatycaaatccctcctcttcattctaactttatatctagcttccttacaactactgctgcacctaatactttattgtaytctactcatcctctgtataacctactttagtttcctaccttaactttatttccccctccagacaagcttttaaggacttacatattttactttatttacaattttaaaatctttgtttgagagcttggtatttatacaaacccatatacatctatataaagatacataaagatacacacacatacacacacatgtacacatatatacacatacagattcaaagccatttagatccttccattgcactgcacttgtagagtgtgctttcrttatgaggtttcaagtttgcatgtagtttgatgcctagtgttttttgatttaagaccacttgttagagtacagctctgggttaggaatttagtcctaggtgttctactgttcacttctctaactctaataagatctggcctctgcagatttatctttcccaatttaaagcaaaaatgtttgctattattattattattattattattattattattattattacactgcctatatactcaaccccctttcaaggcttaattcaaatccttcctctttgttctaagttcttatctggcttccttacaactactatatcttatgactatacaatctttttggtccttctggttgtaaaataatcattccatgaatatatgtatacatcatattggtaagtggccactcagggatcaggtgccaatactggaaacacaatgcattcatgttgtatattcagcatttgtaagactgagtgcactgtttcttccttcacctaaattcatgccttgggatccttgttctgggtaatgatagcatcatctgcttaagagcaaagctagaaaccctaagtctgaccacccaccttcctctcttttactgctaacatcagatcggtcaccagatgttaaagatgctctctgtaaatgtaacctgaagkcaaggtgcttactcaactatgaattaccagctggtagatcttacacaagaaacatcatcattatataactttcatttgcaaaaccagcaaatactttccttctgctcaccttacatgatttctgagagagttaaataagacaatgtccctgaaagcaagccaaaaatttgcaaaatgttgaacaaatatagagtattattgttattattaaatagagtaagttggtcattttaatgatatcttttttctaatagacattgctttttttattttcttatatgaaacattcttttctttttctttttttttttttctttttgagatggagtcttgctctgttgcccaggctggagagcaatggcacgatcttggctcactgcaacctctgcttcctgggttcaagcaattctcctgcttcagcctccaaagtagctcggattacaggcacccgccagcacacccagctactttttattttgtgttttttgtagagatggggtttcaccatgttggtcaggctggtctcgaactcctgacytcaggtgatgcacccgcctcggcctcccaaagtgctggaattacagatgtgagccactgcacccggccttattttcttcttttaaaaaattaggcattactaaagtatgaagttaacttacacttctttgtgacaaaatatgggatgtataacataaagattgagactaaagggaactgtattttatgatttttactttgtgtacaaatctctctgttgcatcgtttcaggtgcctgtggtagccatattgggttcaggtgggggtttccgagccatggtgggattctctggtgtgatgaaggcattatacgaatcaggaattctggattgtgctacctacgttgctggtctttctggctccacctggttagtatacatttttaattttagttttataactttaaatatttaggatttatctaactcaagcactagaagagaaaaggggatttagaaaattgatcattaatttaaattactgaaactttccagtttgatgccacaatctgctttaaaagattttttaaagacaaatccatacttaataataactttttgttgcaaatttacttcttttaagccactttgtaacttaaaatgtagttaaaacatgaaataaaaaagactaattgaaaatagttctagatraaaatagaagtggaacaacatactccacccataattaatttaatcttcttataatttgctgatttgtagtccttcagtgaacatgtctaagtctacatgattcactacatattcattttcttctttagggcaaatagaataagatgcaagataccatagtatacagaacaaagaaaacaatttttttgaatatagaaatataatatatttcattgattttcatctaactaaatatgaaatttgtcttttaaatttaggtggagacttaaagcatccatatgtataatacttgtaccctgtaggttttcacaaatatatttataaaacattttccaagaagatattacatactttttggtttgcttacctcacataagcacattgaaaatcaaatgaaaagtccttgctcacatgtctcaaataagagtatcatcttattactaaagatctgccttggacttacaaggcctttttagtcattcagccatggcaaactcatctatcagaatatcgtattatatatgtctagcattttaaagtttctgtgtcattttatcttgtgagatgggtatgaatttattcatttttatgctgaagaaaatttgacttagaagccaaatgatttgtccaacatcactagtagagctagcatataaactcaggcttttgatctgtcattctgagttctttctactaaaccacactcttttctgggacatctatatattttacagggaatttcacatttaaatcatccacagtttcttaaatgttttgaatcagatttagtcatgaaacaaaaacttagagccatcattgccatcttctctatatgtaccctcaaaatgatttatttcttctgaaggaagggtgtagcccatcattattctttcccttgaaggaaagagcaggcatctgcctgtttaatgagtaatgtgttagaaaatcttggacccttacattagttcacctactcaatcattttgttattattctttgagtggtgttctttctttgtactcactgtttattacatcctgttgtccatcactgacaactggaagaagcttactttcttaaactcatctaataaagcaagactagacttcgagtgctgatttggggatataattgtgtatgtgtgtgcttgattagagatatagtcattgctttggttatagatttggtgcaatatcttctcacattcccctgtcagtaaacaagtcctgtaaaatgtaattaaaaggattttaaatgtgcacatatatatatatatatatatatatatatatatacatacacagagagagtaattaaaaggattttaaatgtgcacatatatatatatacagagagattaattaaaaggattttaaatgtgcacacacacacatatatgtatacttctactctatctttcacagtcttatttccataaagatcagcttttacctttttatttcatttccttaaaaggctgctcactccttgtaataaattttcactcacagaccacttaatttgcaaagttcttattttccttgacttctcagtgtatgtggtgtaggggagggagggattggagattgagacatttcacacattgatttgtgcttctttctaattgttcctatcatgccttttcagttttatttcatcctctctgattggcctctcctccatatattgtccctaccacttccacaatttctctccttaatgtgggctttccctcatggcttctcttttggtccattatatccatatgtcctccgtaggtaattccaccaacttctgccattttagctattaccaccaagaatttaattcatggaaccctgtaacactccaaaacttcatagataaaaagaaaataaaaccctaatggagactgcaaataagctgtcatagaggagaatcaagtaaaagatggtatctagagggaaggatgcttcaagaaggagtgggtgttttaataatgttgaaaatctgtgaaaagcttagcaaaggactgggtttggttagtggttttagcaggaaccactagtaaaagtaattaaaagatacttttaaacatgagattgtaaaaaataagaagtgaataaaacatgagagtacaaaaaataggcatatgaacctcataaaagccatctattatttcaagtactttgtttggaaagggaaggaaggagctcggtcattgtttgaagggaacatagggcccagggaagggtttttattttttttttttcagaatttaagagagttgagmattttctagatgtctgagatgtaggaaataatgtagaggcatagatggaagataaagaaatagaagatagtagaagataaaaagaagatagaaggtaaagaaaatagatagaaaaagactcctgcagagacaggacacaagattgaaagcacaggtgaaggtgttaaccagggaaagaagagatgctcccttaccagaagaaaaggtggccaggatgattcatgttcacagttctctcttaaaaagtacaggtgagaaggtaaaaagttcaaaggaaggaattcggaaagtcttggaaaaacacattacgcttctatgttgtgtaaccttttatattctgctgatacacggccattatttggtataagtgaggtaatacggaaatatgtggagaagccctggacctcccagaaagttttctgtgatcacaaaagagaattttaggtaggacaaagcttcccttatacctgctactacctttatggtaattacttctgaaattaattttggatgatagttgtgattcattaaatataagtattagccaacctggagacccgaaatgagtgaactaaaaaaacaggacagtaatcctgtgttcttttactcaggattagtacagctttcttcctcagctgttcttttatagcattgtaaggggctattggatgttgactgccaagtttgtacagtattaccatctaaaaagaaatcagaacagctctgcatctataaacagtrtggtccaatttattgaactaactaaaatagaatttgagagygagaattttcagtttaacagtacaaaaaattcttagaacaatgaaaaaagaaacaatattarcagaaattgtcacataaggtgtgacaggatcaaaggtcaagatatgtgttagagaaaatttgttgtttaacagctaagtttgtcttcttccctaatgaatctctcttacctagcacagtgcctgactttccttaggtcatagttgcttaatcactgaatgaagagatgtgttaagtgactgcgttttatgggaaaattaatttaggggtttttaaagggtttcaagatatttccttaacagatgttgagggtcttctcaagtcattccaaatcttagttgcagatgagaatcacttctgctcttttttaagcacaaaaattctaaatgtttaaccctaaatgtttaccccgaaggtttggattcagcaagtcctggtagttagctactgatattttaaaacaytgaccatttgatttggagacaagcattgaactgaacatcacttcctctctggcatgwtttagatttaaaatgtcacaaaatctaaaatgcatatagataaaaagaatgaggtgtcttatcatataaatatgttgaaaaattcgaggcaaatatttccagatttttatataaataaacctaagtccctttcactcattaattaactaatttatagaggccctgctatgtctaagctactctctttttgaaacttgatggtataattgggaaacattattggtaaagagatgaaaattaaggcttaactatagagttaaaaactgggggtgatatgtttttttttttattttttgagataatctcactcagttagatgtaactgcagggacaccatgaaaagattatccaactctccttgtgaattctaaggaatatgtgtcataaatgctgaacaagcagagaccattaatccaatgccaayggttgaagtattctaggtttttctgtttctcgccagggtttgtatttccaagccaactgcttcatgagacgggraaagagagagasagagagagagagagaacaccagattacttcaatcttcagagagtacattgtgcatttattaaaagtatgagaaggtccagaatatcatatcttttttgatttggatgaatcacatggtagactttggaataactataggaataaatgaaytgtgtatctttcaagtattcaaagctgcatttttayvgatatttcgtgattatactaagttgagttgagcaagtctatttgatttatcattatcacatgttgagggaactgtttcaaattcaatttgttgtacaaaaatcrtttaaagttttttttttctgcacatgtgatccattgtgggtctgttaccctccatttattaactgattattattctcagcttgtctccaaggaactcaaacccaataaggaattataatttattgtgaaataggaatagtttggtctctaacaactgaagtcttgtataatagactaaaaaaaaaaagcctactggggagaggataaattttgaattccagttctgctgttataaactggggaatatgagcatgttatttaaatttcccaatgctctttttcttgataattaaaatagaatatttgaaagccaccgtgagtcttcaagacaacagcttatgaacaattaaccaacacagtgcccagaatatagtaggggcctaagaagaattagttttctcccctcgaagggacgataaccattatagtagacattttgatttgaatcccaaggaaataagagattaaaacatgtgctattttctccttggttggatgaagtgatggaatgtttacatattctatttttattttgttctgtgagtttcctaagctgtgcttgtcatatgccagacattagctagtcactgaggctaaaaaagatgaataaacaaagtttatttcctgaaggaggaggacacaatttcttgagggaaacagataagtaaacgagtaattaatagtcagcatgagatctaccatactagaggtattggttcacaggtaggagcaccataactaaatatttattatctagatatcaaatatcaaggctcatggtgatttccagttttaccagaagtggccaaatggctggcagacaagaggcttcrtaagaaagcatttactttaaagactttatttctctttaggattttgccttcagattcatatgttcagaaatttagagacctacagttgacaagatttgagatttttgtctagttggccaatggataattaaggagaaaaaaggatttttcaagggaattaggaatttacaatagttgggacaacatattttctacctgtagataatcatcctggaaatttagatgatcagattgcttgactagtcttggagccagacaagtcaattcatttacatgactcagatgtgctctgtcatcaatctctaatactctgatagagatactccattcctggcacaccagacaatggacactagtcctagtagggcaccttctctcttggactgtggatgaamgttcagtgtttcctctgacacctctttttttctttaccttcatggtagamtagctcctgtctsattgacacattcttttcttaaatgttttaatatctgcaatcagataatgaagttaaccaaatatgtccaccatgctttatttacagagtgtgccttctttctttggagactgttgtgtaatgctctttatctttactgattgtgttttgttttctgtataggtatatgtcaaccttgtattctcaccctgattttccagagaaagggccagaggagattaatgaagaactaatgaaaaatgttagccacaatccccttttacttctcacaccacagaaagttaaaagatatgttgagtctttatggaagaagaaaagctctggacaacctgtcacctttactgatatctttgggatgttaataggagaaacactaattcataatgtaagttacagttcaatctacaytgcttttataacaagtagacaraacatattataatattatattttaaataaaagaaaatgtaatacattttataaaagtcagtggactctacttatttgtccaactatgygtactgagcccattctccccaccagagattataattcttctacctttcaaactagtgcttactaattcatttcaatgatgtaaagattttgaatgtgtgaggaagtgcttttgtattccttttctctggaaaaaaaaaaaaaaaaaattcacattttaacccttaactgcccattccctccaagaatggtaacatttttagatgaggaagaatgaagtttgcctgaatagagtcaagaaaggaargggatcgcatagaacagactcgcttgatgcatgattgcattgatgtttcgttgaagataaagcagaggagygcctgtgacagggagtccaggggctaagtttcttccrggctccacagttgctaattcattctccagttcagatgtagacatataatctagagttatgattattttttaaatgaagatagttacttccatagagcttattttttgttgttcattcaggacctagtaatttctagaagtaataagacttayttttattataaagttataagattttgattggaagtactattttgaatagcattctttctgtgtctgtttayaaatttaaagtcatcyttttctttcttctgtggacagagaatgaatactactctgagcagtttgaaggaaaaagttaatactgcacaatgccctttacctcttttcacctgtcttcatgtcaaacctgacgtttcagagctgatgtttgcaggtatgctgtttcctttctcagaacacttcctggaacctctgaattgcagtttcccatggttttccttagaggaaggtcataagcaatttcagttgtttattttaatgtattttctgtaacataagactttgaagatataagaaaatattaagtgagatgatttcctggttgtagagaatattccatgaaactagtaactaatgtattttcatttactatagtaaaataaaaatcatggatacaatcaatcaatacagtcaattaattatccactcctcagtaacttttgacaaaataatatgcctagtgcttttaggtagtgcaaattgttttacttgttgrttatcttttcattaattgggtaatatgatctacagtcctcccttggtactcatgggggattggttccaggcccccctgtggataccaaattcagtggctgctcaagccccacatacaaaatggcacagtgtttgcaggtaacctacacacattcttatgtatactttaaatcatctctaggttatttacaatgcctaatacagtgtaaatgctaggtaaatagttgttatattgttagggaataattacaaggaacaaaagtctgtacatgtttagtacagatcaaacagtacatgtcaacaacgttacattttctggaatttttaaaaaatatttttgatctgcagttgatagaatttgctgaactcatgggtatatagagccaactgtatgtttgccattcaaagtgctgttgtaatttttataattcagcacctaaaaagttctagtgtatatttgtagtggttgatgaaccaatgcctcattttgttaaaatctcaggagtgaacacttgtttcttctcaagctttgcttcttggatactataaaagtgcacaacactactcgggaggctggggcaggagaatggcatgaactcgggagacagaggagcttccagtgagccgagatcatgccactgcactccagccggggccatagagcgagactccgtctcaaaaaaaaaaaaaaaaaagggcacaacagcatacttttgggggggcctctgtcagtgttagtctgcagcacaatagcatttctgactgtagctggtgggcttcattctatttttaggaaaattatctcagtgacttcagacaccccatgagcttaaaaaaccatcatgagtggtgtgtaattggcacatatatatccagaatccttttgtaattttcacttttctctcaactgcctctcagacaaaaattttgaatagtttacaaaaattagcacacatgggatccattcattcaaatgtttattaaaatattggctaaaatgtttgtcatgcttatggttcagaaygcacttatcacatttgctattttattccatgtttcctacaaccggggagtaggtatttttagctctgttcaacagaagaaaaacgaaaacctcataaagattaaataatttgcacattgctgcttagaacgtaattagcagtgctgaaattggtttcaaaaatcctttgttctttttattttaccatactaacttctgatgtgtacatagtgattaccgtctatatagattgcagcagtctgccgggcgctaaggatgaattcctctttcctcaccacaatatattgtccctaccctrtaagaccttatagtctgtttggaaaatttacaataattattaaagaagttaaggcacaagagagtacagaactgttactatacactgtcattttgaccaagttatataatctacgttagacccagttttctcatctgttaagtgaagatgagacttctcacaatgttttgccaaaaaatgagacaaagtaygtaaacaatggcaggccctaataataagtttccagtacattttaacaatttagaatgttctgtgaaagctgtataagaaaagtcagaggtctagatcttaaagattaataggatttgaatatgaaaggcacatttaattattggattgtggaagggggcatgtagcagggtcagggataactcaggtgtgctcaatggcaacaaggaaccacacatcttgggctataatggggttcatagtagagagttgagactttattacatagaaaagtaagcgccataatgaaattgcttccccccagccatagctattatcttgtggagctttgaaatttttggaattgtttgatctataacacttgcatgctagtcagatttttgcatggccaaataaatcatccttcacccagaaagaattacatggtcaaaagaacactacattctaatttaaaagccttgtcttacaatacttctaagctgaatacctcaggctagtcatgtaatctctgattcttattttcctccttattttaaaaaatatattaaccctaagatttatcttccagagctattaaggcaataatatgaaatatgcataagatgagactgaaaactataaagaggcatacaaatataaaagtttgtttttattgtcatgattgttctggacttttcacggtggttatattttattctgaatttttagtcaatagccattttccaagaaaacttaactaaaataattaaagaataaataatatttgggtgagtggatattctgggttcttttagactgaaaaaatgctgttttatattcagttagtagtctttggacctggatgtgtcttcttttgacatctgcttcactgcagtactgctactgagatgagtggtgcatcattaaccytcattgttaagcttctgtcataaggcgggttgagctgtgtcttccaacagatttagacaaaatcattaaacattaattatatgaatcttgtacccagataagacatcttaaggtacatgtcttgagtgttcaagtagctttacttgagttactgggaaaaaaagaatagagacacgtctgtaatttattcttccaatatatgcttagattgaaagtggctgtgtrgaagaaaaagttgagatagtctctgaattatatttttaaaagtcaaataatcaaattagcttacagaagctttattaacaattttacttcaacaataccggataatattttcccttcctcttggaataattttaaacacacctttcatttagaaatttcttggaaattttcaacaaataaacattggtgtttaaactgttagaaattcctgactcctccactacatcacattgctgaaaggacttaaaacgttcatttaaaaatttccactggtgaataaactgcatttatggattacaacttatggttatgaacttagcatcatgctaaattttttgacagacactttagaagtacaaatatagtatttttcctcaagaaagttataatcctattgaaagagacaaaaataaagcatggaaaaattcctataatatacctagacctgacataagtgtgtagacctgacataagggtgagatrtcatagagatttagtatagttgtaagaaagggtgatgaaacttggatttaagtcgaatgtagaaggatctatcaagtacgggtaaaaagatacctttgtgtggaaacaatatgagaaaatgctcagaagggaagccagagttatgttttgggcatcactattaaaaaaaacaactagtctaggacttatgcacacattggtgaagaaaaggtgttgtatttggaggcaccaatagtcccaagttatggaatgattttaattccagacagaaatatttttatttgattttgatgataatggaaatagttaatgcttttgtgcagggcaataaaattatttatgtagtgtttttgaaaaagkcactttggtgaccaataaaaacagaatggaaaggaatgaaactggaagcagagatatcactgtgcttttgtgataaggccctggaactagggacatactgataagaaaagaatagatggatatgagaggcctaaaggttatcggtgtgatgcaatgatggatttgatagagtgatagcatggtttactgaaataggtaagctggcccrggaagaagggtgatgagttcttatctaggtaagtatagtgggaggagatgacagaatatctgagtgtaagggccccaaaggaagttgaaagtacatggaagcgcaggagagaggttggagtcaaaaggtagagtcaccagcaggagagaattagttgaaaactaacaccgtgagttcttcagtgaggggtgcagagctcattttagcttttgagaatgcctaagttactatgtgcccaggccatggcgctaatcaagaagagatcgctagaaaagcaggaaccaggaagttgttatgcctcagttcccatgatagggttgtgaaattgagagataggaaattacttgtatgaatacaggaattttcctaacagcctctgattcattgctagttatgtctcacaaattccacgtaaatcgttgtaaatcacaccactttctgatgaagaatatatgtaccatttggctttgacatataatgaattacaatgttatcaaaattgtgatttcatcacttccttcatgaaaggaaggtgttgtgacctaccattgaacaaacaataaatatagatccacaattccttttccaaacctttggtgacatgtgttttagaattcaaaatgtttggattttggagatataaagatactcatattgtgtattacctaataccccattgggttcttataatcagtgatatttctccaataggatatataaatatccacattgagtgggataaatgaattataagagcccccactaacattcaagcctgatttctcactaaatgaattcagattagattttacaaacaaatgagtaacaaagaagcttatgaatttttgaattgtttggattttgtattgttggataagatattacagacatattataatttcagaaagagaaaagctagaaaaaaaaatgaagtgggatagagaattatgagttgggcaggggtggatgatgttgggattttaaaatggaccatcagcaaagaccctaaaataaagattaagtaggagcaagcattataactgcagaagggartagcaagtgtaaggtgctgaagtgggaatgaacttgacttctttgaggaacagcaagaagatctgtgccgtgtggctgaagtgaagtgggatacgcaagacaaaatgtgatagaacattgttaggagggatgtggtcacatcacacagggagtgggatctaggccaggacggaaacttgtcggccctgtttttattttcagtgtaatgggaagctttcagatgacactggtgtgctgtgatttatatttttaaagatttattctggctatgggatatcaaaaagataataagtgaacagagtagaagcattttaggaggttattgtggaggtccaggagagagaatacagcaatttgtatcagtacgatcacagtggacaaatggataagtgaccaggttctaaacatacctcgtgatagagcctacagcacttgatttttcctgtgtaagctataagggaaaagagaaccatcaagggtaatcctgaagtgagtagtggcatgaataatatagtaccatttaccaacaagaagaagaatgaaggagttgcaaatgtagaaaatgggaatcagaaaccaggagttcttgctgaagacatcaagatgcagatgataattagacatagtcgtagccatgggaatacatgaaacataaagtggctactatttattgagcaattaaaatgtgctatgtcctcttctaagctccttacatttcttaactcagtggatcttcaaaacaatcctacacactatctacttgtgatatgtgattttattcacattttatagattagggacctaagacagagagaataataccmaagtcagtaagcacagctcataagcagcaaaataggwtttgatcccagacagtccagctccagagcccccgcgcttagacagtatacatctctggcactattaccatgtttttctaaggcattcaacctaaaaactttgtattgcaatcttgtggagttagaatagacagttagtgagcaaaattgaagtgaaggtgaagaaaagataaatgttagaaaacattttatttcattttaataaactgtttgaattgcttagaagagtttaatttattctgtatgctccatgaaatttatatctagttagcagttttcagtttcctattctgtagaatgaaaactggcttcaaaaagacatctgagtttttaaatagaaaagtgcatctaatttctgcaaattagaagggatctttttgtatcgtcttgtcttattcacctctaagcgtttttcccccaacttctacacaatgtcatatacataatgggcatttggctaatgttttcattttgatattttaaataagtgaatgagaataagcataacattattaaagtgatcattaattgtgcacaccatgccatagcattttcctattaatggattgccttgtttttaaaatactttcagattgggttgaatttagtccatacgaaattggcatggctaaatatggtacttttatggctcccgacttatttggaagcaaattttttatgggaacagtcgttaagaagtatgaagaaaaccccttgcatttcttaatgggtaagtgatcaaaataaaaatatatcattgacttgcttgactattttgaaacctgggatattttaagttattttctgtttctgttttattttaggtgtctggggcagtgccttttccatattgttcaacagagttttgggcgtttctggttcacaaagcagaggctccacaatggaggaagaattaggtatcctaaagatatgcttacattgatacaaatcttgctacattgataaagtttattgacatatatagagagaatattaaatctttgtaaatatttcaactattctaaatttattaataatttggttgaatcaatctaaatatttcctaaaaataatatgttacttcttaagtattattttgacactgaggttataaaactcataaaaatcattgatttctaagagtaatttttaatagaacacatctctattcctttttcgcattatactgctaaacatactatttgtattagaaagtcctctttttatcaaataagaatagctttttaaagattagattcaccaacagctaaatacaatgtaacactgaagcttatgcttgtcagtttatttaacccttaaatattaactcaccagaattctgttagcatcttatattaatctatacccaaaagaaggaaaaaaatcaaatcacctctagtacacttaaactaatgattttcattaaatctaacctattggcctataataaattacgaatatttacaaaacctgagaaagtagacaatctcaactggggaccagtggttttcattcattataggaataccatagaaacatgttttcttaaattaataaatttgacttaaarcaaacaaaaaatttatattcrgtttcttccaaaagccttgccacctgtattttaatcaacattaatttttgggttgactgttttgactgatagcataaagaaatggtggcatgctaaatctgaatttggagccataacagcagggacctgggagaagtgcctgatggactatcaacacaactacctactatctcttctctatctgggaagtagcaaagatctatctgagaacaaagaagtcgacagaataacattgatgactttttaaataattaatttatttgaagaatgcttgcatacaaaaagcttcctgcaggaattttaaacaagctgtccttggttatcccaggcaatgtcagttgatttaattaagtttacatgcaaaagagaatacaattgtaacattaattggaacattaagttggcttataagcagtatttccactgctcctacaattgattttagttatttgataatttatttaatatttgtatttagtgtggtaaactcctgtagttcataatattttcaagagtgtcatttgtatttttgttagttcttaatgaataatggaaaagttatcttataatttcattggagccaaagattttaaaataaaaataaaaacaaacacacaaataaggcaccttgtgtttgtttattttctgtcctctgatcatcacccagttaatgagcaaacaaggtaggtggcacccatgagcctgctgtgacatttaccacggggcacattctcctaagagtaactgcaaggaaatgtgtataatgataaaatgatcttacttgatttcttttaatgaacattacatcccagatgaatgtcctgttcccaactctttgtggaaataacaaaccctttctctaagttatgtgaagattttagaaaaaaaaaaaaaagaagaagaaagagaagatcacatattgaggcttgcttcctgtgcccctctgttgaataatccagataacccagggtttgctgttttttcttcttaaggcaggaagagaataggactgaaataacagatctgaatgtgggtgagacagtggctaaaagccaaggaaaaggaggaggtttatactaggtagttttgagaaggttctttgttgagaagtttctttagaggccggcagtctggcagcttattgactcggactgtgtgtcagactgagggggaatatcgtgtatgtgtgatccgccagtcagcaggaagcatgttacctcagattaagtaaggatttccagaaatgaaaccagagaggtgaccaagaggactctgaggactcctggtgactactctatcctttggctgactgaagtctatctcctaaaggagtgttcagagatgatttttacttttttgttttcttccttctgaagaaagactttaaggtaaattgggctacaatcaggtaactctgaatgaaactacttactctctaaggagttttgaatgaatgtgaaaaatttacacttttgagagatggagttgtacattatactaggatggaaaatatgtaaattcagaatagttagctattcatatcatgaagtcttccttacaaataagacagtattttggtgaactattttcttaaactatcatatgtgacagaaagaaagaaaggaaagaaagaaagaagaaagaaagaagaaaaagaaggaaaaagaaagaaagagaaagaaggaaggaaggaaggaaagaagaaagaaagagaaagaaagaaagagaaagaaagaaaagaaagaaagaaagaaaaaaaagaaaaagaaagaaaaaagaaagaaagaaaggcaatagaaagaaagaaaatacttaaggaaggaaaagaaaataaatgtaggactagaaacacacctaatgtatatggcacctgggatagatcatttcttaacatctcccacacctctgtgtaacaaaattactattgatgatagccatgaaatgaaactaataatattagcttgtgaacatttaatcaaattttttatgtataatcatgccagtaaaaacttaaaaaataaatgtcaatccattgccttaagcatttattaacccttccattactaactcttgctcattcacgcacattttacttgaaaaaagacaactagtctgggcactgtggctcacaccagtaatcccagttctttgggaggccaaggaaggatgatcacttgagtccaggagtttgagaccagcctaggcaatagagtgagacttcatttctaccaaaaaaaaaaaaattaaaaaaattagccaagcatgatggtccatgcctataatcccagctactcaagaggctaaggtggaacrtttgcttgagcccagaggcagaggttgaaatgagcagagatcatgccactgcaggccagcctgggtaaccatttaaaaaacataaagaagaaagataactagttattatgctagaatttactgctgtctttgttttaaggatttctggttgttattttastttttataactgctctcttaatatgttctgcaggaagcacaaattcttgacaccaaaaggtgaatttcaactgacaattttcaatattattgaaagtcaaaagataatttatgttagtatctttcattcattttaagaaaactgtttggtagctcacctgtagattttggttttatcctttatcttcataaacaccacttaaaaatatctaataaagaaaaaggcatattttttggtataacaaggagcttcctataatcaagttgttatttttgtcagaattatgataaacataaaattatcctctttaagtcatgaattaataaatataaactaatttttcatgtcccaggaaattttgtttccagtgagaaatctgagaacatgattaaatctaataaatctagaattattaaatggatttaaatttatactagtagagctagtagatctcactctgtggttttgctcagattacttttttatattaaaattaattgttaattttgacacctgaaatgcttcaatttttttgttttcttttcacagaaaatattaccacaaagcatattgtgagtaatgatagctcggacagtgatgatgaatcacacgaacccaaaggtgagtgagccggaaacttttctggcccagatccatgaggaaaggatatgaacactctgtctgattttctcactcaagatgctgatggtaatcttcacttcagacacggaagtgataaaattgtagctttctrttgagagagaggattgcatgttgcatgtctaataaaataggcagcacatataaatccctaatttattttgttttaatacctcaaaaatactataagttgaacaaatgaacagatccaagayggtagaaatgctgaattctattttaagtctgattagagcactaggcttctcagcatggttactgtgatttgggaacayttttagatggctttaaaaattaacattttgtctttcagaattttgttattaagtaacatgaaaaattatattctcactccattcctgacccttatcccactggctacaccctccctcttgagaaaggattagtgatgaagtggggtaaaagtatcaagaacttgatacgtatattatttcatagtataaatgagcctttttacattttgacaaggtagtttgcagtttggtgtggattatgatagtcagtgatggacttggggcagagataaggtgaggatcagatttgcaacaaatatgaaagtcatatttgttgtaaatgttttgtggtaaaatagattattttgacacagtgttttgagacagccatttataaaaatgttcccaatagttaaaaaaaaaagccaacaaacaaaaacaaaaacaacaacaacaaaaaacaaaacaaagggaaggctttataagaactggatatatctgtcctattacagtttgaatatgatcatctagattttagaagatattaaatgctttctggtccaaaacttaattaattccactaggcatggaagagcctgttttatccttgcttaattattactaaaattaaaattcttttttcatagctgggctattacttcctcagaagatgtgtttgtgtaaattaaagaaaagctgccttctctggagaatgtagctgcacagggccatggcttggctagtgtatgttgtcttgcgaacattaaaaaagaggattccttccctgggcagccaacgctttcatctgggcatgaggcttggctagatgagtgcaagttgggttcagccctgatttgcccccctatcctgctgcgttatgtagcccatgatctgcctaatcaaataatgaccagcagccctgatcattaagcaggaaccccaaaagaaccctgtcctggaagcaagcaagtcttcatcctggctccttcatttttaaaatttaaaatttatatatattttagttgtttaagtcctttttgttttgaatttccttttaatgaaggaaactagctattgtaaaggggatagctatcacatgcctagcatctttagaattatttgtgtattgatttagggactactgaggagacagaataatggtttctccattattaagtatttctatagatagtcagtacatttgataacccctacagtactagctgagtcttaaggctgagaagttcaaggactgttgaatatggctgctttggttttaggatcagccttgcttacagcatgatatktagtatgtggttaaggttttcttttcggctcttagtatttattttttctcttttacatagagtttttagagcagttttaggctcaaagcaaaactgagcacaaagtacagagttcccatatgtcccctgtccaccttccaccacccctgcctctcccactataaacattccacaccagagtggtacatttsttacaagtgatgaacttaaattgacattattatcagtcaaagtccatagtttacagtaggactcactgttrgtgtatattctatgggttttgacaaatatgtaatgacatatattcatcattatacatgtcacacacactagtttcactgctctaaaaatcctgtctcctgcccctgtcccctcctcccccaacccctaacaagcactaatcattttactctctccatagttttgccttttccagaatgtcatgtagtcagaatcaaacaataatgtagccttttcagatctttcacttagtagtgtgcatttaaagttcctytatgttttttcttggcttcatagcttatttttttagcactgaataatattacatygtcaggttgtgccacagtttagttattcattcacctgctgaggaaggtgaacttggaaaacttgaagtttgcttccaagttttggacattatgaataaaactgctagaaaaatctatgtacatgttttggtgtagacacagatttttcaatttatktgggtaaataccatggagcacaattgctggatcatatggtaagagtatatttagttttgtaagaaactgccaaatggtcttccaaagtggctgtaccattttgcattccactaccagccatgaatgagagttcttgttgctccacatcttttaaacatttggtattacctgtgctttggatattggtcattctaataggtatgtagtagtatctttttattgttttaatttgcatttctcaaatgacatttaacttgaagcatcttctcatatgcttatctgctatctgtatatcgttttgatgaggtatcagttcaggcctttggcccatttttggattggggttattttcttattattgaatttaaagtgttctttgtatgttttatattacatgttttaaatcaaatatgtctgttgcaaattctttcaatctgtgggttatccttttattctcttgaggctctttcatgtttagtcatatgattttgagcaaagttttaggcattttcagctttagtttcttcagacctatcctggaaccatttaccttctctcacagaattgttgcaatcattaatttagcaaatgcatacaaaagggctctaagttgtaaagggcratgcaaatagaaatgtactattactgttatgattaataagcaataagtatcatttatatgttgactgttgggtttgtcccacaagtgatgccattatcaaaggtatcctggtatggaagtgagggcttattgaataagaagaagaaaagtaagaagcgacagccccaaaatctttggaaataattgcatatcctatttatatgctgtgtaactagagatagaaatcgttcactttaaagcctgaattgttctagtaaaagacacattttgtcctgtttggcattagaaaagtgtaagagtagaaagtagtgtatttgtttttggtgactatatagtcatctggactggttactgaatgaaagatctcttcatttactcagctcagttaaacaaatacctgtgaagataaggattataaatcatgctactataaagacacatgcacatgtatgtttatggtggcgctattcataatagcaaagacttggaaccaacccaaatgtccattgtggtagacaggattaagaaaatgtggcaaatatataccatggaatactatagagccataaaaaaggatgggttcatgtcctttgcaggaacatgcatgaagctggaaaccatcattctcagcaaactatcacaaagacagaaaaccaaacaccacatattctcactcataggtgggaattaaacaatagaacacttggacaccrggtggggaacatcacacaccggggcctgtcagggtgtggggggctgggggagggrtagcattaggagaaatacctaatataaatgatgagttgatgggtgcagcaaaccaacatgacacatgtatacctatgtatcaaacctgcacattgtgcacatgtaccctataattttaagtataataaaaatatatatttattatggttttatgtatgtttagtttacatttattggaaattatgaagctgactatagaatctctttttttctctttatttcaacacacacacacacaatcacgcacacatacacacacagttttataaatgtgtgactatttatatacagggttcctagaaatcagaaaaaaacggggtttaggcaggtgaagttatacattaccataaattattctctgattttgattatgaataaataagattgatgattatgatgcttctgctgctgctgctacaactgtttctgctgctagctagtgtttattaagaatttaatatgagccaggcatttttctaagaacattacatagatgcacaaacacagttaattctcacaactttaggaggtttatcagtgargaaatggaggaagagaaggggaaagtaactagaaaatagtggagagagggttgagacccaaggattctgattctggagscagtgctataaatgaccatacaatataatttcccaggagtaatggtgtatgcataggtggtaaggaaaaagtcatttaaaactgcttctttggggtgattgctgaattttaaaatgtttaggcatttgtttaaattaaaggcttttaaatccccaaactttataagcaaggatgaaatgacaggtcataagatcaataggtcataagggtgtttatttagtagcaaatatatgttgaatcctttagctctctctcctcattttgcagaaatcctgaatgtttgttaaacagggtaagatttcttaaggtaacttaagaaatgtagaggatagaattaaccactggattttctgtgtgtaagttatatgtgtgcatgcaagtgcgtgcacttgaagccagagaaaaggaagaaatcaattcaggaaagaagggaagggggaamatgaaagaaatttacctggaaatctgagcatagatcaagtggcactgtcaagaatataccccttacaygcactgtaggtaaaaggagaactaagaacaaattaagaacaaaaatgattaactgcaatattaatttaggcaaataaacatgttaaaccaaatatagagcttcattgttaattttaacattcaattatccaaagaagatcccttttttttttttttttttttttaagacagagtcttgctctgtcgtcaggctggagtgcagtgatgcaatatcggctcactgcaacctccgcctcccgggttcaagcaattctcctgcctcagcctcccgagtagctgggactagaggtgcacgccaccatgcccagctaattttttttttttttgtatttttagtagagatggggtttcaccttgttggccaggatggtctcgatctcttgacctcatgatccgcccgccttggcctcccaaagtgctaggattacaggcgtgagccaccgtgcccgkcccaaagatccctttttaaacatgcattttggagtctgtatggtgaccttttatttttccctaggcactgaaaatgaagatgctggaagtgactatcaaagtgataatcaagcaagttggattcatcgtatgataatggccttggtgagtgattcagctttattcaataccagagaaggacgtgctgggaaggtacacaacttcatgctgggcttgaatctcaatacatcttatccactgtctcctttgagtgactttgccacacaggactcctttgatgatgatgaactggatgcagctgtagcaggtaagtgtacaaatataattagtgggagctaatgcaggagatctttattccttctctggagagaagcattttaatyattattaacacttactcatttattatcagttattacaacctgcatttaatgtgtgaagggcttcaaatgactagggtttttttgttgttgttgtttgtttgtttgtatttttgagacagggtctcacccagtcacccaggctgcagtgcagtggcacaatcatggctcaccgcatccttaattcctgggctgcagcaatcctcctgcctcagcttcctgagtagctgggactacaggtgcacaccaccatacccagctaatttttgtagtttttgtagagacaggtttttgccgtgttgcccaagctggtctcagactcctgggctcaagtgatcctcctaccttagcctcccaaagtgctgggactgcaggtgtgagtcaccgtacctggcctggatttttttttaaagaaaaatttacattggagaggaaatggcctagacatgtcagtatagaaaattttcattaataatattgaggaggacggccggggagcagtggctcactcctgtaatcctagcactttgggaggccgagactggtggattacccaagctcaggagttcgagaccagcctggacaacatggtgaaaccctgtctctactaagtaatcccagctactcaggaggctgaagcacaataatcgcttgaacctgggaggcagacattgcagtgagccaatattgcaccactgctactccagcctgggcaacaaagtgaagctctgtctcaaaaaaataaaaaataaaaaaaatattgagggagatgttagatcttctctgtactggtcacagttcagttgcagaaatttggaaactatttcctattttctgaaagggatttaaagaagggaattaggtgcttataaaatcgttccaaacttttaggaatttaaataagggaattaggtgcttataaaatcgttccaaaccttcagggagcaagctttaggctgagctttcaggaatggttcaaaaaccacttcagaatcatccccacaaatgtgttggcaactgtgcttggcagcagaaatagtggaaatgtagcttctgtctcattttctgtttcagattttatgtgactgactgtttctctttggcagaggccaggtctcaggagaactggagctgcaagggaatctggcaaacacattcttagcctgactccctagtgcaacatagggcttgagtaagccagcctgtagtgttcactaggctatcggaactatctctccagttctcagaaaggttaggtaactttcttaaaactgcccagcaagaaccttgtcactttcaggtttgtcacttagccagatcctcaagaataattccctttggttttcagttccatgcctgttataaagttaaatttgctttggtgaccaatcaatatacaataattttttggtgataattctgtcattttaaatttttatatttcaccacaccatcatcttttccttaatgtccaaatgtcattcctcaatcatctatgtctaaggacattttgattagatgcagtaaaaacttaaatgggatatttccaaaaaatttttctactgccttttgtttaagcatcatacctagaacatacttgtgaaatttaggatatagctttggattttgttgttgttttggtattgttgtttctatttgttgcttgaccccttaaaaggtattacagaggcaaaaatgacccctgttgtttaaacaagattagtgcaaactcattatattttgtgttatgtttatggcatcaaactctaggatatgaggtatgtctgattatataccggtaatcccaacaggattcactacgttatatagcatattaactaatatattaactataatgaaattctaattgttataaagtcaatatctctttttaaattcatccaaaataaaaatacacttaaccatacattcagtgacattatttttcttgtttagtcacataactatgcttattgccatcgcaataccaattaaatatgtctcttctagaaacgtatgctttatagattaatgatgatgagcttaaaaaaactacaaattcatagagcatgtcgatatatagagaatcttcagttattttactctatagaaagcgaagatcaaagaagataattctgtcatctttgcctaaaatttctcaacagagctgagattgggacacaggtttcttgacattgcttccaagcttttcccttggccacataccattccccttagcccttggttttcttagtcatccacttgcttatgtaaaaatggaagttttctttgtgtatactttattctatttgttttacattattacttggattgcaccagctccttatgtagttttcacagcacgaggtctacactccacattttaacaacttcctggaagttttgcaatattttatgtagatttggtggtgttggggttaccagataaaatacagaatacccagttagatttgaattttaaatatgtatatggataatttatatataattcttgcagcatttaggatgtacactaaataattatttgttgattatctgaaattcaaattaaaccgggcatcctgtatttttttagctaaatttggcaactttaggatgtatgcctcttccttttaaactattttagaaagtttcagtgagagaggaggaattttcatcttctttctgtcttttgttcattctttcattcacttaggtttactgagtacttataatgtgcttggttctgcactccagcctgggcaacagagccagactccatctcaaaaaaaaataaaagaatatgagttgattgcgggtgttcgcatttggagaataatagttgtacaccaccttgtcgactcctttcttcatttagtgccctttgaaagaagagttataggcagttttcataaaataacataaggaaatataaactatcaatcatccccaaatatggcattatataaaccaatttttttgagatacctgaaaatgttctaagctaaaattattttaaattaatgacgtttggaaagaactttacattttatttcattgtgtgtatttcatttaaattacactttattcatttttatgtattcagttgaaaaatgtatatggggtattgatttcattaaaaaatttagttcagtcagttcacagattcattcaactttatgctttacaggccaacattgctaaaaataatttcattttagactgaatttactgaatgaactagtgctttttcagaaagagtccttacaaggatagatctgatttacctccctctggttgtttccaatttttagaataatcatatgtttggaatgaaaagttaaaacatttatcacaaattgtgataattttggttcataaggtcctccttaaaattcctattttaaagaataccaactaaaacttttagccacaacttatttaaaacattaattaagcacatttctttttaaattttgcaacccccatgccaaaaaaaagatttttatctaatctagatattaggttggaaaaatgttacatttgtttaacctaygatgattttgtttatataaattaaaatgtgggtgttttagaattaaagcaatctctcaacctaaaatcagtaaaagtgcgctatttttgtgcctactacttaatcttgtagactgtattttgtaaacagaagaaattataataggataaaattccactcatgtgtttactgcaaaatagttgtgtacctgtagaaacaaattttggagagctttttattagtcatatgacttctttcctgtttacttttgtgtttatcctacttactgtgacacaccatctggaaataagaaataaagacatgagttaatttaggctagagttcaaaacacagacatccaaatatttgtacattgaatctgtgtgatgtatttataaaatggtcattacaaatatccaaagctgacctgctttaaggaaatgttacataattctaaaacagagttatgtttccacaaccgcattaattcattcacacgtttagaaaccttgtacgttttaaattrtaggaggatattcttccataacggcatttatccaatactctatgacatttaatagatgttatacagtaaattgggtttaagttcaaataaatttsggaacatttacaaytcratctccttcttcaaatacaatgagataccctactgagtttaagtcctacttaaagctgcttgaggatagtactttaaaaggagactagcttatatttgaatctcagttggaccctttactagcaggcaatcttaggcagtcaggtagcataagcctcaatttacttataaaataaaaataacaatggtacccatgttatagaattatttggaggattggttagcattttcatataaagtgctgttagtggaagccataggaaggagaatagggaatgcgcaatgtaattggctagtactttaagttgttgaattttgtctttctcaagacatgaccttatttaatcatggcactcttattttgtatatgagacatcagtttatatcttgcataactatgctttttgcaacacagttaggaaacactacttactggtttggcttggtttttttgttttttgcaacatgggtgaacttagtggatattatactaagtgaaatgagacagacactacatgatctcactgttatgtgcaatctaaaaaagttgaactcagaagtagaaaatagggtgaggattaccagaagctggggggggatttggggaggaggcagtagatggagaaagaggcgaccttgctcaaagggtagaaagtttcagtgagagaggaggaataagtgctgggtatctattgcacagcatggtgcctgcagttaataataatgtacatttcaaaatagctaaaagagaggatttagatgttcttaccacaaagaagtgataaatatttgatgttatgaatatgttaattagcttgatttgattgttccacaatgtatgcatgtaatgaaacatcacattttaccccataaatatacgcaattattatttgtctacaaaataaaaattgttttaaaaataaaataacaataaaaggaacactacttaccatcaatttatcttgaaggtggaaacaatggtgtttagctacagactaaagctgggaattggtccacatgattttcccctcaaatgccctcactcttggatttaagaaaggataaaaggatactaccagtttactgatgataaggggcaaaccaaacagaatatgagagaaatcatgtttttggttacactttcagctaaatttttttttaaaaactgagtttatgaagccaaaaaattttatgaattataattatactttcattagattagggaaaatcactgcatgtaaaattagagtaatcttcctcccttattcaaggtttcagtttcctcagttttagttacccacagtcacctgctgtcaaccacagtttgaaaaaaataaaaattccagaaataaataattcagagttttaaattgcatgccattctgagtagcatgatgaactctcatgcctttcctcctgagatgcaaatcatctctctgtccaggctgcatatgctacctgcccgttagtgactcagtggccatctcagttaaccagattgactgtcacagtatcacaatgtctgtattcaagtaaccttttttttttctacttaataatggccccaaagtgtaagagtagtgatgctgacatagtgttataattgttctcttttatctttactgttgttaatctcttactgtgcctaatttatagattaacctgtatcatgggtatgcatgtgtaagaaaaaacatagtatatgtagagatttgtactatgcacagtttcgcacayccactggggggtcttgtggcatatccccccaagtaagtagggactaccatactcccattattgtgtttttaaatgttaggttgaattgcgataaaatacacatattaatgtggttttaataactgataggattatgtgctgataaactctatactttgtagttattttattttatttatttatttatttatttatttatttatttatttatttatttttgagacggagtcttgctctgtcgcccaggctgcagtgcagcggcgcgatctcggctctctgcaagctccgtctccygagttcacgccattctcctgcctcagcctcagagtagctgggactacaggcgcccgccaccgcgcccggctaaatttttgtatttttagtagagacggggtttcaccgtgttagtcaggatggtctcgatctcctcacctcgtgatccacccgcctcggcctcccaaagtgctgggattaacaggcgtgagccactgcgcccggtcactttgtagttattattttttatactattcatttcaagccctcttagttagtcatgccactttctaaagtaatagtgtcacaccgtgcttagggcttagaccttgtgaacctggcttggaatcttgactctcactatctgtttgaaaatagacaatttattttacctctgtgagcctcagtttccttatctttaaaatggctacctcctttgtaagattgtttccttatctttaaaatggctgtctcctttgtaagagtcgtataagaataataaatcttatatatgaaatttctgatacataatagactcagtataaatgaagtcatcattaggataaatgtaagtaaccaactaatgaattataactttttagtaaaatatttaaaaataaatttaagccaaagaatatttttacctgtaagatgttcacatatgtaattgttaaactaaaaatttcagaggaataaatattaaaattgggctcgacagtttatatagttcagtcttacatcgttacattccaggttctgtgataggtagtctagtattttggctgatggcaaagtgcattctcactactgtttgtaaatacttattaagaaaacagaattgatctacagataattatttaaagaactatttctcgtctctctccttattgccctataagttagccttggacacagccagcctttattatttagccatattaccttatcgttgtctttaaaaatagctttatttttagcacatttggttttattcaagaccgttattcacaaatttcctctttgcttcacctattctgggccgtatgaattgcctcagccataaaatttattcttctttatttataagcatcactagtaagcgtttgtaacatttatttgttattcagtattttagaaatgggaatttttaatagatgtaaggaaacagatgactttgttaactgtagaacgttggatattaatgtttctttaaagtattaataactatgccaaagtcttattctttcactttacactgaataaaatattatgactgtctcattggtgtttttacttcaacctttatttataaagaggattatggatttaattggacaagaagaatttaaagatttgctttcctttttgatttcatgctcttaaaatctaataagtaaaactgactataggagaattatagtattattcttacttagaaatctatgaagggaaactaacatatactaggttcctactgtgtgctgagcatgtatgtatgtacataggtattaagtcagagatccttattcatatctggtgtgaccatcttcactttattctactatcataggcctccctcttgggctttgccagccttcttctaacagcaggaggaaacaagagtgtggacaagggaacagagcacaacagctgtatggcattttatccagttcaattcaaaccagttcaattctggtcatgttttattttcctggcaagtgaattaggagcaccacacataaatgtgaagagtaatgtgttatcagtattattttttcataaaattgatgatctctaggtcctctttttcttcagaccccttgccatctcrtctgttctcctcccatactgtcctcagactgcaggctccttgctgtcctcaaacacacccagcctgattctgccttgggacccttgctctagctcctccctctccctggtaacttctggatcccaccctcccaatctttaggtggcctgttccgtatcattattcttatttcagtgtaaggttttcttctcagaggcatctcccctgaccatccacctgaagttacttactccttattatagtgtccttgatcattttcttcattgcatttatcacgttatgaagtgccctcttgatacatttatttacttattggaggtgtactcgcaatatgagctctatcagagcagagcatgtatctatcttgttcagcatctggaatcatatctgaatggtagtagccaacatatatttgctgggtgtgttggctggatgatttccttgaactcccaccttgtggtggaatgcacactcaccctcaagagaggcagcctgggaaccatacagagtctgccacctcccagttgtgccaccttcgagatgactcttcattggcttcaccctccatttacagatgtcctctgcctcacctgtctgttataagaattaaacaagattatgcatgaggaaatgtttagaaacatgtaaagacctacgtaatgtaagataatactattgaagtgatcatagcttagagttaataccaggacctgagctaagtgctttccatgcgttgtccctataaatcctcacagcaaccttatttgataattacttttatcctgatgttacagatgaagaaactaagacttaaaggtaataattacaattgctaaagttggtttcatgcccagctctatttgtctccaaagcctgagggcctaatcatatgaaattctttcaaatttgaaaccaacatttttagatgataaatactgatgaatgatcatttaattcattcttgtttttcttttatgtttttaagatcctgatgaatttgagcgaatatatgagcctctggatgtcaaaagtaaaaagattcatgtagtggacagtgggctcacatttaacctgccgtatcccttgatactgagacctcagagaggggttgatctcataatctcctttgacttttctgcaaggccaagtgactctagtcctccrttcaaggtaaggatacataatacagcattccattctctaccacattctcttgcttgccttatagatctcttagtccctttgactccagtttcttattcctttaatgtattttctacatctttatgagtaatagttctaaaacgcaaacatgattcaatcagtctcctgcttaaagacacttttaaataattctaatgagctcaataaaggtcagagccctgagcaggacaagaataatacagtgggtctgaagtttagaaaggaaatgaggctgagatttgggagttagcaagtaaatgatcattaaaaccatgaatggagagggtacaccctgagaagagaagtagacataaatagtactttaaagaatgctaacaaggggaaaggaggagaacaaaggaagtgtgtagtattatgaaaactgaagatatattaacaagggggttttttggtgaactggacaaggccagtttcaatagggctgtgagggcagaaatcagaccagagtggtttgagggatgagtggaagttaaaaaaaaaaaaaaaaaaaaagacatcatttctgtagattgttcagggaaggagatggactgtatctgtaagaggatgtggggaagaggaaaactgtgtgtgtgggtggttgggggtgggttaatagaagagacaagcatgtttacatactgatggctaggagtcgttaatgaagaaggtattactgaagagaggagagatgagatataggatgaagtcacatctctgggaaggatgtagggatgggaagtgggaaaggaatcaaggacacaagtggggaacagtattgaaatgtctacgctgggggaaaatggcagcagatgaagatttatcattaggtatggaaaaaggaagttaaggaagtattcatgtgatgacttcgaagttttayaggaattaggagtcaaggttaacttgtgaggataaaaatatggaggtagtggagtcaggcatgtggggtaaataaaagtccgcctgtgttgaagaaaagagaaaagcttctgaatgtggcaatatggaaagattgctgggctgcactttggcctcaccctcaaataaacacgctttgttccctctgcctggaatactcaaaacattctttagacacagctcaagtgttatctttcttgacttccacatatatggttaaagtgcataggactcagtcaattcgtctaatacagcaattatcatagtatrttgtatgtttttgcttacatatatattgctttcactgtctgtgagctccttgtgactagaactctgttctctgtctgtgtttattttgttttaatcatttggtcctaattgtcatttaggtactggccaaaatatgagtatgtaggatttttttgtaggtgaataaatgaaatgctatgagagagatggagttattattttgattttatagattaagaagtggcaattcataataattaaatggaacagttcatgatctcctaaccaggtggaatcagtgatagcccaggtcaggtcctctgacagcatatctgtttttttctctatcatatgatgattaaactgctctcaagaccaataatggttattataataactcttaaatatatagaaaaccttacatgttcaaagtgctttcatactttatctatttttggggtagtaaaggtattcagacaaagaaacaagtatcaatgagataaaatcttatcaacaaattaaataatatgtggaatgagcacagcccacgacctggctagggaagtgctagttaagaaatggtgagatgggaccagactccaaagctacagaatgagaatttcttaccctttaccagctgccttctttgtgcacactgttcrtgaactcttttctgtgtagtgtgctgtgtgcagcagttagtgggaaaatacagttcctgatctcccataacattttggttttttggggcaaagacttttattcacaagagccacttggaggggaattgagaaacttactattaaatagtcattgacataagtttacataagtatgtgtattataggggataaatataagaatagattggtgcatactggagttaatgaacagggtaataaatgaaatagggtgagaacagcacagagatggcaatgagcacatctaaggggcaggagtgatctgattagaagtgacagatattcagctcccttagaaaggcttaaggagagagtttaagacaggacaataggaaatggagaatcagtggaggatttcagcagacaaatgacttcatgaaattggaattttaggatgattaatctgacaatggaaagtaggatgagttggagaatggaaggcaaggaattaacattaagagacatgtattgtaatccaaccataggataatgaagtactactgcaccagagtgggtgactatgaatttgatgacctatgagaaacaatggggaggtgggtttcartggatgactctaagatgatagcttagaagctggtctagtggtggaagacactgtattattcatttcaccaatgggggtataaaatgtcaaagccatcattttacatgtgaatcagggctccaccaccttaatgagttggaggaggttttggaatatcactttgtacctttaaaaagaatcattatacttggcagtagtttttaaatgttgactcattatttgtgattaagaatagatacttgtaaaatgtatgaacatttggtttataaatgcagtacttccagacaacagctgttaatattttggtattttcttctagtctcttttcgcggtgtgtatgtgtgtgtgtgtgtgtgtgtgtgtgtgtgtgtgtgtgtgtgtatgtgtctataccagggtcatgtagttttgcattctgtctctttctacttacaactgtattatgagcattttttcatgtcattaaatatttaagaaaacaattataaagacatataatacagtaaatataaaagatatataagatgtttataaaataaaataaaaatatatactatctctgtatacagatacgtatttatttaacaatgctctattttcaacttttagattattgctatcttgccacctttttctgtaatcattatccttgcacatgaatctttaatcacattttaattatttatttaggttggtttctagatgtgtatcattttatgacttctagtaaatattttcagattgatttctagagaagcttcatcaatttacattactatgtctaattatatatttgagtctctgttttacatgcctttgctggcaggaaaaaatattaaagacgaagtaaaaaaaaaatttatacaatatgatggggataaaaaacctcacatttatgcttcagttttcttcctttgtgagactgaatggtttgtcatgcttattatatattgatgtttttaaactacttttaattggattatttgtgatgttcctattaataaacattctttttatgtcttaagaatattaaagtttgtcttattcttgcaaatatgacctaatatgtcatttgtattgggacttttgttgttgatgattttattgtttcaaatatttatgtaggagcttcttccattgtttttattctttcttataattttaaaaatttttttcactgtattttctctttttcatatcagttttttaaatttttatttttaattatttatggatgcagaatacttgtacatatttatggggtacatgtcaaatttgatacaatcatatktggaaagatcaattagggtaattgggatatctatccccttaagcatttatcacctctttgtgttagtaacattccaattccattcttttagttattttgaaatatataataaattattgttaactatagttacccaattgtgctactgaacactagatcttattccttttatcttactgtatttttgtaccaattttccattcactctttatttcccctttccactagccttcccagcagatggtaaccatcattatactttctatttccattaattcaactgtttttagttccacatgtaagagcatgtaatatttgtctttctgcgcctggattatttaacttaacataatgtcctctagttctagttcctgacatgttattacaaatgacaggatttcattatttttttatgtctgaataatattctatagtgtgtaggtatcacattttctttattcattcatttgttgatcaatgcttacattgattccatattttggctattgtgaatagtgctgcaatcagcatgggagtacaaatatctcttcaatatactgattttcctttcttttgggtatatacccagtaatgggattactggatcatatggtagttctatttttagtttttgtaggaacctccatactgttttctgtggtggctgtactaatttacattccaagcaaccatgtaggagggttcccctttctccacatcctcatcaacacttgttatttcctatcttttggataaaagccattttaactggggtaaggttgaatcttattgtagttttaatttgtatttctttgaggattagtgatgttaaacattttttcatattcctgttgggcatttgtatgtcttcttttgcgaagtatctattcagatcttttgcccgtttaaaaatccgattgtttttcctattgagttgtttgagcttcttatatattctgtgtattaatcccttgtcagatggatagtctgcaaatattttctcccattctgtggttcgtctcttttctttgttgattatttcttttgctgtgcagaagcttttaagtttgatgtgatcccatttgttcatttttgctttggttgcctgtgcatctgaggtcttattcaagaaatctttgcccagatcagtgtcctggagtgttttcccaatgttttattctagtagttttatagctttaggacttagatgttactctttaattgattttgatttgatttttatatatgtcaagagacagcagtctagtttcatttttctgcatgtggatattcagttttcccggaaccattttttgaagagactatcccttctccagtatatattctgggcaactttgttgcaaatgarttgaactgcaatgggtggatttatttctgggttctctattctgtttcattggtctatatgtccgtttttgtgccagtatcatgctgttttggttactgtagctttgtagtataatttgaagtcaggtaatgtgatgcctccagctttgttctttttgctcaggattgctttggttatttggggtcttttgtggttccatataaattttaggattttttttttctatttctataaagaatgtcactggtattttgatagggattgcattggatctgtagattgctttgggtagtatattcttgaaattcattcttaccaacatcagttaaatgtggattgatattttaatttttattttattcttctaaatatatttaactcattaatctttttgaatacattgcctttgtaataacataatcccccatagacttttttggcattattttgttatacttattatatcatatactatatgattcttacagggcacaaggatattttgttttaatcttttgtgttccattaatccatctgacaatcttgcagttcttatgtcagtaccatactgcattttaataactgtagctttattatatgcctactataataaaaagcatgtctccaatcactccttctgtagtacatataggcatttctacctgtgcattctcttagatgtgttttaaaatcattttgtcaattcttttcttcccgtgcctttctccaaatttatatacttccttttattatttatttagcataacatgaaacctaccattctggaaataatgaattatattttctgacacttaatataaagtaaattgcaatatattacacataatatagtttttcttgtctctaggtatgtacttcagcaagttcaaagtaaacaaaataatcttttcaggctgagttggaatattaaaagtaccttaaacctataagtgttgttatcaaaatatgtattcctaaattagtctaaaagattgccaaagtagaattgttaaattgataaaaatattatactatcaatactaaagtagaatatttgttttatatataacataataagatttgaaaatttgcgaggagtctacataaagttcttttgataggaggggagaatccctaatgtaataattggatatatgcaatatgattttattaaggtaattaaatagcaaataatttcctatttttgagactgaaatatggatactgcctttcacaaaatattagagcataaatgctgggcaaaaaattagaactattgactttatttcacatttgcagaaaattctagcacttcgtgtagttaaatgtcatattttgtcaagaagatacagaaagatggagatcatgtcttttgataaaagcaaccacaatttatgttgttgtatctgtgttgtaactggccttgaaagttaatgacatcagtgtgacactaatttatttagattagttagcacacacctagtagtagtccaatataaagagttcattattctaaatattattactattaatttatctaacaaaagcagctttgtgtttcattttgtcaagtttctttttgttaaccatttaatatcttagatgtataatatgaaaatttagtgtaccattagagctcatccaaagacaatcagtgagattgattgttggtcatgaaaataagccaaagtcttcatactcaagcatgcaaaattaagaggctgtgaatttaggggaaaatgaagggactttgggttttatcggggagcaagaaagcaaggaatatagaagaattcagagtttactacttgaaattattttcccctttatcttactaacttttagggagagtgatagattttagttattatgccataaattaagttatattgtgttgccatacgttggacataaatctggctcagtttttcagtgctcatttaaatgcttaatgacaagaagccagaacaacgggttaattctcttaaaaattattcaaggaaagagagaaagaggaaatgagggaaggagagaaggaagaaagaagaaaggaaaatctgaaatgaggcagtcttcacaaatgatggaagtaatgtatctaaattaaactgatctgcctacatttcatttagggtcagaattccatttaaacccactaaaaacggaaaaagtatctgtatttttccacaatcacctgatttatttgttgaaacgagggcatgacctgttttagaatctccacatattattcacttataatgcttaggttggcccacatcacagccaaatcagtccaagcattagctttgtgggcaccaatccacaatggctggtgaaggaaagtgcacagcatttaatgtagtacttccagttttatctcttgtactagtttcctggaacttctgtaacaaattaccccaaacatggtgacttacaacaacagaaatatattctctcacagtttcggagggcagaagttgaaattaaggcatcaacagggatgtcctctctctaaagcctccacagtagactccttccttgccttttccagcttttggtggttccaggcattgctcgccttgtggttgcatctctccaatctctgccttcatttttgtatggccttttcttttgtgtgcatgtcttctcttgtatctcatataagaataattgtcattgaatttagggcccacctacgtaatccaagatgatctaatctcaaaatccttaattaaattacatttgcaaagagtctttccccaaataaggtcatattcacagggccgagggattaggaaatggtattttatatggagccaccattcaacccactacactcatattggtcactcacattgagaatcagatgttttgtgatgatattacattaagttgacattaatttccctttacgtattttgtgagtttatggtaacatccctgtgaataactaaccagaattaaaaagtgctstgtaaactctatacaacattagatatagaaaattattttcatgcctattgcattataaagctcttgaagcctaatactagcatgccttttattaaaagtaagagagactataactgtaaaataattaattctaacttgtagtttctatctgttgtattttatattacttgcttcaataattttttaagattctggaggtttacctacatgcttatatgccatccttctccctaatcttctccctaatcttaaaaataggttttatgtaatgagaaacattgtagaatagaaagcacatattcttggtttgcatagagacaaaagaaatctgacttcctctaatgacaagtcaatttattattttatgtatatatatatgtgtgttcgtattttaataaataaatgtgttgtttcatatatttaaaatatatatttatatttttttacatgtaaatgaatgaaatggcatatatatgctatcatactgtgttttgaatatatttctgttatttacaaataacatttatttacaatattcatttctatggtatttatttgtcattcctctccttcaagtcttcttagtggtgtttcagtactcaaaaatgagggcatccagcctggccaatatggtgaaaccccttctctactaaaaatacaaaaattagccaggtgtggtggcacacacctgtagtcacagctactcaggaggctgaggcaggagaatcgattgaacctgggaggcggaggttgcaatgagccaagatcaggccacagcactccagcctgggcagcagagtgagactctgtcaaacaaaacaccaaaatgagcacagacatcttacgaagtatctctttgaaggatactgtcaaatttttatcccacagaaagtcagtttagttaatactatgtaagtttatcttaagttagtctatggaagtgtgaagtatctgaggtgtcaaacaataaccaaaatggatagctatcatagaacacaattccggcatatcgctgtaatttgtggagcagcaatttttttgttcactgaaatcttttaaaatactttctaaaaactattgcactttactcatagtctgtgtcattgtttctcagcttttacagagagaaaccagacatcagagaggaaatggtttatccatgctataatcactgtatttgcaatcatctgtttttaatcttttccacatcaggatcacataaggaaagggaaagtttccatctcttcctgattctagcgtgaagtgaaccatctaaaaatagcctcactgttacctcatgtatttcccttttcattttaccccaaaatccacacatcactggtcatacccttgagtcatgtttgtaaacactagaaagctctttcttttctttgccctcacgcaattgctccacaatgtgaacttttggtttattttgatgttgaataatcacgagtgaataattgtgaacagtgctggacaagaaataacaagctgattaatttagctgaatagagggaaaaaaagaagagattggtgataaaagctttctcaagtttcaaacaagaaattatttacatacatatgggattttcagtgaaatgtaattgtatttatcataatagtttatgaagcaaatgctttcatatacattaaatcctttgttctcctagatttttattcataagtggtgttgagagagttgatcaacataaaattcatgacattccagaagcaaaaagagcagtgaaagttcaatgaaaagtgtatttttctctgaatgtaagcctgtatgataaagtacttgttttcttctaatgtaaactactgaggtctttatacattttatcatttaatcctctcagcaatcctatgagaaaggcgatggtattagctttattttacagaggtagaaaaatgaattgctgagaaataagaaacagatgaaatagagatgagatgggattgggagcctgctatgtcagggatagtgaataatctagtctgtgtttgttcgttcctcattatctctgcgttgcctgtaggggagtatcactgtacactgcagccaccaaaaataatttgtttcttgttgagctgtggtgtctaattagtttgtctcaggtcatccagctagcaagttttagggtgtctgtcttagagctgggcctttcacgctgcacaacccaggcccacaatcgtgcagcaccttcctgcctttatcatacttttctataatatctatttatcttttctgttgatttataaactccaaatcttcaaggacagcctatctcttatgcttagaacataactcactgataattgttggctgaattaacaaatactctgaggaaattgtccaggtgtactgcaaagtctcaccttgtattttttcctggcatttatcacagttttaagcacaaagggttatttgattgctatctctcgcccaacaggctataaatcccataacaacaaaaaccatgaatgttttactcactgttatgtccccacttctaacatggaacctagtcgaccactattgattgctgtggaatggatcaacgagatgacaagagtagttaaaaagaacttaagattctagtgacagtatccccaaaacttcccctttccaggaattttcctctctaatgttcttatctctcttccctttctttatcctcttttgttttccttacttttttccttccatctcttttcttctctttactggcatttatttattaaacatttgcatagcacttaatatgtagtaagcactgttttaagcactgtaaagtattaatttatttaattctaatagcaaccctatgagataggtattatttatatcatccacattttaaatctgagatggaaacattgacttaagaaacatgtccaaggccatggagcttgcatttggactcaggcatctggtcccagaatctgtgcttctcccactatgatattctgcttcttatttattctgctctccctgaagatgcacataatggaaatgaggtctcttcactgcatctctccatattgatttatgttctccagtttaaatttaattttgggggtgcttaccccagtgagttagcctgctttggtgcagagacaaaccaacctcgaatctccgtagctgactgcgaacacgtatttcttggccacttacatgccagcagtcgtaaatcacccgtggaggctctgttctatttctcttctcattctggcgggaatgtataaccagcttaccaggaagggagctaatacatggaaaccatcatacaatttgccacgaccattaactaagcccttggtacatctgtacagtcctctcttggccgttacatgtaatagcaatgctctgaggccaaaggttcaacttctgttcacaaaaagaagacaaaaagctgattcagagtaactcaaatatttttgtatacataaaatgaatgaagttttggctggtactttttaacactttggtggagatgatacaggtaaaaatccagtaacaggattcttctctgcatcatcagattccttttttactcctaaggkttaaaaaaactttcacatggttataaattctctgaacccataattttttttctctagcagcttcttcaacataattttgctcagttcagtttatcaataatttttcaaatgcctgctgtggagctagccttgtgccaagaattaacataacaatagtgagtttgttttcaatttctttgaaattaatgaacttcctgagaacagggtcgtgattcatcctagcaaggagtacattgctggcacayagtaganacstagtgaacactgaattatggtcagaccaactgaatcaatgaaaactgaaaatttccaaattcatctttccatctttcccataggaacttctacttgcagaaaagtgggctaaaatgaacaagctcccctttccaaagattgatccttatgtgtttgatcgggaagggctgaaggagtgctatgtctttaaacccaagaatcctgatatggagaaagattgcccaaccatcatccactttgttctggccaacatcaacttcagaaagtacarggctccaggtaagtagggagtaagctgtattccataaaatagaaattaagtaggggacgaaactgacattaaactgtttcactctgtcactgctgtaccagctattacactattgaatgcttcccttaccttgataaatagatactattctgagacctcaagtacttctcctctttcttaccccaagatcccctgacttgctcacagttcagaaactgcaaagtcaacaaccagtttagcaaaaatctctgggactttacttcaatactttgaattatgtttgttctgattgatttttaatcaaatattttgactatcacccttgtaagaaagcccttatttcagaaaaatcatgcaaatttctgggaattttacgtgactacaagattaacgtaatctagcagtacacaatggctagcagtttcagtttgccatgttgtatttcatagaaaacaagaatcaagtttgaggcatagtcttttttgttttgttttatttttttaaccatatccagaggggtctctcgactcttgtgtatcctggaaaatgttgattaaccaaaggagatctaaagatttacatgcagggtgcttaaggctccaaaaaccatattttaggaccagaaaatgtgttttccattttataaatggaaagacacaaaaaatagggaggatgagtaatgggaatatgctgagaaaaatggtgtttttctagatttctcaggaagacaaagaaagaattgataggagtgaagattattgtgaagcatatagttcagcataggagaaggtggaaatctgacatttttagttatcasacactagagcacatgaaacccagtgaattttctatcactgtgaattctcaaggagaggctcactgagcagttggcatgtgtaggggatttccatggcataaagacagccacataatgttttagtttgggttctcccagaaactaattctgagaaaaggactcaagtgcaaatagtttatttagatgagctggggaacactctagtttattagtaaggaaatggggaagtggtaaagggaaggaaggcagacaacaaagttgcattagcaagccggctaccacaatgggaacttgatctgctgggaaagactacaaaatggaatagacctgtgtcccacaatcatgcttcccacacgcacaccaaaaggcaggggaatggagtatttagatactaactccctagagtctttggttgaccactgcctggggaacagtgttatttaacagaatttccagcctgctgtgagtgggtcaagcaggcttctacagttgcagggcaggatagaaagccctccggcacacagatgtcagatattggcagttggatgtcatctggccagaacacacagacacgataaaagtcagagatgctacagagtacctggctctgtggggactcccactgctgtctttatgtctgtatgttttattccttgggttttagagatattttgtagttttcaaaataacaccctttgtgactcttctggtatttaggtgttccaagggaaactgaggaagagaaagaaatcgctgactttgatatttttgatgacccagaatcaccattttcaaccttcaattttcaatatccaaatcaagcattcaaaagactacatgatcttatgcacttcaatactctgaacaacattgatgtaagtatctcctatggccattgactatgtcaaatgacttccataccgtataaatacaccaatacctcttttcaattaaaaataaaaaaataagtgttatgaatgacaccacccaaaatatgccactttacttttcatgaaatattttgctaatcttcagaagaaccctacaaaactgacaaataaggaaactcattttatgctattattttattgaatgattggttaatactcagtttctttcccgaagtatctatrtatttattatatgatataacaaattataagtaaggaagaaaagtgatgaaaaggaaatatgagtaaaggaaatatgagtatgaaagtgaatggaaccagaagtgtagttaatctgcaaaaatataacatgaattttaataaatacatttatgattttacatattttctttttgtgaatttgagagcagcatcacaaaacgtaacagcatttccytttttttttttttttttttttgagatggagtctcgctctgtcgcccaggctggagtgcagtggcgcaatgtcggctcactgcaagctccgcctcccaggttcacgccattctcctgcctcagcctcccgagtagctgggactacaggcgcctgccaccacgcccggctaatttttttgtgtttgtagtgaagacggggtttcaccgtgttagtctccatctcctgacctcgttacccgcccgcytcggccttcctaagtgctgggattacaggcgtgagccaccgcacccggccagcctttccaatttttagcctttgagatgtcaagtatgctttgctttagaaacaaatcattgtcttcagtatcaatccttcctatcattagtgtatcttctgctaagattctgtgtctaggtgaaattctttcatttttaacttaccatataggaacactattctgtaactgaaatcattgacttgtggttccaaatcatagtgtctgacaaatgattatcagttgtaaaagcttaagttcagtggcctaattggattttgtacattagaaaaacagaaaaaaagaaattaaatggagaaggaaaggcatcatgtctgatttaccagtctttttggtgactgtgtaaatggcgcaaaggaattcagaatatgtgaatgagtgttctgtttatatgggctctaattagattttgtgagctaatagaactccacacatctagtttgcttgcttgtttcgtttggcctgagactagtaatatcaactgtatgcaatcatcacagttgcaccataatatatttgttaattaatatctttttgtaaatgtgtaaaattttccccaataagccttgattcttacaactctaaaattctttttttcagccttcatttacaaatagatgataattcatctaaaaatgcttatcaaaatatatagcatatgtcattttctccatagatttgtttcctttttagaaaaaatatttcaagcagtggacatctgaaatccacgtgatacattatctctatggtgatggcaaaaattgaaaggttaagagaaaaaatgattaatctctgatttgtagggagtgaacataaattctcaaaatagagttagttgcattttataaaacctcatgctactaaaacagaggtaagaattaatatcacagtcaccctagttttccagtatgagccaataaactcaaaactacacattccttgggatgaattgtattaaatttgataagtctttctcaaatggaaaaaacagattgtaggaatatacaaataccatgttggacttgggagtagatatacatatgtgtatcttaaccaaatacatttgtcttgctgttctagtttatataaagtctgctaaacaatttgcaataaggaatgatacagttttatttatatattttacaaacattcttcaaagtagtttgtttgacacatagatgtaaaagttagtgcctgaacaaaaatagactgaatcccagaacaactgtcccgacctatacacctcatcaaatgttgattcttcagaaaccattaatttagcagttttaaaaatatgttttcactttttattgttataaaatatacaaaatataaaatttatcattttaaccatttttaagtgtacagtttagtggcattaagtacattgcattatcgtgcaaccaaccccaccatctatctccagaacattttacatcctcccaaactaaaactctgtaaccattaactagtaagtccccatttcccctgcatttttagtaacaataccatcaggtttttataagaagattgataaattcattaaaaaataatatgaaagtgaaaaggaccaaagtaggctaactcatcttgaagaaagaaagcgaagttagaagacttactttaccaaatagaaagacagcaagataacataattaagaaaacatgacattgtccaaggacagacagtagcactaaataaaatcgtccttgaataaattgtgactatctgtaataaaaaaagtgatcagatgattattcacaaaggaaaaaattaaatgtacctctttcacattatcaacaaagccaatatcagatagactgtagatctgagtataaaagtaaacaaagcttctagaatacaacacaggggagtatctttatgactttgaccctgggaaatattctttaaacttgacgctaaaagcattagccataaagggcaatctttcctgtatctccaagtcctttagttctgagaattaagcagtttttaattgcttctgctacagtttctggcacagcatgtacagacaaggtcatgggcgttatatcgtctttaaatctcttacatgtgactttgaataagctgcttaaactttttgagcctccacttcctcgtctctgaaacaggtgtggtaggatctataataattgtagtagtgaatgtttaattgggtgatgcatgattacagaagctgctcaataaatgagaaccttacctatacatgtccttatcttgtacccctgaaggtccatggggattacacccaaagacctttgcaaatgcctcaggttaacaacatagacaagtttgtacaggtaatgccagcttaggcagtcagtatatattttctgaatgaacaaatgaaggtaggctttttcctgaattatatgaacattgagactcatgttcaagtaactcctctttgtgtgtgtgtgtgcgtgtgtgtgtgtgtgtgtgtttcataaacagataaaattttcagttttcactgacattttatcttgccttagtgactcccttcttctccactttaagaaaacacatttttggggccgggcgccgtggttcacgcctataatcccagcactttgggaggctgaggcgggcagatcaccaggtcaggagatcaagaccatcccggctaacacggtgaaaccccgtctctactaaaaatacaaaaaagcaaaattagctgggcgtggtggcaggtgcctgtagtcccagctactagggaggctgaggcaggagaatggtgtgaaccagggaggtggagcttgcagtgagccaagatcgcaccattgcacttcagcctgggtgacagagcaagagtctgtctcaaaaaaaaaaaaaaagaaaaagaaaagaaaagaaaacacatttctatcagaatcacaattttgtaaatgatgttacttaaagagcaacaaaactctgctgaattagctaactctctcgttcccacaccatttgaatagagtagggtaccgattcacacttcggcaacacagcatatgtttactgctgtagaccatcagagttctttgtaaacggtggatggacattgtgaatataaactcttacaatgcaaagttacctctctgccaattacatagacaacagttttcaactttgcaactgtgaccactgtggcttagggcaacgtttcctcttcaattcactctgacctcaatttttgctctgaagaggccatgctgtgtcagccagctgcaccctcctattgcttcattttatcaagagattctagcttgcctgctttgccaaagctaaatttcagtttatctttagaggacttctgctctgtttctgctcacgtcatgacagcggcctgggtttctcatagcatcaggtttctgctcttactcaattctcccaaattccttttcactgaacattgtctcaatgcttgtacaattacagtagtatttcaattttttttccttcaaaaacttaacgtatagtgacttacactggtagacatgtgatggcggcggggcgggggtgggatgcagaggcattggagtctgaccaaattgggtattcaaatccttgctctgcggcctcttggctgggtgacattgggcatattggttaacctttctaaattttgctttcctattttgtaaagggaaacgatggtatatatcatgtaggatcaggatggggattaagtagaataatataacttaagggcttggcatgaaatagacagtaaattgaagcagctaatataattattagtgttcatagtttttggcttttaattataaaccccttaagaacagtgacttgctttatttaccttgtattctgtagacatactgatcacaatgcctgacacctaaagtaaatatgcagtacaattttcatgatgggtgtttaaaatttcattgacttactgtgggtagcaagtgtcaggatacaaggtgctcttggtgggatggaggcagagttcccaaccatggggaatttgtatatagtacatgcctgcccacgtagtatggctgcatactctatctactcttaaaccatcacttcgatctggagggaatatgtcttctgagatttcttttctaggacctgttaatttgctatcacaggaaaatatatggtttcccagtctcacttattcaaattattaatttgataggcatagtcttagaaccagttatgtgtcacattattcagcatatgccaatgatgcaaagtaatgagcttttttctttcttaaataattctacaaagtgctaaacattaaatgttaattaaaatgaggatacatccatatccagaaatactggtactcatttcttaattcattaattcattgatatttcttcatcttgataagggtgtgtaggtacaagtaaaagttctatcttttaaaaataatttataagcttactattatgtattattgcctaatatattagtccataactcatctatttttaatgctgcctatgatctctttctggtctcatttatttattaattcaatacatatttattgtttagtgtgccagaaactgttttagaaactaggggtacagcatggaaagaagaattaaaagttttgagtgcttcatataagccaaatattttcccccaaatatttaacactcaagactagcctatgaggtggggttttaatttataagttaggaaatggagtcatggattacttaggcaggttactggaagtcacgatgatgtgggggagctgagatgaggctgcatgtcttttctccttcattccttacttttgaaccacctgtctctcaagcagccttatttcttagtgttccccaaacacagccttcattctagccaggccagaatgaattcccagatgtctctgacgaatgccacagcctcccatcctcagycttttcatatggttattcttctacagagaatgcccagtcttctgctccacttaaaaaccctgcctgtcctttaactcaactggtctcactgttcctctgaactgaatgctgccctgtgtcaatcaacctctagtgagcaccttctgtgtatttattaattttgcaaatatttattatgtaccttccatgttctaagcgctcggataaaaaaaaatgcaagcctgatgaactttctgccttcctgacatttcagtttttattgaaaaggcaggcattatccagcaaattcacagtaattttacacctaaatatcttctcatgttctcctatatttgtaatttttacttctctaacaaaatatacttaactttctctcttgggcttattttttattttctgttgtgataactcaatatttgtttgtagattgcttataatctcacctctacaaatttgtttcttatgtggaagggggatcacattttacatgcttgtttttcttattctctgctttcattagcaaagatttaagagatctggttcaacaataggaggctactgaatggcacaagtgaaagatgacatgggataggtggtgaggctggagaaggttgagatatgagggcttttgctgggataacactgaagggaaggatttggaatcccaatgaatttcagggaagaatgaaagagatacaaacaccatttaagatgacttcttgtataataatgaaaagaaaggtttaaatttaacataatgcctttttgaatatatgtagttgtatcatgtaggatgccaaaaggtttgaatttagtaactgatctaatactgggcttgattttttctatcacagaactgtaactcccaagaacagggtattttccgcagtaatgtgaaaaacctggttaatggtttcatggtgttaatatgccacctagtggatcaacttgcacattctaacttggggttttcagagttggaagtgttcattttcctttatcagaatggcttgctcactaggaacaccagctgaggtccaattacgataaatccactagttcctgatgttgatattgctgattttttttatgctcaagaattcattatgagggaattgatagcagcaatcattgtcagtttaatgttttgtatggtcttttttattttaaagctttttaggtgtttagaaagcaaatagttggtttttattttatttggacacttttatgcaatgagggttgatgtttcatggatttctgtgagaaggagaaaccaattgataaatttgctgatatagatctctagaaaggcagggagatttttaaaagaagatgtagtaggatactttgaatagcagaaacgatttgctgacttacacaatataataagctcattcttggctacacacctggtgtgtttatttcttataaactttatagcttcacttctaatttagagttcccaattttcatcacatattgtcagtttaaaaataacaagcgtaacagctgttgtagaatgtttatgtaccaggtattgtgccaagcactttatagaaatgatctccaatccccacaaaaccccaaattagtacattatttccattttaaagaagaagaaatgggctcaagtattgacactaattsccctccatctcacacagccaagaagtgtttgtgcctggtagcctttggtccaagtctccttcatagatctgaagcatcttttgtcatcacagaattatgtttccctattcttaagaaaagtgggatcagcaaatatcagctttaccttaacggactcattcacgtttgagcccatttcccgagaagataattacatatattacgttttaaaataaggcatataaaagaaccacattcctgtgatagctccctttttccaaaatctgactgcgtttttaaagttactattagagaatagagagccttgcttgttgggtgtctgggacataaagtcacagaaaaataattgcatgtttgcaccatttagatctcacatgtttaagtggtgcaaacatgatctccttcaggcaatgagccatgcttgcccagtgagcttgcacgtggtaatgggagaatccctctgagcatgcatctccaaggccaagtgggccacagcagttgtgagtgagaggaggccatagcgtcctaaactgatcagacttgccaagtattcctacctgtggcaaggggctgaaaagcccgtggactgtaccttaatgttgcttaacaatccctgaggtagagaataaaaggaattgtggaataactctgtgacttgcctcggtttcctgatgcccagaaacatctatctcattggtcatcgagatgaaatgaggactgtcctgggaaatggagtcttcctgattttaacaaggttctgaagcagaagcagagacaagatttactattcaggccttcttccaaagcccatttccactgctcttcaataactgcatctaccaaattctgaatgttctcttctttccccaaattctaactaggttaacttcataccaaaaccagtgtatgacagttgaaatagcagttcttagaggttgtagtttcctgtgttttcttctggttaccattaacatgggtatatgtaaagaatatatattggatatatgtatgctgaataaaaagtagtaattcattttcaccaatgaaatcacagagcatgatgtttcctagatagaggaggctcatgttttataactgtattgtttcagttgaggaaggaaggcaattctccagcaatgccttcttcctccactaggaaaagcttttactttcctggtggtctttttctacttgcccactaattataaagaacataaattatagatttagtaattacttgtttcttccctgttatcccccttttggcaaagagcagaaccaayataaytttaccatgctaccactttattcccaaatttatcagcataaaatctagaacatttccagaatccttctttccctggtgagggaaggaacagtagctgaatataagcttaacaagagtgcagtggtgggatgttgaatttaaatgtgtatgcatgactcgtagatttctattcatatatgtcaaaaggaatactctaataaaaagattcatttgatttttattttaataaaaaatatataaatgagttcatagcagcgctaattatacaacttctgtctctatttgcaggtgataaaagaagccatggttgaaagcattgaatatagaagacagaatccatctcgttgctctgtttcccttagtaatgttgaggcaagaagatttttcaacaaggagtttctaagtaaacccaaagcatagttcatgtactggaaatggcagcagtttctgatgctgaggcagtttgcaatcccatgacaactggatttaaaagtacagtacagatagtcgtactgatcatgagagactggctgatactcaaagttgcagttacttagctgcatkagaataatactattataagttaggttgacaaatgatgttgattatgtaaggatatacttagctacattttcagtcagtatgaacttcctgatacaaatgtagggatatatactgtatttttaaacatttctcaccaactttcttatgtgtgttctttttaaaaattttttttcttttaaaatatttaacagttcaatctcaataagacctcgcattatgtatgaatgttattcactgactagatttattcataccatgagacaacactatttttatttatatatgcatatatatacatacatgaaataaatacatcaatataaaaataagcatgagataactgagttttttgttaatttttaatgagatattggactattgctatgaaagattctcatattcactgctttcaaacgcaaaagttgttcatcctaaactcaagtgtgaaacttttaatttaatttaattaattaattaatttttttgtgagacagagtctcactctgtcacctaggctggagtgcagtggtgtgatcttggctcaccacaagctccgcctcccaggttcaagcgattcccctgcctcagcctcccgagtagctgggactacaggtgcccgccaccacacccagccaatttttagatttttagtacagacggggtttcactatgttggccaggctggtctcaaactcctgacctcttgatctgcccgccccagcctcccaaagcgctgggattacaggtgtgagccaccgcgcctggctgaaacttttaattttaaatcataggttttttttctgaaagatgaatatataattttttcagaaaatggtatatgtttattcattaagtagaaaatatatgtgtaaccacttctaatgtaacatttcccttggctaatattatcctggactgcttatccaacaaccagtgtagttgacctcagagaataatccaaaaaagtggtaagggctgaatcaagcttaataagtggcctacctcttgcatctgcaagatttgtcttgggaacactgtatgacacaactgtggctgcagttgcagctgaactgttatggttcagaatgttccaaagctcaggtcttcctcttcttaactgtctgccattcttctttccttgaattatctttctttaagctctttattcatttttctttttatcctctcacctttcacttttctgcctatgaggaaagacaaaaaacaataaaaggaagccttgaacgttcattctattgttcattgatttatgcctatggcaaatgagtgcctactgcatgctgtcaagcatgttgcaggatcccaggatctaggggcacaaaagtagaaaaaacggaccgaagtgcctgcctaaggaccttgcattctggtggagatgaccaaagatgataaacatgacacagacatatgttgaatgttagagagtgataagtgctaagaagaaaaagcaggaaaaagaggagatgggatgtgttagaggtgtgtaattttacagggggtcctagagaaggccataatatgaaggtgacatcgcagcaaagaggtgaagagctgagggagcaagacctgaggctatccaayggagaagcactgcgggcagaggaaataacaaatcaaagttccctgaggtagagcaccaagcatattccggaaacagagaagggaccaacgtgcctaaggcagagtgggaggtgtacaattaattttctcttatttgttcaaactttggcaatattgtttgcatttgatttatccttccaaatacctctgtaaagaaacaagaccagagaggttaagaaatatgtccaagatgactaaattctgaaccaggtccctatgctgttgaccctatggcctgtatatcaccatctatggtgccctctagaaacaaattagatgaacacttcagtgacagtcattataaagctgggaccaactaggacacttgctttccctttgttcacatgcttttagtttcttaactacaataacagaggcttttcatctaattcagctttgccattttttcatttatgaatttactagaattctgattttataaaaacacacattgggtggccagttaaatctgtacattttttttttattatttctttgttccaaagaatgactgacaagtgagatgtccccttagtcttccccaaaatgatcaacgtgccctagtaatttcggcttggctctttgcctttttcacgcaagcacaagtgttctagtttgttcattgttcacgccatgacagggctgctactttacctcatccatgaacaagctgtgcaatttcagggttttttttgttttttgataagcaatgaaagcaacaaaataaaagcttggtgtgtgtatgtatatatctaatttcatttcttctgaagtatacaattttaaacttttcatgaatacctttgttctaacatggaaaacactttataaaagtttcaacagtagttcctctttctttttcctttccccttctctttacctccttaaacaatttaatcccaaagccatgggaatcaatggggaatcaaagtcagacaccaaaacctgagatgggagggcatccatgcagaggaaggtgtggcacagacagtgcagcttgcttacacatgggggaaccaatgaagtaattaaatatatgaaatataataaatataatgagtgccagttttctcactggaatggagttacaaatatgaaaatgaagaaaaacagaaggttgtgtggtgttaagttgaagtaggaggtattagtatgaattcacgggttttagtataagtagagatatatagaataaacagacatgaaagtgggtgtgtgtagagattctgtacgtctgtcactgagaggatctgggagcagtgatactcccaatagcaatgagcacagctggacacagcagttggctttcaaatcccatcatataacaacagaaacctaggatcctcaaggaagtggctgattctaggtcggacagaacaagtataaaatgatgctagaccattttattttgccacagtacagaagtgctcaaagaatgataaggacatgtcaaaaagacacataagccagcttgaagggacacctactggctctttttggaaaaaattaaacattcaaataaataatgttggcaacagattatgatccattgaataatataggaaacaatgacctcatttgatgtaaatagataaatagattaataaggaaccagatatttacataatctcaaaatacttcctcttataaaatacttaattacaaagggaaaaaagtaactttgtagtagagaaacctggcagactaagtaatcaaaactggtgttctcaaaagtgaggcaaaccgaaattgccccacttggtagaatgcaaagagaatgtagcattgcttctgtgataatcctgccatagatgcagcacctgaatctaatcacgaagaagtgacaggcaaactcaaattgcaagaaatgtcaagtatagccatctgtcatcttcaaaatggtaaagattaggcaagtcaaggaaagacagaactgttccagactgaagaagactaaagaaacatgacaactgaaagcaacatgggattctgacctgaattcttccattcatgtttcaccaactgttccactgacagataaaagatgccagcagaacaactggtgaaatatgaatgcgctctgaagagttggtcatagtaatgtatcaatgctaatatcctgatgtgatgcttatattgtggataggtagcagattatccttatctgtagtaagcacacattaaactattcagggtgatggaacttcatgttagtaacttattcctaaatggctcagagaagaaaaacatctctcctatcacatttgcaacttttctgtaagctccacagtgtttcatactgttaaaaattacttaaaattagcaacagaatttcagttggaggattctctgaacaaattaaaggagtttacatcagtggctcccatttcatatccatactcttttaactcttttttctacagctgatcaatgtaaatcctactatttatatatttaataaaaacaaataaagaaaataaatcacaagctaaaaattccacagagctgctttcaccaaatagtttaagggttagagttttgtgacatcctagtgatttttatatttcttctattactgtactaccaaattaaaaatccaattaattaacgccacctttcgctgtataagcataagagcgaaacaaggaatagccaataataaaaatgtggcgaatagaagagttgcattttggttgaattctctaaacactacagatcagtaagcatctattgtgtcttatacatgtaagatgccacacttgattctggagagaaactgtagcaggtactgctgttgttctgtccagatccccttttcctggtcagacactcatctccaagctgctgtgagtattggctgctaaaagtctacagctgcattcttattctgagaattgttctcagctgatgagatatggttggttttgccttcctcctgaggaaagctgcaaccagtgactaactgatgaggggttacaaagagctctgaatgcctgtaatgtgtatttattataaataaggataattctgtgatgtttttcatgctcaagagttttccctgggatcaggctgagataagacttcaactaaacccatttctttactgaggttttctccctcttttatctttcttcactcctcatcaggttcatcatcgcacactccttcaacgtattacatgagaacctttatctcagtctttttctatagaacctgacctaagatagataccaaaatacatgagacttgattcttctttcaaagagtttacaaactgagtcattacaactggggtaattatgggaagttttcatggagaattagcttttaggctgagtattaaaagataagtagaaattcaaataggatttaggaggcaggtgatttctctcctggagtgagcttattacctccttgttgtggattctatattcttcaatgcattttaatattactttaggatttgtttggcatccatccactggcatacattatattcaagaactcttaaaacctcaaaatattttggaaagtaatttaaaaatatatgttgaaacaagctaactctaaccagatgaaatttaacaggaacaaatggagaaccctgtactagaattcaatacaccaatagtaaagagggaaagaagatgtagaacattaaaattttaaggtaggcattgtctagaatgtccaagaaaaaaatgactcctagagggctagcaacaatgtcttaaatccactcaaaaaacttttattaagattatgctttgtattaggcatttatatgggaaccatttcacagcacagatggtagagctattatagttgtcttcaaatagtctcagcttggaatgaaaaacatatcacgcaagttgccactctcccttccagaattcctggcaaatacagccactgaatcatttatttttcattgatgaatctggatgtagttttagattcctgctcagccatgtgccccacgtcagtcataccaattgattggaattggcagaaatagaaaatcatgactaggtttctagtggaagaggaataaggcactgcgtgagtccaaataaggaagaggtttctaccaactagattgtttaaaaatgaaataaaatccgtgatgcaaataaatttttatcactgtggttattcacatattcacagaagatgagttcgggggattcatttattggtgagtagtaggggccagtttagatggttccatggtactttattactcagagtatataagctgtggcactgtttctattttagatgaggatttttgctaatatatgataataaacctatggtgatattttaaattggataactagttggagagggaaatattttagggaagattcaattattgctgtgctaaaactcattatgtaaattattgtctgaacctcttgaatattttgcctgctgcaaacaaagcagtttttaataataatcccttttccccagtgttttagtgtgagctaatttcctcttactctaaactgagtgaatacaaacacgatggcaaatatgactacatatggaaaacactatgaacataccatggctaacatatagtatgtttaaacataccatggcttacaaggcccttcacatccattgcctagtctacttttagtctgatttcctttcatcacttccccactcaccctaaa

SEQ ID NO: 96057 - DNA, 35464 bp, Homo sapiens
  misc_feature (1)...(35464): n = A,T,C or G
ccaccgtggaggcctgtaaaacacggaggcctgggcctccctgctggccctcagacacagagcctctggcaggaagtccagcatgatcagtctgaaagaaggctgagaaccactcccccagacagaacatctttctgtcagtctcactccaaaacagtcaccaagtcctgtggcttctacctactgaattccacggcatttatttagaataggtcattctccagcatgatacgaaagtcaactcttaaaacaaggtagaccaagcatggtggctcatgcctataatcccagcactttgggaggccaaggcaggagggttgcttcaggccaagagtttgagaccagcctgggcaacttagtgagactccacctctaactaaaagagaaaacaaaaagaataatcagaggaaatttcccttcctatcatcacctcccagttactggccagcctgcctccattttaacctccttcagtccttcctcctcagccggagtcaatgttccaaactgccagagtctggctgtgttatttccctgcctaagcctctcggtggcccctcatcactcccaggaaaaagtgcatgctccttagcaaagcacatgaggtccccgccccaccccaatctgggtcctgcctacttctagctctacgtcttccccacaccccgctatacctacacaatccacaaaaacacaactctaagctaccaacagaccctctgcctggattcctttgttgcccctctgggaaggcttcctggactagacctggctggattaattgggtgcccccttctcaaggcacccagagcacctcctgcttatctccagcactggattaaccacaggtgatttttgacaaaggtgtcaaggtaaagatagctttctcgacaaatggtactagaaaagtggatatctagatctatatctaaaaatgagccttggccgggcacggtggctcacgcctgtaatctcagcactttgggaggccaaggccagtggatcacttgaggccaggagttcgagaccagcctggccaacatgttgaaaccctgtctctactaaaaatacaaaagttagctaggtgttgtggcgggtgcctgtaatcccagctactcaggaggctgaggcaggagaatcacttgaacccaggaggcggaggttgcagtgagccgagatcatgcaactgcactccagcctgggcaacagagcgagactccatcttttttttttttttttttaattgataattcttgggtgtttctcgcagagggggatttggcagggtcacaggacaatagtggagggaaggtcagcagataaacaagtgaacaaaggtctctggttttcctaggcagagggccctgccgccttccgcagtgtgtgtgtccctgggtacttgagattagggagtggtgatgactctcaacgagcatgctgccttcaagcatctgtttaacaaagcacatcttgccccgcccttaatccattcaaccctgagtggacacagcacatgtttcagagagcacagggttgggggtaaggtcacagatcaacaggatcccaaggcagaagaatttttcttagtacagaacaaaatgaaaagtctcccatgtctacctctttctacacagacacggcaaccatccgatttctcaatcttttccccacctttcccccttttctattccacaaaaccgccattgtcatcatggcccgttctcaatgagctgttgggtacacctcccagacggggtggtggccgggcagaggggctcctcacttcccagtaggggcggccgggcagaggcgcccctcacgtcccggacggggcggctggccgggcggggggccgaccccccccacctccctcccggacggggcggctggccgggcagagggctgacccccacctccctcccggacggggcggctggccgggcagaggggctcctcacttcccagtaggggcagccgggccgggcagaggcgctcctcacctcccggacggggcggcggggcagtggcgctccccacatctcagacgatgggcggccgggcagagacgctcctcacttcctagacgggatggcggccgggaggaggcgctcctcacttcccagactgggcagccgggcagagacgctcctcacatcccagacgatgggcggccaggcagagacgctcctcacttcccagacggggtggcggccgggcagaggctgcaatctcggctctttgggaggccaaggcaggcggctgggaggtggaggttgtagtgagctgagatcacgccaccgcactccagcctgggcaccattgagcactgagtgaacgagactccgtctgcaatcccggcacctcgggaggccgaggctggcggatcactcgcggttaggggctggggaccagcccggccaacacagcgaaaccccgtctccaccaaaaaaatacgaaaaccagtcaggcgtggcggcgcgctcctgcaatcgcagtcactcggcaggctgaggcgggagaatcaggcagcagtaccgtccagcttcagctcggcatcagagggagaccgtggggagagggagagggcgagggcgagggcgagggcgagggcgagggagagggagacaatgagactccatcttaaataaataaataaataaataagacccttgattcttacctcacaccacccataaagttagtttgagtgtatcatagacctaaacaaaaagccaaaactatacaattctagaagaaaatataggagaaaatatttgcaaccttaccttaaggtaggcaatcaaggaaaatgtttaataaattggacgctgtcacaattagaaactttggctctttgaaagataacattaggaaaatgaaaaaacaggtgggtgtggtggctcacacctgtattcccagcattttgggaagctgaggcagtaggatcacttgagcccaggagttcaagaccagcctgggcaacatagcgagatctcatctctactaaagataaaaaattgaaataaaaataattagccaggcatagtggcgtgtgcctatcatcccagctactcagaaggctgaggtgggaggatcacttgagcccaggagttcgagattgcatttagctacaattataccacygcactgcagcctgggagacagcatgagaccctgtctcatggaaaaaaagaaaatgaaaagacaaaccatagaatgctatgggctctcatgcattgctggtggtaatgtcaaatagtatgaccactttgaaaaacaatttcttaccatgctgccaggcgcagtggctcaaacctgtaatcccagcactttgggaggccaaggcggatggatcacaaggttaggagttcaagaccagcctgaccaacatggtgaaaccccatctctcccaaaatacaaaaattagttgggtgtggtggcgcaagcctgtaatcccagctactcaggagactgaggcaggagaatcacttgaacccaggagacggaggttgcagtgagccaagattgcaccactgcactccagcctgggcgacagagcgagactccatcccaaaaaaaaaaaaaaaaaaagtctgggtgtggtggctcacgcctgtaatcgcagcactttgggaggccgaggcggatggatcacgaggtcaggagatcgagaccatcctggctaacacagtgaaaccctgtctctgataaaaatacaaaaaaaatagccgggcttggtagcaggcgcctgtagtcccagctacatgggagtctgaggcaggagaatggcctgaacccgggaggcggagcttgcagtgagctgagatggtgccgctgcgctccagcctaggctacagagcaagactccgtctcaaaaaaattaattaattaattaattaaataaatttttttaaaaaaagactcaccatgcaaccaagccatcccgcctacttccaggcattttatccgagagaaatgaaacatatgtatattcaaaaaactttctaggaaggctcaagtcagttttattcacaatgccttcaaactggaaacaacccagacatccaacaacaaccccgcatcctcctttggggtcctgagagggtgcctccccaccagcccagcttggccaactttagtccatccatcaatgtccaaatggacaaacagcctgtggcatatccatacaatggaatactactcaccagtggtaaggagggaacttgatacacactttagtaaatacctgaaattttaggttgcttcagtatccattttgaatatagggttaacaatttcatactagaagcagggcttagtcaccttggatacagtttccagctctctgctggaaacagtatctcaacacattccgtccagatatctggtcctaggtagccacctcctggtaactgcctccttgtgggatgtatacatacaaccaactagactcaccccactgacgcccacaccctgcatggactatgcagatatgtctcagtgaccacccctaagtcacaaggtggccccacaggactccagttcgctcctctaggtgaaccaattagagctccccttgggaaaactgcttgagtaatgccctgcactccaataaaagcctcagcccacaggtccgtctctctctggctccccccacccccacaacgattgtgtacagtgtccccaagacattcccgacggccctcagtgtgccctcttcccctgtggatctgtaagtaataggaccacttctgttagttcctgtgtttcgttgtgttgcctgctctgtgtcatgcctgactgagacgctcaaacgtaacgttttccctggtcagggctttccctagagagcagctatcttggtaggaataaactagatacaggtcagacaagaagcacaaggagatctgccaggataaatatgtctcctgggagagggacacccggtcacaggtcagccaggatacagaggtgccccatgaaaggcccacggcaaacacccacgcccaaatcccaggagccctgtcagggcagagttggcctttacagtggctctccagggaggtctcaagaccaaggtagaggaaaatacaacacacacacgccacacgggcgacgctcagctgcatggtgccaagcgaagaaagccaggcacaaaagaccacacggtgaatggttctccttgcatgcaattgcgagagaggcaaagggcagtgacagaaatcagaggagcagttgtctggaaccagggcggaggggaggtgaggggttagctgcagaggggcaggagggtacttttgggaggagaggacttcttgaactcggggggagactagcctggtggtttcgcgtgtcagaagtcatggaactgagccgggcatggtggcggggcctgtggtcccagctgctcgggaggctgaggcaggaggatcgctggagcctagaagttcaaggctgcggtgagccgagatcgtgccaccgcactccagcctgggcgacagagaccctgtatctaaaaaataaaggaaaaaattcatggaactgtatacttccatgtactgtacttaaatttcctggtatttatcgtatgtatagaatacctcacatcttaataaagtcgtcgtttttagtgtgaggggtgctatggggcacggagggcgatccggctgccgaccctcggaggcggcgcgggagtgcgaggccggcggggaggtcgggtcctgcggcctcgccggggcccctgcagcgctctcccgccagggggcagcgtcgggccggcggcgcgggcgggaagttccagcggccgggacgcggtggtgccgtcttccccctgcggtgagggaccgcgtcgcgccaccccgctctcagcgcagcccgcagcggcgaggccaccgggtgggacacgggtgcccgcgcgtcgcgccgcagctcgcggggacctggcgccccgtcccgggaggggatctggcccccgggcgccggctctccgtccacgcggcgtcctccctgcagcccgctagggccgctcgcccgtcgccgcctgcggaacgcggaggggcagcacggccacgcccggccactcgaacctgctccccggcgccgcgtgaccgtgtcaggtccccgtcggcctcgccgtgccgaccccgggcgcctccacagtggctcggaggccgctgctgcccggatgcccgggttccacgaggctctcccagcccgacaagcccgccgatcccacgggcacgggcggaggagagggaaccgccgcgcccgccccgcgcgccgtcgccgaccccggtgggtcgcgcttccccgcgcacgccgcgctctggcgcggggagaggcccctcggggtccgcccgggtcagcgtcccgcgggggtggcggccgttcgctcagcctcctctcgacttccctttcctgtcagggctgctggggctgacaggctcccgggcaaccacgccggggaacccctcacgcccgccgatcgctgcggggctcagcagccgccccgtgcgctgagtcccctgtcatgagtgactccattgcgaggcgtttcgggccacgaagcaggaccgggggccgcactccgggtccccgccctgccctcgccgacctcccgcgcgtggaagggggacggcggcggcggagctccccgccacggagaaccccgaaatggtcatttcgaacgagaggagtgtggcctggggtgtctggtttaacagccccccgcgccgaaaggctgttcgccgaggaggggccgccggggagggagcccgagcgcggcggggcgagaccggtccccgcccggcgttgcccggcccgagggacggcggcgcccccaggaccctccccagcgcggccccagctcgctccgggaccgcggggccaggccgggcgggagcgcggggacgtacacggcggccccgcccgcgcgctcctcctccctcccggcccgccctgcgccggcggcggcggccccagtctccgcgctgctgaggcgcgcccggccgctcccacggcctcccctccgccctgcggtcccgccgcctccggggcctcctgggaccctggccctcgccgggcaggacgccgccagcgctgaaggcgcagcccggaggccgcgcgggtgagtcggtgcgcagccccagcggctccagaggagcgggtgcggggagggcgagcggaccaagtcggccgcgttcccaccttgcgcgcagccgggagaccagcaggcccagcctctagggaggagggcaggggagctgggggccgccccccgcattctcgcaggcacctgtccctaggccggggtccgctggctcgaagcactgacccgccccggacctagggggacggaggcagcggtgacatttgcccaggaagggcggcagtgggtaaactccactccagggcacgggtctgggcgcaggttgaggcctggggttgaatctgcttctgctagaggccagtgttctcagggaggcccataacccgactgggtctcagttccccctggtatgaaacagcaacagggcaagaggaggaaaccatgccacgctgcaaagctctgagcacgaagccgagaagaatctcggctcccggcctcgggggctgcacttcgggccaggcctgcactcccaggataagaggatggcctcctgccccaggggtggcatgggggcgcgcaaaaagcaaaggtgaccctgccagggagcacccagcgctccggttggtggtcatggggtctttgcgtgggactcacagtgtggccgggaaagttctgtaatgaggacatttctcatcattccttcttctcaaaagtcattcgtcagccccagacacctttgcctcggaaaactgagaactactttcaaaatcgtcaacacccccatctcctgctacagagcggagtccccactttgcagaggcgcactgcaaggtcgcgggtggttaaatggtgcgccctccttgatgaagatgccttgttctctttcactctctatgtgtgtttaatgttgtgtgttgcgttctctgtgaagcgaaggataaacacgggccctttcaggcaaccgaaggaagaaggcggccagcatcagatcttcccgtgcttcaaggtggagcaccctgcagggcttactgcagcgctcagggtcaaagtgaggatgcagtgcggcaccaaaaggcaaatgsactctggagagccactctcaccttgtacccctggagtagaccccgaggactggaggactggaacaagatcttagtcctgagggcgggagaagcagcctttggtggttgcacaggggcccggcttttcccgaagtcttaaagcctgctccaaatgccagattcagacaaaggggccgaaccttgggcccgccgccttctcccataagcggcaacccagcagctttgccaggaagtttacatgtgaaggtacggacctttcttggaatgagccacacctgatggccctgccactccggacggcgmtcrttcacggctgtccctggagcagacacggttctgcgcacacacctgggcgccggagaaacagggcacccaaagcgggcccaggccctcggactcagcgagctggacacgtgtccccatcacccgcggctggcgggagcagtgtttctactcccttccctcccctcctcccgccccgcagatgtgctgtctttcccggcctccccccgcgcccagcacagtggtttctgcttggctgttcccctgtctctgagatggtctctccctgctgcttgccctacacattctcccacacaggcgcgcgggatgcccctgtcggcgtggttgtcaatgcctgctcccctgccccccagtccaatctccacgactctgggccctgtcgcttcatcctaaagccttccgctcacgagccctcccgacgaccgacccccaggaggctactggagatgcaggatttggacccgtgctggacccgcacccggacagatccctctgaatgaatgaatgaattaatgagcaggctgcatcctgattaggttaaggtgggtggttgccatgcttggcgttggctctgtcccctgggataaaaggcgagaggcagccacatggacagctcctccagtggggtctcagactggagagacgccagcgggcgggggtcgttccctggagctcccgcatttgttatggtcgatgccccactacgttgtcaccttctccggaggacctcctgctctgtccttgacagatgggccccagtgggcccacccaggctggagatgaatctcaaagggactccatgcctgggagacctcagccaagcagggcagagaaataatcagacaacagtcagcgcatggcgcctgcagagttttgcacagggtccttcagaaggagggttagggaagacttcttgggggttagggcagttaagcaagatggataaagaaagcaaccacttatgtctgcatattttcttcatttcatcttcacaacagccctgagataggtacttgttttaaagctgaggtataaattggggttcagagagattgagtgctttcaccatgaacaagtgacagagagcaacgacttgaaccgggttacctgatgccaccgctggtcttaacctccatgttattagcgtattgggtaagtgaaaccgtgtgagccaagaagctggggtgagaaacagcacggaatagaggagagggctgcagaaaggcgtgatgtttctggagcaccgaattctactcacgaacacaggagtggaggcgggaaggggacactggaagctatggagggccttgtcagccacagtaaggaatgtggacctggtcctcagggtggtgaggggatggccccccatccagaggtttctcacaggggagtgattcggcctgtctctgccgcagtcagraggaaggatgcagtgagagagggaaagtggagaggcggatggcggtgcagtctmctccaggtcatgcttcttaccatctccctcattattcatccacagaaaatgattgctgttatatgacacactggttaacaaaggagggggctgtttgcaaacagaaacaaccaacccagggcctccagccatccaaagattctgcacagccagccacccctaaggctaagaaatcccaggtacatgcacaccagtcacagcatacctggactcagacaatgacagtggagaatgaggaacaagagctgggttcaaggaataattagcaagcaacgttggcattacgtagtgcagggacaaaggaggagggagatagcccgtgggattctggactaaattgggcaaatggtatgacatggttaggcttttgtgtccccgccccaatctcatcttgaattgtaatccccaagtgttgagggaaagacccggtgggagaggatcggatcatggggtggtttcccccacgctgttcttcggatagttagggagttctcatgagatctgatggttccataagcgtccgtcatttcctccactcacactctctcttgccaccttgtgaagaggtgcctgcttccccttccgctatgactgtaagtttcctgaaacttccccagcaatgtagaactgtgagtcaatgaaacctcttttatttagaaattgcccagtcttgggcagttctttatagcagtgtgagaatagattaacacagtaaattggtaccaggagtgtgggacactaatacatggtagtttcctcattgctgtagggagcatggggacagggctcattccagggaaggtgatgagttcttttgggctgccctgtgtttgaagcaggtacagaagcctaacgggcagtggagcagggcagtggagtcaaacagaccgggtccatcttccagctccaccaacttagtagtyccgttaccttttgcaaaaagcctgttcatttgtstgtaagacagggataagaataggttcatagaggctgaggtgggaggattgctagagcctgggaggcagaggttgcaatgagctgagatcatgccactgcgctccagcctgggtgacagagtgagaccctgtcttaaaaaacaaaaaaaaggatagggttatagacttcycataattaaataagataaggtacaaagcctggaaggtaatatgtatctaataaatggcagtgctagactgggcacggtggcacacgcctgtaatcccagcactttgggaggccgaggcaggtgggtcatgaggtaggagtttgagaccagcctggccaagatggtgaaaccccatctctactaaaaatacaaaaattagccaggcgtggtgaygcgtgcctgtagtcccagctacttaggaggctgaggcagaagaatcgcttgaacctgggagacaaaggttgcagtgagccaagatcgtgccactgcacctagcctaggcgacaagcaagactccatctcaaaaaaattaaaaaaaaatggtagtgctaggccgggcacggtggctcatgcctgtaatcccagcactttgggaggccgaggtgggcggatcacgaggtcaggagatcgagaccatcctggctaacatggtgaaacctcgtctctactaaaaatgcaaaaaattagccggcctggtggcagtcgcctgtagtcccagctacttgggaggctgaggtaggagaatggcgtgaacccgggaggtggagcttgcagtgagctgagattgcaccactgcactccagcctgggcgacagagtgagactccgtctcaaaataaataaataaataaataaaaataaaaataaaagcaaacaaataaaaaaaggtagtgctattattattgttatactattccttattattatcagtaaatccgaagctcagaaaagaagcaatttcagaaggcatcaagtagaaatggaaaccatgagaataaatgagatgatccaaaagagtgtatatggaggacattgaagaccaggaacattgacatttaaggggtggacagaggaagagaagcctaagaacaaatggcctgaggaggaggaaagctgtgagagcccgtggaagccacgtgtagcagccacacagctagctgatcctctgcctccttcctccttcctaacagaacctgttgttagggtaagctcccacagtgccagctccaacccaggaggtgagtcttcatcagtaatctcatttcccttgccagtgactggtttgggaaggtgtatttgatgcagttctgttcaacagcacttgatagaaagtctgctggtgaacttctggaaaagatttccttgatcttaaagagaaatgcaggtgcaaatcaaaaccacaatgagataccacttcacacccactgagatggatggaacccaaaagtcagataacaagtgttggttagaaccgtcatacatttctggtgggaatgtaaaatgatacagccactttggaaaacaacctggaagtttccccaaatgattaaacataaagttaccataggatgcagggacttyacgtatataccaagagaaatgaagacatatgtccacgaataaacttgtacacaaaagtttatagtagcactgtttacaatagccaaaacatggaaacaactcagaggttcatcaatggatgaatgggcacacaaaatatggtatatccacacaatgggatatcacttggccataaaaagtaaggacgtastgatacctgctacaacacggacgaaccacgaaaacattctgctaagtgaaagaagccagccacaaaggcctccagagactgaagggggcctgcccctccacacctgtgggtatttctcgcaaggtggagacgagagactgagaaaagaaataagacacagaggtaaagcatagaggaagaaaagtgggcccaggggaccggcactcagcaagtgaggacctgcaccggcactggtttctgaattccctcagtatttattgatcattatctctactatctcagtgagggggatgtggcaggactatagggtaatggtggagagagggtcaacaggaaaacaygtgaacaaaagactctgtgtcataaataagtttaaggaaaggtgctatgcctgaatgtgcacgtaggctagatttatgtttaactttacataaacatctcagtgcagtaaagatcagtattgccgtgcagtaaagatcagtattgccaccagcatgtctcacctccagccatagggcggttttctcctatctcagtaaatagaatgtacgatcaggttttacaccaagacattccattcccaggggatcatgagacagatgctttcctcttaactgcaaagaggccttcctctttcagtaatcctcctcagcacagaccttttatgggtgtccggctgggggactataatgtaaggtctttcccttccaacgaggccacatctcaggctgtctcagtgtggggaagcctggacaacacccaggctttcttgggcagaggtccccatggctttccacagtgcattgtgtccctgggtactcaagactggagaatggcgatgacctttaccaagcatactgccttcaaacacattgttaacaaagcacatcctgcacagccctaaatccattaaccttgagtcaatacagcgcatgtttctgtgagcacagggttggggctagggttacagattaatagcatttcaaagcagaagaatttttcttagtacagatcaaaatggagtttcttatgtcttcctttttctacatagacacagtaacagtctgatctctctttcttttccccatacagaccttacgatttcattcatatggaagttcaggatagggaattctatagagacagaaagwagattagtggtttccagagtctggggtggtggacaaggatgggaggtgataactaaatgatatggggttcttcttgagtgatgaaaatttgtaaaactgactgtggtgatggttgcacctgtctacgaatataccaaaaaccattgaattgtacactttaaaattatacggtatattaattatatttcaataaacctgttttaaaaagagatagcctcaaaaatacagacacttctcagtttgtcatgtctggacgagatggctggaactgaggattatgtccacacaaagagaaaggcagcatcaaggctgacctgagaagmggcaagggaccctggcagtaccaagtctggttgtttttttatgtgacatgatcaattgtttcctgctttttcttttaagagatgggggtctcgctgtgttgccaggctgaccttgaactcctggggtcaagcaatcctcctgcctctgcctcccaaggagctgggactacaggggtgcaccaccacacctggcaacatgatgaattgttgaagcagcttgcattgtttttgctgttgttgtttgcaaacaactaaatgttttatgcaaaaaggagttaatatagggaattagctgcttacaaaacctttggaagggttgggtgatcaagctctaggctgaatccccaggaatgactcctagaacactgcaaaactgaccaatggagctactacttctgtcccgtatcaggaaagtgaggactcaggagaccagcactggaactattgcattcaagaacacagcactttaattatgactcagggttagaaagccattgccmaaccaccacagccgcctgtcagcagcacccaacgaagccggtgaatgagcatggaatactacttcagaaactgtatccatctcctataccttactcgctagaaggaaacagtcaaagcagcaggaagatggtatttatttgacttccaccttccacatgtctctcatttaatgaccaacttattttgctctttattcctacttccgtctcagaacttctatctggaaccatttttccttctgcctgatatatattctttataattttctgaatatctgcttgtgaagaactttcagttttggttttcttgaaaatatctttattttgtccttgttcttgaaagatttttttctttctgggcataaaggataggcaggtagttgttttcttttctttctttctttctttctttctttctttctctttctttcttttctttctttccttccttcctttcttctttctttctttcatcttttttctttttttttgagacaggttcttgctctatcgcccaggatggagtgcagtcatgcaatctcggctcactgcaacctctgtctcccaggttcaagcaattctgcctcagcctcctgagtagctgggattacaggtgcacaccaccacgcccagctaatttttgtcattttagtagagacagggtttcaccatgttggccaggctggtctcaaactcttgacctcaggtgawccacccgcctcggcctcccaaaatgctgggattaaaagtgtgagccaccgctcccagccgttattttcttttagcaaatgaatattgtcatccttaagggcctattggctacagccacttctgataccaaatggtgaaggttcagtacaagaaatagaagccagcagaaaaggaatttgatacaggcaaataggtagtaaaaatcattcggtacactgaaaaatgacctctatttgggcctccaggaaaatctctctgaacacccagaagtaactccataaaggagcgaccactcctgtaacagtcaggctactgtaaagccacctgtagaacttagctgggttttgtaacacagtactgtggccaccataactgcaactgtgtcctccattcccacaaagnggggactggatagtggaaagctgatgcacgaacatcccatgtcttcaatgatcttgtttcccaggagaaaacaaagaaaactgcaaaaaatatggcctgtctcacatctgctttctagattctgaaaacctaatttgcataacccaacttcaagagtgtccacaaaatgtagctttttgtttcctacccctcacagtacagtaagacaccctagaaggagctaggaatagtggaaggatccctgctgtcaaatggcaggcagtgtggggggcctgaagtggccaatggttttgacaacgcggaagccaaggaggcgagagccccctctctaaaaaaaattgaaattaaaaagcgaggagtgaattcagtgaatgcagatggtttgaggatccctgtgaagggaggaggaggagagaaaggtagtagtagaaggaggggacatacagtttcaagggagttttggttggttgtttttctaagaatggtagagagatgaacgtgtttattaatggaaaggaaggtgtcaaccaaagagaacagagggaaggagtagatgcatgatggaaggagaacttgcagctggtgggaggggatgctcatgatatatggaaagatggtcatactttcctawgtgacaaaacaaattttaaagcaaacattgtatgatccccttccatttacaaatatataatagatacattgaaaatactcactgaatggtcagacatcccttatagagacaaaactcaatttcaatgttgcaaagctacactactgagatggagcagccccaggcaatggcacaggcttgggcaggggtgtgtagtaactggagggcaaaataagagtgggcgagggtgagatagaggacagcagagccatgctatcgaaggccacatgcccatgagactggcttgctccatagcggaagtcatgatgccaacttgcccaccttcccatacgctgaggaacagcctgccatccgttcttctgragcccagctcagagacctaggtatagcatcctccgttcccactcaccctcagcagatgccttcagcagttgtggagatatacaagttcccgcatagtagttttgagacacatcctgtgatagcaacacaatcccctcatgtttcctgcccccctcccccaaatcatgaccagaaggatccgctgaccaaggctgtcccttaaatatatgacttccttgagaataatttgacacggcttaaactaatttagcttttctcaatccctgtcttaactctcaacatgactatttctcatgccaacattatgccaaagtgtagatatataagaataaacaaatataatcctatattttccaagaaaatcatatatcaaaatgttaacggtgttttttgtttgtttgttttttgttgttttttgtttttgacgaagtctcgctcttgtcccccaggctggagtgcagtggcgcgatcttggccaactgcaaackccgcctcccaggttcaagcgattctcctgcctcagcttccccagtagctgggatgacaggcgcccgccaccacgccctgctaatttttgtatttttaggagagacggggtttcaccatgttggccaggctggtcttgaactcctgacctcaggtgatccgccggcctcagcctcccaaagttctggggttacaggcgtgagccaccatgcccggcctaacagtgtttttttgagtgacaggaactgcatgtaatttccattttccctttttggcttattgcactttttactttttctacaacaattttgtattaygtttatgaatagaaaaaaaaaataaaggttgttaaacaggacacaagtggaaagttgtccttgaattataaaaggaataaagtgctgaaaataactaaaatgctggataaaatagtatgtaagccgaagaaaatgtaagtaatacttgggcatgaagacagggacttagagaggtatgcaaagccaggagccaggtttggagttgaggatacatacaaaactgtgaatttgagagcctccttggcttcctcattatccaaaccactggccacttcaggcctctatattgcatgccatttgacagcagggaccccttccactatttctrtctccttctagggtgtcttattgtactgtaaagactaggaaacaaaaagctattttttgtagataccctcaaagttgggttatgcaaattaggttttcaggacttggtagcttctcgggactagcaggacagaagataaagcttactgcccacccggagggaagcctaacaggagactccccgcaaaactgtgactctggagggccacgttctaatataaaggtggcctaagaaataaatttggccgggcacagtggctcacgcctgtaatcccagcactttgggaggctgaggccggcggatcacgaggtcaggagttcgagaccagcctggccaacatggtgaaaccccgtctctactaaaaatacaaaattagctgggtgtggtggcatgcgcctgtaatcccagctactcaagaggctgaggcaggagaattgcttgaacctgggaggcagaggctgcagtgagccgagatcatgccactgcactccagcctaggtgacagagcaagactctgtctcggaaagaaaaaaaaaaaaaggaagaaaaaaattattccatccctacaggactgaaaggaaaactgcccttgttggatcctgatgctaatcaaattgagctgggggtgggctatctcccttcagaatttgtaatcatgagcctgccctcatgaatttacatgaccaggcactatcccccttcctaaaagataaacacatacacacacacacacacacacacacacacacaaaacctggagccaaaaatttgattagaaatggtcctaggcttgtaatgcccacagttacctgagagaagcaagtgtaaatcccttcaagaggaactaagaaatttgcctcatccctgacctcaaagaattcccacagtaatattccaaagaaaatgagataattcactaaataaaataattcactaactatacaaataaacagggcactatgagtgagatccagcagaaacaagacagcagattcagatccagactttagatgctrgagttatcaaacctagtatatccaacaagtatgtttgatatcatttaataaataaaagagagtcttgaaaatatcacaaaagagcaagcagatgtggaaaaaaatcaaacaacytgtagaaatgaaaaatataacaactgaaatttaaaactccatagacaggtttaacatctagatacagctgaaaggatgattagagacatggaagatagaacagaacttacccgacatatagccaagagagctaaagatatggaaaatatgaaatagaacttaaagagacatggaagatagactgagaaggtctgtgatatggtttggctgtgtcttcactcaaatctcatcttgaattatagctcccataattcccacatgctgtgggagggacctggtgggagataattgaattatgggggtggtttccctcmtactgttcttgtggtagtgaataggtctcacgagatctgatggttttataaggggaaaccccctttgcttgcgtctcattcgcttgcttctcattcgtttgcttctcattcgctttttgcctgctgccatgtaagacrtgcctttgccttccaccatgattgtgaggcctccccagccatgtggaactgtgagtccattaaacctcttttcctttataaattacccagtttcgggtatgtctttatcagcagcatatagtctaatgaaggattactttctataaatgacaaagggtcctaatccacaggttcgagaagccaaaaaactttcgactataataaataaaaagaaatgtgcacccagaataatcatagtgaagacacataacatagtatactaaatattaaaatattaaataatatatggtattttatagcatattggaaactgagtatatgtaacttccaaactgttagagaaaagagaaaaaaaactaattcaaaagaaggcaagaaaggacaaaaaaaattgaaaaaacaagacaagaaaacacaaaataagatggtataaataaatgtatcaataataaccctaaattggccgggcgcagtggctgacatctgtaatcccagcatcttgggaggctgaggtgggcagatcacctgaggtcaggagttcgagaccagcatggccaacacggcaaaaccccgtctctactaaaaatacaaaaattaggcagccgtggtggtgcgcacctatagtcccagctactcgggaggctgaggcaggagaatcgcttgaacccaggaggggcagaggttgcagtgagccaagatcatgccactgcactccagcctgggcagcagagcgagactatctcaaaaaaaaaaaaaaaaaaaagaaagaaagaaaagaaaagaaaaggctggaaaatgatgtaccaggtaaatactaagtttccaaaaagtgtgtatagcaacagtaatatcagaaaaaatatattttaggacaaaacagaactagagattaaaagattactatataatgataagatattcaattttccaataaggcataacaattataaacttctacaaatataataatatagcttcaaaaatgaactaaaattgacagaattacaaggaaaattagacaagtcaactatttcatgagctagttcaacacacatttctgtgattgataaaataagcagtaaaaaatcaataaattaagaatataaaagatttgggccaggcaaggtggctcatgcatgtaatccgagcactttgggaggccaaggtgggaggattgcttgarcgcaggaggtcaagaccagcctgggcaacatagcaagactttgtctctacaaaaaatttaaaaattaaccaaggatggtggcacataccygtcttcctagctactcaggaggctgaggtcagaggatcgcttgatcccaggaggtcgaggctacagtaagccatgatcgtgccactgcactccagactgggcaacgcagtgagaccctatctcaaaaaaaaaaaaagatttcaacaacacaactaataagcttgatctaatgacaacttatagaactccatatccagtaagtatagaatgtatggtgttctcaagcatccatggaatatctacaaaaatgaccattaaaaattaaatccttcaaccataaggcatttgtggaggaagaaattacaatggcaattagaaatatttagaaccaaaagttgatgaaattattacatagcaaaacttgcagtgtacagttaatactaatttagagaaaactgtgtggccttcaacacttctcatagaaaataaggctccaaattaacgagctgtgctcatagcaaaaaatctgaaataaaacaatgaaataatcacccaaaagagtaaaaggaaagaaaaaataaagatgagcaaagaaattaaaaacaagggcaaaagttgatgttttgaagaaattcgcaaaatcaacacaattctgstgacgattataaagaaagaaaaaagaatgcacaagtaaaccaatattaggaataaaaatcagtttagaatataagctacagtacaaactacagttagaagatttaatttctaatgtttgatagcagagtagggtaactatagttaacaacgttttctttttaaaaaaaactttttattgattgattgagacagagtcttgctctgtcctccaggctagrgtgctgtggtgtgatctcagctcaccacaacctccacctcctgggtccaagcaattctcatgccttagccacccgagtagctgggattacaggtgcacaccaccacacctggctaaattttgtatttttttggtaaagacrggtttttgccatgttggccaggctggtctcaaactcctgacttaaagcaatctgcctgcctcagcctcccaaagggctgggattccaggtgtgagccaccgcacctggctttttttttttgacagggtcttgctctgtcacctaggcagaagtgcagtagtgtgatcatagctctctgcagcctcaaattcctgggttcaagtgatcctcttgtctcagcctcctgaatagctgggattaccagcacacacyactgtgtccagctattttttcgtagaaatggggatctcactttgctgcccaggctggtctgacctcctggtttcaagcgatcctttcatctcagcctcccaaagttctgggattataggtgtgagccacctgacattacacctgagagcaagaactatttaaggtcagaatttaaaatatcaagaagtcagggcaacatcactatttctggaggagggacaagcaggttgtcaagcttgctttcctgttcagcagtgatgctgtggacttacagatccagcatgccatgggctcagattgtcactgctctttgagttacatagaaaacttctgagatgcagttaatactatatttgagttgagggagttaggattctcatcatatagagttacaaatgttcccatcaccttccaaaaggcaggttccagggtgtgtgaaagttggagggagtgactggaaacaatggggttgagtgtaatttttgcagggaaatgggtggcatccgttgactttcccaagttttcagaaatgcaagaagcagcctgccatactggcctgtggataggagctggtgatcaggatgggctgcaagacccagatttgttgggtaccctgatcttccttgcaaatgtcacattgagcaaatgtcatatttagaccctgtataagtcaggattctccagagaaacagaaacaatagggaactggctttatcatttactatgaaaattagctcatgcaattatgggggctggtgaagtcccacaatctgacacctgcaagctggagaaccaggaaagctggtggttgaattcagtctgagtcgggagccttagaaacagaggagcctacagtgtaactcccagtcctagtccgacggcctgagagcttgattcagggaggtgggttggggcacactggtgtgagacatagagtctgaagrcccaagaaccaggagcaccgatgtctgaggcaggagaagatggctatcccagctgaagagagtgcaaattcacccttcctccacctttctgttttattcagaccctcaatgggttggatcatgcccacccacactggtgcagctgatcttcttagtctaccaattcaaaggctaatcttagctgggcacggtggctcacgcctgtaatcccaggagtttgggaggccaaagtgggcggatcatgaggtcaggagttcaagaccagcctcaccaacatgatgaaaccccgtctctactaaaaatacaaaaattagccgggcgtagtggcgtgtgcctgtaatcccagcttctcaggaggctgaggcaggagaatcacttgaacctgggaggtggaggttgcggtgagcccagatcatgccaccgcactccagcctgggtgacagagcaagacttcgtctcaaaaaacaaacaaacaaaaaaaccacaacaaaggctaatctctccctgaaatacccttatagacactgccagaaataatgttctaccagctatctgggtatctcttaggccagtcaagtggacacataaaatgaaccatcagactccttagcaaatatgatcagcaagtaaccaagttactcagcagaggcctccgtttccccatctstacaacagggatcctaagacccactgcyycagactgtggaaaggattaaatgaaatatgcatgycacgtgcctggcagttagtgggcatagagtatgaagtagctattattattattgtcatttttattaaatgacagatccattttcagtttgttcagacagttgaatatattataatttacatcgtgataaccaacaactgttatcctcaacagatgcagatctgtggatccagcgtagcatctgtagcagctgggacatcattccaggttttgggcccggtgtgttggcaacaactggatctgaagatggcagtcagggtgctttggggtggtctcagcctgctccgagtgctgtggtgtctccttccgcagacgggctatgtgcacccagatgagttcttccagtcccctgaggtgatggcaggtaaaactccgcatgtgtggctgagacaagctgcagcagagtctgcttgagaagctgacgggagactttgtggggagggagtagcatgtctgggtagatgagtagtaaatccacaagcagagcagmagcctctctctctggggtaagaacttggaagtggggacttcatatctccttcccgagtggtgacactgaccttctgggtaatgctaataaaccaccagtctctttgatgtatccctgcttggaccaacaatacaggtcattcagaatgagagctgtgttggacttcccatgggaacacttttattagagttaggcttccccagtgtttggcaagagcttccatagggctgtgatctgagatcatgaaacttctcttctgtagattcaagagaggggtaagggaacccagacctgggacactcactcatctgttaggcggtgtgggacacatcatgaggctggttgcctggcccataccgtctcgcccaaaggccttgaggcctttcagatgtgatgggcatgtggggtcatcctcatagttcaagacggctgcttgagctccagccatcaagyctacaggcagtctttccagccaacaaaggagaagggcattacttctctctttaaggtcatattttgaagggcgcatgctttttgctcatttctatcacactgggcagaatgtatcatgaggccacacctagctgcaaaggaagctaaaaattatagtctttatatctgaccaagtgcccagaaaaagagtcaaaggagtcagatgcagtggctcacgcctgtaatcccagcactctgggaggctgaggcaggtggatcacctgaggtcaggagtttgagaccagtctggccaaaatgatgaaaccccatctctattaaaaatacaaaacattagcctggcatggtggcaggcgcctgtaatcccagctacttgggaggctgaggcaggagaattgcttgaacccaggaggtggaggttgtagtgagccaagattgtgccactgcacttcagcctgggcaacagagcgagactccatctcaaaaaaagaaaaaaaaaagtctaatgaaggaggagggaatagatattttggaggcatcagctttctttgccacagggctcaacaggtgaatttgttttttaagttaaaaggctcatcttctttccctcacgtcgttttttaaccagaaaagcrgccagatagatttgatcctggattttgcttccctttcaacatctaacatagatagataaaacagctgaaagkctggagaaataagtagcagaatcaaagagcccgaatgatccgcaggctgtatgatcagctcgaaacagccagcaggtgatcaagcaagagacgctgtgaacaatgaggcttggagtggagctgctcccgcgcccccacccctcagagctctgggacgttggggcacagggttacagaacaggcagcaagtatttcttaaattatgtaagtactacttggatatattcttcttacaaaaaatttaagtatcataggcagggtgcagtggctcacgcctgtaatcccagcacttcaggaggctgaggcgggtggatcacctgaggtcaggggttcaagaccatcctggccaacatggcgaaaccccatctctactgaaaatacaaaaatcagccaggcacagtggcgggcgcctgtagtcccagctacttggaggctgaggcaggagaatcacttgaaccccagaggcagaggttgcagtgagccaagatagcgccactggactctagcatgcgtgacagagtgagactctgtctaaaaaaaaaaaaatttaagtattgtaaacaaaactaacataaatcacctctgacataaccctgatggctcatcacctacccctcttctctccccccatctcctgataacaatcattrtcagagatgcggctctgtcaagcttgacaggtgtaaggacaagggtgcttgtccttggcttttgagatcttggaaccctgagaagaggttaggcctcccccacctgcccgcctcccacacactcttcccaggacacactgccacctcatctcccggggaagcccctcctgccctctgcactctgagctcccctgcacttgcttctgctgctcctgacaaatcctcaaaatcctacgagcagctcaaactgcacccgtctgtgagttcacagytctgtccatcagaagggcagcacgggctctctgctcacaaggtggacatcagcgtatggactgggctgagttcttgtctggaagctctctaattctagcagaatctagttcatttcagctgtggaacctatggtgcggcttccttgctcttagctttcagaggccacccacattcctagccaatggcctcttccgtcttgaagccagcagtggcatgtcaaatccttctcatgctttgaatctcactgccacttctgcgtccagctggtgaaaactctgttattaaaagattgttgtgattaggtccggcccactgcatagtctccctrttttacagtcagtgctcctgtataagtaacctaatctcaggatacagtccatcctgcgggccaggtgcagtggctcaaacctgtaatcccagcacattaggaggctgtgctggaagaatggattgaagccaggagtctgagatcagcctgagtaacatagcgagagctgtgatctcgccaccgcactccagcctgggtgacagagatgaacgaagcgaaggaaggggaaggaagggaagggaaggaaggaagggaaggaagggaagggaggggagggraagagaagtaaagggaaggaagggaagggaggggaggggaagggaaggaagggaggggaggggaaggaggggaagctaagggaaggaagggaagggaggggaggggaagggaaggaaggggaaggaagggaaggaaggaagggaaggaagggaaagaaggagggagagagggagggaagggaggaaaaatccagcccgtgcacagtcccagggattacgcagggcacacacaccaaggggtgggaaatgtggggtgccctcctagaattttgcccactacatccctgagcttggtactggctcacctctgcctctctctgcagaggacatcctgggcgttcaggccgcgcggccctgggagttttaccccagcagctcctgccgctcggtgctcttccccctgctgatctctggttccaccttctggctgctcaggctctgggaggagctggggccgtggcctggcctggtgagcggctatgcgctgctggtggggcctcgactcctcctcactgccctttcctttgctctggacggggccgtgtaccacctggccccgccgatgggggcggatcgctggaacgccctggccctgctgtctggttcctacgtcaccctggtcttctacacaaggaccttctccaacaccattgagggactcctcttcacgtggctgctggtgctggtatcctcccatgtaacgtggggccctacacgcaaggagccggygccgggtccacggtggcgcagctggcttcttggaggcattgtggctgctggcttcttcaaccggcccacctttctggcctttgctgtggtccccctctacctctggggcactcgtggagccacaaaccctggtttgaagtctctgacccgggaggccctggtgctgctccctggggcrrcyctcacagcagcggtgtttgtggccacggacagctggtatttctccagccccgckacatccaggaaccttgtcctgacacctgtcaacttcytgcactacaacctgaatccscaaaacctggcgagacatggcacgcaygcgcggctcactcacctggcagtcaacggcttcctgctcttcggggtgctgcatgcccaggccctgcaggctgcgtggcaacrgctgcaagtcggcctccaggcctctgcacaaatgggcctcctgagggcactgggtgcccggagcctgctgtccagccccaggtcctatctccttctcctctacttcatgcctctggccctgctatctgcctttagccaccaggaggctcggttcctgattcccctcctggtccccctggtcctgctttgtagtccacagacgcagcctgtgccttggaagggcactgtggycctcttcaacgccctcggtgccctcctcttcggctgcctgcatcaggggggcctggtgcctggcctggagtacctggagcaggtggtccatgcccctgtgctcccaagcacacccacccactacacactcctcttcactcacacctacatgcccccccggcacctcctacacctcccaggcctgggggcaccagtggaggtggtggacatrggggggactgaggactgggccctgtgccaaaccctgaaaagcttcaccagacaaccagcctgccaagtggctggtgggccatggctctgccgcctctttgtggtaacccctggcaccaccaggcgtgccgtggagaagtgcagcttccccttcaagaatgaaacacttttatttccccatctgaccctggaggatccaccagccctgtcctccttgctgagtggggcttggagggaccacctcagtcttcacattgtggagctgggggaagaaacctgacaatatgacagagcacccactgcccaagactcagccatagaagatgccgccccaccttctacttggrtagctgggctgggacgctgggacaggaccccgtcctccttcatgactcccactgctgcctctcctgggcatggctgttagctgttctgccttctgggtgagctggcactcttctccctgagaccaaagatttgacctgtcggtcttgatgtcaaggtccccaaagaccaggttaagtgacgacacctgtctgttcctgccctgttgcttccagccactgtgatgtttgaaatatgtgatagtacctggttgtgaaaaaagacaatgaactgctagtgacattcctcaatgacctctcccaaacctcccatgatgccttacccttgctgtcatgacaaccctctggcttcctaagacccatctgcctatcgaaatatgtgcaagtcagtgagacgaagtatagagaacaggtggcccagatccaggggacccaacttctggccccttggtctgtcacctcctcgctgtgtgatcttgagaaagctccttccactcacccaccccacttcccagtctgttgggatcagaggaactttgaggtgtctgccggctaacattgtgtcattcctggagtccacagtacacgtcccctgcctcaacaggcacagctctcacaaagctcttcaagcatggaagtgggagttgtgttgtacttcatggcactctgatgcctgctgtctcagtgtttggttattatgcaaacaagtaatgtttgaaatatataatagcactggagattttctccctactttcttttactcctgttcctgagaggtggtgggaaactctccagccatttctgcaccttgtccttaagagtcattctcctggctgggcatggtggctcacacctgtaatctcagtactgagaggccaaggtaggcagatctcgaggtcaggagttcaaaaccagcctggccaacatggtgaaaccccatctctactaaaaatataaaaattagccaggcgtggtggcacgcacctgtaatcccagctactcaggaggctgaggcaggagaattgcttgaacccaggaggcagaggttgcagtgaaccgagagccactgcattccagcctgggagacagagcaagactccgtcttgggggaaaaaaaaaaaaagggggtcattttcccagattagggagccaggtgttcttcctccttagaactgtgggtctcaagccctcccatcctgccccagagggcagagaacacacaacactcagctagtgtctggttaccagcctcaatttttccgatggcttcaagctttctagattgcatgattaactgtgctgcctaactagaaatgatcagagctgggtgtggtggctcacaccagtaatcccagcactttgggaggcggaagcaggagaactgcttgaggccaggagttcaagaccagcctgggcaacaaagtgcaatgccatttcaaccaaaaacaaaacaaaacaaaattgtggctgggcgcggtggctcacacctgtaaccccagcactttgggaggccgaggtgggcagatcacaaggtcaggagatcgagaccatcctggccaacgtggtgaaactccgtttctactaaaatacaaaaaattagccaggcatggtggcacgcacctgtagtcccagctgctcaggaggatgaggcaggggaatcacttgaacccgggatgcagaggttgtggtgagccgagatcatgccactgcactccagcctggtgacagagtaaggctccgtctcaaaaaacaaaaaaaaacagaaaaaaagtttttaattagctgggcatagtgtcatgggcccgtaatcccagctacttgggagtcccagggaggaagatcgcttggcccaacgggtcgaggttgcagtgacagctagtattgtgccactgcactccagcctgggcaagagttaggtcctgtctcaaaaaaaaaatcagaaatttagctaggagcttcaaatgacaggacatttctatatacaatggatttcctaatcgcaggtctgctaactggctggatcgtagtctgtctgtatccctgaccctctaaaatgaggggtagtgaaggggtgggttgcccctccacacctgtgggtgtttctcgttaggtggaaggagagacttggaaaagaaagagacacaaagtatagagaaagaaaaaagggagcccagggggccggcattcagcagacgaggatcccgccggcctctgagttcccttagtatttattcatcattcttgggtgtttctcggagagggggatgtgtcagggtcataagataatagtggagagaaggtcagcagataaacacgtgaacaaaggtctctgtgtcatagacaaggtaaagaactaagtgctgtgctttagatatgcatacacataaacatctcaatgccttacagagcagtattgctgcccccatgtcccacctccagccctaaggcggttttcccctaactcagtagatggaacatacaatcgggttttacaccattgcccagggacgggcaggagacagatgccttcctcttgtttcaacggcaaagaggcgttccttcttctttcactaatccttctcagcacagaccctttacgggtgtcacgctgtgagggacggtcaggtctttcccttcccacgaggccatatttcagactatcacatggggagaaaccttggacaatacctggctttcctaggcagaggtccctgtgggcttccgcagtgtttgtgtccctcggtacttgagattagggagtggtgatgactcttaacgagcatgctgccttcaagcatctgtttaacaaagcacatcttgcaccgcccttaatccatttaaccctgagtggacacagcacatgtttcagagagcagggggttgggggtggggttacagattaacagcatctcaaggcagaagaatttttctcagtacagaacaaaatggagtctcctatgtctacttctttctacacagacacagtaacaatctgatctctcttttccccacaggataggagtccaggtaacttgttccatggcaggcagtagtcttttttttttttttttttttttttgagaaaggttctcgctatgctacccaggctggtctcatctcaggctcatgcgatcctcctgcctctgcagtggctgggataagacacaactgccaccaggccctgcccctaggcagtagtcttaatgcctgatggtggggggttggggaaggaaggggttgagtatcagggtaaatgctgcagagctgtgttaaggacttaggccctggagtcaaatgcctctgctcacatcccactctgcaagactttgggcaacttaagcagcagcctctgtttccatcgcagtggctcttgcctataatcccagcactttgggaggctgaggcgggaggatcacttgcgcccaagagttcgagaccaccccatctctacaaaaaaatccaaaaagtaatctgcttcctcatgtgaatgtcgttgtaaggagtgagataacacatagagtgcaatgagcaagtcccagcacagaagactcatttcataaaatacgtgtttattattaccataggcctacagtccccggtattcttaacacatcttgcctgagaagtatcacactcatgcctatcaaccagctcacacatttaatcaaaggaatttggcagctgtagggttgtcttttcatccatatcgtccctggaattaactgtcctgctataccagtcagattgagcagcatctgtcaagagtttcagtcccacttgcagaggaaaggctctctggcttcggtccgtggctctccgtaggtgccgtgtctggacccagcctaccttcatctctgttaggcttaggggtctttctccacactgtgtcttgtccaatcacaagacttcaacggagcgggcggtctggcctaggctcttatgcgtgggatgtctgcaggccaacaatcccagtcgggattcgaagccgcgcgcagtgcccggaatgacccctccayattgatgccactgtagagcccggaaggaaaagcaagcggcctcggccccgcacagcccaggattaaatgtttgcgccagggcccctctggctacctggtggtggccccgagcggcctcggaggccgcggcgtagctcctgggtgaaggcgtcyctaaatcgctcagcgcggcggcacagggagcccacgggcccagccgcgaggtcctgcaggcggcgggccgcgtcctggccccgcagctgggcctgcagcagtgcgaaggccgtgagctgcgccgcacgtcggataggccgcgactctgacagacgttccaccagctgcgggctgtgcagcagggcggccagcagccgccgcagcaccatcttctccaagcgcccggaacccgacctcgccgccctcgtcttcmgccccgcggcgcccgacccggacgtctatgcccccgcgcagcttgatgacgacactgccgccctcggattgggtccaatgagatgctcgcctccgcgcgtttccgcttccgccatcgcggacgcagcctcgtgccgggagtcgccgcattgtggtccgcttctctgcactatgtcgggtggcctcctgaaggcgctgcgcagcgactcctacgtggagctgagccagtaccgggaccagcacttccgggtgagggargccgggccgcgagacgggaaggccctgggcaagaacgctgagaaacggtttgctcttgtctcattgtgtcgcctcccattcagctgaaatccgcaaacgccaagtggggccccggtgcctgctggcgaggcagggaatgggtgctggaagggcgcttggatatcactgaagccacttgctctggaagacggggaactggaggctcgcttatcccattcgctcgcagccgctccctgtaccccagccagtgccgagaggtttgagcggtggtggtggtggcggctcccgtttccacggttgtgcctccgcagacgactacgtagcaagggggaggggtgcccttctctctcccagagtaggcagaggcgccttcctgatgcagatgcggggctttttgctttgttttttaaatcggcgaagcagtgcccttcggcgattcgggccccttctctgggaggatggtgttacggaagctgtacgcggtgcgtgggagacacaagtggagtcctcactccgccctcggggaagcttcggagtggggaggtggacccgccaagctcggcactttgagggtgttcggatgtaaagatcggagaattgctggatttcagaagagggaaatttttagtccggactatatcacagtatattttgtggaaaaaggggaggcagcagatattcaaagtagacttttcagtatcagcggaggtagggatggaatacggttgggggttggcggggcgggactcattaacccaattatttagtaaacgtttatcgagtgctgtcgccaaatccttgtgctaaaccctagagggagagggaagacagtttctgcgctctgcgagctcataatcccctgtagtgaggattcagaaaagggaaaaatccccttgtgactgggaaaggaaggggcgcatatagcagaaggtaagtgtggagaatgtgtgaaatgtgttactagagtagggaaagggaaattttgtttgacgctaaattagggaagctcttacatttatttagtcaaggctgggaacggtggctcacgcctgtaatcccagcactttgggaggctgaggcgggtggatcacgaggttaggagttcaagactagcctggccaagatggtgaaaccccgtcttactaaaaatacaaaaattaggcgggcgtggtggcaggcgcttgtaatcccagctattcgggaggctgaggcaggagaatcgcttgaaccggggaggtggaggttgctgtgagatcgcgccactgcactccagcctgggcaacagagcgatattccttctcaaaaaaaaaaaatttattcagttaatgtattttattttttgagacagagtctcgctttattgcctaggctgaagtgcagtggcgcaatcacggctcacgcagcctcaacctcctgagcctaagtgatcctacccacctcagcctcctgagaagctgggaccacaggctcgcgccaccacatccagctaattttttgtagagacagggtctccctgtgttgctcaggccagtctcgaactctgggactcaagcgatccacctgcctggggcttcccaaagtgctgggatgcctaagtgccaggcatgatttgcacttctaccacttttagttactactttagacagttccacatcctgaccattttgaacttaaagcatcctgtgagatgaaaactggaaccttctgactttgtctattattcatctcctcagtctaaacctgtagctttttttagatgctaatgccatactgtcatgtggaatttctagcattctgtgaatggaatccatattaatatactttaagcacttacaccacagttatcttaaactgtaggctatttatttggatcttacttacatgtgtgagaaaagtagaaaaagaagatgcctcctttccatgttcacaaatcagtaacagcagtaaaatgaaaggaatttactttctctaatgtctcactccaaagttccgaaaacctctttttaacatacaatgactattgtcctgtggacttttttttttttgagatagagtttcact

SEQ ID NO: 96058 - DNA, 53265 bp, Homo sapiens
  misc_feature (1)...(53265): n = A,T,C or G
tgggatctccatgtcatggcccttattagaattgttcaccattgatcatcataacattttagtccttcaaatgtaaatgagtaaaaatagtaccttactatatgatccagcaattccactgctgggtatatacacaaaagaaaggaaatcagtgtatctaagggatatctgcactcgcatcccatgtttgttgcagcactgttcacaattgccaagatttggaagcaacctaaatgtccatcaacagatgaatggataaagaaaatgtggtacatatacacaatggagtactattcagccataaaaaggaatgagatcctgtcatttgcaacaacatggatggagctggaggtcattaagtgaaataagccaggcacagaaagacaaaccacatgttctcacttatttgtgggagctaaaaattaaaacaactgaactcatgcagatggagagtagaaggatggttgccagaggctgggaagggtagttgaggatgggggaaaagtgcagatggttaataggtacaaaaagtagttagaaagaatgagtaagatctagtgtttgatagcagaacagggtgactatagtcaataatttaattgtacatttaaaaataactataagagtataattggattgtttgtaacacaaagaataaatgcttgaagggatggataccccacttactatgatgtgattattacacactgcatgtctgtatcaaagcatctcatgcaccccacaaatatatatacctactatgtcctcacaaaaattaaaaataaaaaaatttaattacctatacacattactttttaaaaagtactttaaataccttccctaaggattgaaataaacacatattgtgaatttaaaagtaatacctaaaaacagacactaatactttttttttgagacggagtctcgcccaggctagagtgcagtggtgcaatctcagctcactgcaagctccatctcctgggttcatgccattctcctgtctcagcctcctgagtagctgggactacaggcacccgccaccacgcccagctaattttttgtattttttagtagagacggggtttcaccgtactagcgaggatggtctcgatctcctgacctcgtgatccacccgcctcggcctcccaaagtgctgggattacaggcacgagccaccgctcccagccccactaatacatttttaaaaataagctccttctgcagaaccagcttctataatgaaactgttttctcacaaataagcatatagaggaatttatacatggctagattattagaatcatattttattagaattaggacaagacttacatcatctctatagactgtctcaccagttccctcccctcccttttttttgttttgttttgtttgagacggagtcttgctctgttgcccaggctggactgcagtggcacgatctcagctaactgcaacgtctacctcccaggctcaagtgatcctcctgcctgagcctcccagtagctggaattacaggcacgcaccaccatccccagctaatttttgtatttttagtagaaaatggggttttgccatgttggccaggctggtctccaactcctgacctcaagtgatccacccacctcggcctcccaaagtgctgggattacaggcctgagccaccgtgcctggcccctatcttttttataacaggaaaactgaggttaaagtagaacccagactaaactgcaggttttctgactcctgttctaagtctcttttcttctataatttttttaaaaaatatttcaaacataaagaaaagtattggtaataataagcacccagattttttaaatgttaatattgtcatgtctcagatctcttaaaaagaattaaaacattatctatcaacagataattcccattcttctatttcattcccctatctctctctccagaggtatccatcatgttgaagttgtgtgtattctgtccttcctgcccatgtttgtatacacttaccaaattatgggttatatatccttaaaccacaccatgttgccagagaaagagttgttcttccaaacaaggaagaatccctcactctagtatgcttcatgcagttataaccttttgggttggtgggatatttcagaaagaaactagggcaaagccttaagtctttttaaatgattaccacagagccgggcgcagtggctcacgcttgtaatccccacactttgggaggctgaggtgggcagatcacctaagctcaggagtttcagaccagcctggccaacgtggtaaaaccccatctctactaaaaatacaaaaattaggcgggcgtggtggcgtgtgcctgtaatcccagctactctggaggctgaggcacaagaatcacttgaacccagaaggtggaggtttcagtgagctgagattgctccactgcactccagcctgggtgacagagggagactccaactcacaaaaaaaagcaaaaaacaaaatgattaccacagaaagagctagtgaagtgtcttgctatcattcagagtaaaaagtaaattgggcaaatataaacatttttaatacaactttttaaatcctaagttttatttatgaaacactggtttacaatgaacaagtacgaatgacctgtcactgaacaatagggaaagatgaactaaacaatttaactagtaataatagcttctactactgcttcgaggtccagctcagtgttatcaccttaatgaatttgtccatgatcccagagttgattccttcaataatcatttattgagtgctaaagtcctctggatacaaaagtagatccggtccattttctgaggacagcacagaaataactacacaatactgtttaataaatgtaacaagagaactatctatgaaggcctgggggagcctaactttttctgggacaattggagaagtctttacagaagtgatgtttcaactgcatggtggaggatgagaaggcggtcacaaaatgaaggatgaaaggtgattccaggtagggatacactgaatgagagggtacaaaggatggtaagatactagttttagaaagacaactaaggatagacattggaggtggagagacaagttacaagactggcaacaattcaagcaaaagatgacaggaggcagacatgaggagggaggaggaaggatatgaacaaaatccaggagataaatttagcagaacttgatgcctgattgtattgaggaaagaaagaacatggaggagttgcagatgactctcaaaaacttggcaaatcagtgggtggtgaggccattactgaaatagggaatacagtgcagaagataagaggctgggcgcggtggctcatgcctgtaatcccagcacttcaggaggctgaggcaggcggatcacctgaggtcaggagttcaagaccagactgaccaacatggtgaaaccccatctctactaaaaatacaaaaaattggctgggtgtggtgacacacgcctgtaatcccagctactcgggaggctgaggcaggagaatcgcttgaacctgggaggcggaggttgcagtgagccaaaatcgcaccattgcactgcagcctgggcgacaaaagcgaaactctgtaacaacaacaacaacaacaaaagaagataagagcctgcttgagaaaggaggtgaaagttcattcagtttgaagcattttgagttggctttgaagcctcttccatgagacctccaacaatttctctaagccagaaatcacctctttgcactccatagtatctttttcatctcaaattatttaaatctgctgtatttacaagtttgtctttcctttttttttttttttttttttttttgagacggagttttgctcttgttgcccaggctggagtacaatggcacgatctcagctcgctgcaacctccgcctcccctcctgggttcaagcgattctcctgcctcagcctcccgagtagctgggattacaggcatgcgccaccatgcccggcaaatttttgtatttttagtagagacggggtttcaccatgttggtcaggctggtctcgaactcctgaccacaggtgatctgcccgcctcggcctcccaaagtgctgggattacaggtgtgagccaacgtgcccagccgtctttactttaaatcacaaagaaaaggtactaggtcttatctgtctttatatggctctcttagcagtgccttacacatagaaagtcctcagagtttgcactcttgagaaggcagctccatcagatactagaaaccgtcagctaacatttatcaaaacaaggaacaaaacttgtgaattagcagctgaaacaaaatacctgaagtataatatttttaatgttagtagctgattctagatataaattagctccctttgtgctcattttacttgcctcttttttttttttctttgagattgcgtctcactctgttgcccaggctgaagtgcagtgttaagatcatagctagggagcctcgaactcctgggctcaagcgatcctctcacctctgcctcccaagaagcaggtgcgcaccaccatgataggctaatttgtaaaacattattttgtagatacagggtcttgctgtgttacccaggctggtctggagttcctggcctcaaacaatacccctttctaggcctcccaaagtgctgggtttacaggcatgagccaccgtgctggccttttctgacttttaaacaaccccgcagcgtaatctttgcattcctattttacagataaagcaacagaagcctccagcgactaagttaaactttcctggggtcacaaggtttacaagtggctgaataggatttctacagactggttccttcacccggctgcccgccgaagtaagcgggccttactgccctaattctcaataggaccccaaagaggacgcttctttgctcctgaagggatggcaccctctggattcgcggtaacagcaaatggggctctcactcctaccatctcagtgacagtttaaagcgcaccctaccgcaggaaagtgcccatatttgcacacacgcggcagagggcagggctgaaaaggggccctagggtgcagggggcgcgccctcacccggggaccccgcattttacaatattagctccaccgaggcgcacggaaccgcaggcgagcaactgaccttcggctccagcggccccaaagccgggggtgggaacgcgcgacccaggtagcggcatggactccgagcctggcccctcgggggttaaaactccccagacataaaggctccggacgacagaggtgcagccgccgcgtgcccgtgggacactgaaactcttcccttaccttcctcggtagtcctgtgagggaggctggcccggccggctgccctacggtgcggacaggaggtcgcggtcgggaggggccctgcccggcggttgctgctggaaccagcccccgcaagggcccgcagcggccgggccgtttacctcagacccgcgccgcagcctcccggagcccgcgcccaggactccctcacgacctctccagggtcccggcccgacaccaaggggcaggtgaggggtggaacctggaggcacccgcgccagggcccctgagggaggcgggaggggkacagcctcagtccygactcgcagccgaggcgcgacractccgcgcagtcccgcctgtggaggggcgtgcctcatcgcttgctaaccgagaggcgaagggcaaggggcgaagggcaagsgccggatcctttcgccccctccccacgtgaggccctggaggctgattggccgtgtgctgcggaggcggcaagaggaacgtgtcctggcacrtgccgaaggagcgctaaaggccaggggcggtcccacccgcgaagccctggaaggcggattggctgcgcgaggaagtggcgtgtcctcacttgagctgtctgggagcgagagtaagagataaaggcaagggcgcctgagcgggcctgggcacctcctcccactgcgggcaaagggcaggcagttcgtgcgcggacacaagcwctggcggaccgtggccatggcgggcgctgagtggaagtcgctggaggaatgcttggagaagcacctgccgctccccgacttgcaggaagtgaagcgcgttctctatggcaaggaactcaggtccgcagccaagaggctaagctaatggggtcttggggccacagagtgtgggtctgggggagcaggcagggagggcctcagggtctgaagggctcaggggaggcggtgagaagtcctgagttggcgggcagagaccatagtaggtcttgatgggacggccccggggtccttgggggttgcagaatcctggcgtgacctttacaaatctcttctcccccacgttgcccagaaccggaaggaaaaggacgggattttactctccagggctttctctgtggccatcccaaccctcctccccggagccgggcttgtcttctggatgtctggctggatcactgtctccaaccagagcacccagcaggtgtactgattgtccggccccagaccatccttcttgcggtgacccgacctctggctgacccttggaaatagaggctgtctgcatttagttggcgagggaacctttcccactggcaagccatgggcgctggtttttccactccctgcaagcttgtgcatcaccaggactttctgagggctgtatactgctggacactgtgtccacaaagctgaaaaagacacttcctggccgggctcacacctgtaatctcagcactttgggaggccagggctggaagattgcttgaactcaggagttcgagaccggcctgggcaacatagtgagacacccatctctataaagcatttaaaaaaatagccaagcatggtagcatgcatctgtagtcctagctacatggcaggctgaggcgggaggatcacttgagcttgggaggtcgaggctgcagtgagccaaaatctctcctctgcactccagcctgggagtcagagtgaggccctgtctcaaacacacacacacacacacacacacacacayacacacacacacacacacacacacgtctttggatttggagcttacttggataatcccggatgatcttatcttgagatcctgaccttaattacgtctgtgaagaccctttttccaaataaaatcacaatgacaggttccaggtgtcaggatggagacacagctcaacctgctacagtagcttcagggtctgcaggtggaaataactcaggggctatttgctatgtggaggtgggcctcaggtgggcgaggctgggcttgttgagctgccctggagatggtcattccaggtgaaggaggagcaggtacaaaagagggcgctggagagaatgctggaaaacctggatattcaaggggtcagagaaagagactttgtgggagattctggaggtgaggactctggggcaggacagggaaagaagcatcagatggctcagaaatgtctagcgkgtgaggacagcaggaagtctgctggatttagccatgataaggctgttggcagttcctgagatggggccaggaggtaaggcctgagctgaggggaagcatgtgtggaagctccctaggcagcagggagagacagcaagtgagtaaacacatggacatrtgtggaacactgtccctctttctctttcttcctcaccttctctccccsctakctcccttctgtttttcaacgggagagactctttaacagcttcagtgatggatgtggaggtctgtaggtactagtggagaaagatgtccaagctatgtgtattaagtgaaaaaggcaagttgaagaacagaaaatacagaatgataccattgtatttgtaatgcatacacgtaggaaaataggaaagagacataaaacattgttaagaggggttgcctctgagttttgggactaggggtggggtagaaaggggaatgtatgtttcattttataccctttcccactatttgattcacccccgccatgagcacrtgtctcttttgtaacagagctctagtttaatgatttaaagtgctggtggtaaagagccatcagacatggaaagatgaagttccagaagtgagaggttgctgaggaggcaggaacttggtgtcctctggcaaggtctgcctgaccctgggtgggagaggtgggggccctgaagggcatggtggggctaggatgggaagtgaagggctttactccttgaagtttgaagggaagccctgagtggggaggcctcagtagcagggtgaggggtagagggtctgaaagccaactacagggaccagggcaggcagtggcagcaggaggccgtctgtgaggttatggctcatttgctggtcttgtcctcctgggcagtggctgattgatgttttagtacttttgggctactataacagaataccagacttccctgtacttgtgggcaatcacagggagaaaaaggagaagggtctgtgtgtctgtttccccaaaggtctgtgggcctggtagctggacagccctttgggaacgtcctagtgaacactgtcctcagcctgtggtctcacaccaggaagaagtcaggtggcagagctcttgtctgagtgtgcaaccctggctgtaaccaacatctggctgcggtctctttccccatcttaaaccacatgaatttattcctcacagttctgaatgctatgaagtccaagatcaaggtgccacagcagatctggtgtctgttgagggcccactttctggtttttgatggtgccttctcactgtgttcttacatggtgcaggaagcaagcatgccctcttggtcttttaaaaggactctaccctcatgacctaatcacctctgaaagagccctatcacattggagattaggatttcaacatatgaatttggggcagacataagcattcagtctgtctcagtgttccactgcatctcctgtaccaggcctttcggtgggcacagcacatggtcattgactgcgtctacacagggtatggcttgaggattggttaggttctccaagatgaagctgtgtaggatgtggtaatgcaccgcctttgataatgggagggcagagaggccttacaggtactgcccagatagtagacaggagtggctgggaggaggtagagccccaaaggtggctgtcctggagggtggagcggcctctcctgtattaccttggcttagaatgagctcgcagggagctggggataaggaggtgggcagcctcagggctggctaggcggaggcatcacttgggggaagaagggtaggtaatggaggttgtgcatggtgggaagatgaggagagagacttcagccaggtggtggttacagccatgtttccacacccaagacgagctcttcacctgacattttcctggtgtgagaccacaggctgagaggccaggcagggttcaccaggacactctgaaagagctgtctggctcccaggcccacaggccttcgagggaatagacacataagccttgctcctttttctcctggtrtctgcccacacccatatcctggaaagctgcgtgatttatgtccaccagaggggatttgctctgaggctgtggcctgcaggagcgcccttccgctggagggtgggaggactgtctaaggcagtcacagcaaggagaggcacggtgtgggcacygctgctatttctaacctgctggagtgaagggaaccttgactacttgaaaagcaggctgattgtcaggggcggaaccgaactcagagctgtcagggccgtcacatggaaagtgcctggcagggggcggcgacagggggcttgggctgacagggctgtgattttgaaagaaacgtctccaagaaagtgatttaaagtaggagagaaatattattattagataatggctgtcaggttattttttgatgtgttttctgagtatttcataatcatcttgcgcttagatggtaagcccttcctggctaggggccgtgtcccatcccatgcctctgtggctttcaccttcgggtgtgcaacaggtrtcaggaggtatttgctgtttggctaatggtcacttcagtggaaggttttataactaattctctagccttggttaataaactacaaatgtggatgagcacttagggcttccatctgaacacctgggcccctccaagcccacccaacaccagatgtagaactggcctcccccagcaggagcagcaggacagagtggccagggtctttattcaccataaggccatccatgtgatcccaggtcatggcctctccatccaacctgtctcctgagccccattttccaagcccctcggctcccacagcctgcctcacaccctaggctcagcatagccctgattctggttcagaaacacttttgagaatctgttccctcctttctgtgctgactgccaggactttaattcctaccgtgatttcagcaactctaaaacaccaacctcttaactggcctccccattgccaggcctaaccgtgctgactctgctgaggtctccctgccaattgcaggtaaagtccaggttcagtgtagtgttctgtcatggctggaccccactgctcgccagctcccttgggccctggcactgagygccttctagccaggacatcctcacctctttggctgataaatagctacaagaaatgggagagngattttaagtggagcagactgcatcaaaatccccttccctcttttttcctgcccatctaggaagcttgatctgcccagggaagctttcgaagctgcctccagagaagactttgaactgcagggatatgcctttgaagcagcggaggagcagctgagacgaccccgcattgtgcacgtggggctggttcagaacagaatccccctccccgmaaatgcccctgtggcagaacaggtgcagactcttttgaccataataaatacacaaacagggttgtggcctgcccttggagcacacctgcaggccctggctggccgcatactccgggtctgcaggcttgggcgcctcaagcagtagcagaggcgcttctgccctggcctccccacatccctccagcctgcatctctggctcttctgtcttcctgttcttattctgtctctccctcctcctcactgatctttccacttctctccagctattgatctgaagctccatttaccaaccgggagggtgcccttttggcctgctcgtgctctccacgggacgctgcctctcagctgcctgccaggaggcggccagccagcacacgctggttgggaccgtctgtccgtgtgttcttctgccttaatcctcagggcggggactcgctatacccagaagtctgtcagttgtggtgcctacaggattacgggaatagataggcattcgcttatgacctcagagttagtaaataaaggtgacagcatcttgtatctccctaaagaaacatgttgtcacaggcgcaggtggtttgctttatacacttctccacagcattcctccagctgctcaaactttcagggattttcctgcacaggtttcctcaggatacggcgtgtttgaggattcttagggattctggagaaacctaaggcctcttggattccaggtttggttctgcatcatcattcacattggtccttcctttgcttttgttggattcacagatgtctggttctcagttctctcactttttgtatcaggatttgttttttgtggatatgtcccctctatcatcccagactgtcaagtcataggaccagctatgtttttttcacgtgcacagggcctagaagtatgctttgcgttttgctaacaccaagcaaatgtgtgtttgcggggctgatgctgtcagcaaatatccacaaagccatggggtgcacagcctctcaaaggaggagactataggccttgtggagagtttgtgcgctctgggttttcagcctggttcctttggtctgtctttgaacaaacgcttttgaatgtctcctgggagccaggcattgtgccaaggacaagcagacaatgaggatgctttcttcctatccccaaggagcctgtggggtcctgggagtgacagacagcagaggaagagtggcacacaaagcagtggcacacaatggctcccgaaggccaggggatgctgagttaccttgacacttggcccatagctgtgagagcctgcagaggcccacagaggggtgacatgtgacatagataacacctccaggaagattaggtgggaggagggaagtacattcctggcccagggcacagcacacaccaaagcacggggatttaaaagagccagagaggcgaggcattccatgataagatgcacacaggataagtaggataagtgtggaaccaggcttgcctctgaaggcaggagagtggggagcggagtcccrggccaagggggtggctgacctgggagatgggtgtgaacgtgggccctggaccggaagcagcaccatcctcatccctgcctctcagcaaccccacaggtcaggtggcagcctccccattaccaggtgaggaaactgaggcagtgtccaagtgtctgwccccagagcctctgcacctccagcttttcatgcagattttggacatcaggagataaccaaatatagaacctccccaccctactcctcatacctgcccaggtgggcattgatttttccatatgcattaggatgagatcctaaaaattgccttaccartagaactaaatggattctaatcctttttaaattctcaggtctctgcccttcatagacgcataaaggctatcgtagaggtggctgcaatgtgtggagtcaacatcatctgtttccaggaagcatggagtgagtcttttttatggtgctttctctgctgccttcaaacaattgtgtattctctccatgttgccaagagtgtctgctgcctgacttttaaagaatctcctttgtttcctcatccatggaaagttctcngtccacatcaccaggaaccccggcctccctgctgttacgcaccgagctgttgtctgattccttcagttttcccacatcgttctgaatccattcgctcctctccatctctctaccaccacctggtccaagcccctggcagctcacctctggcttttgtaattccctccagctggtctcctgtgccctcctgaccaggacttctttaccttcagatctcagcccagagccagcccccccatctaaacatcctggtagtatgtacctttgtggtttttatttttatcagagttttacatgctcatggtttagagtcagatgggtgtacaaggtctgttaccaaaaaatagctattatccccagcatcaacactgagctagttcctttggaatttacctttgttagtgttgctacttcctaattttttagttttgcatcacctattgacttccccctatggaagatgtcagtgttagccctttcttgcctcctcctggcccttcgacatacatgtgtccttgttctatccccccagcccattttgtcaactttgattccttttctttttttttaagacaaggacttactctgtcacccaggcttagagtacaatcacagctcactgcagccttgatcccaggcccaagcaatcctcccacctcagcctcccaagtagctgggaccacaggtgcacaccatcacgcccagctaattgaaaaaaaaaagtttgtagagatggagatctcactatattgctaggctgaactttgatttcttttcctgaattattttctgttttccctagagtttgctttgttttctacttgccacgcattcaaccccaaactttctatcaattcctaaatctcccttaatgtgttttagacgcatcaaacagtctatcagtttcatctcctccaaggaatctgccccagagccttgtgactgctgtggtctgaatcaggtgccccctctgctggccacacagttattgtcctgggatcccccctcatcatcaccctggggaatccctttgccttgctcttgtgtttctctgttcccacagcttcctctttcttggtttatacccttattttagtggagtggtgtagtggatccttatagatttatgttgcctcggcatccatgttgaatacaagtttaactctctcataccagcggcagggctcggtcacgctggacacagtttccagatctacaccacaccgagatggctcaagccaagtggccagaggtaagaacttaagaggcctctctcccaccagcagactgggctgcccactttcctgctgcttcctttaaatggaccatccaggcatttggccattaacttaaggtgaccacatcttagtcattatgtgtactgctagttgccccatactctctctgactcttcatttctccctcatctgacctggggacagaggactgccctcctgactcatggcactctccttgcccaggatctgtaagtaaaaaaatctttaaacttgtttcctattgcgattgtgtgttgaatttgcaccttccatgagaagaaccaggggctgccccaggctgggttttccttgggataccggtggaaacacaaagttgggctcctagggccagagtggtagtcaggcagggacaggtcaggcaagagctgccacacagcatgtgccagtataaacaagtttcacgtatgagggaccccctggtcacgggttggacagasaggcattaggctgtccaccatgtacaagatgtatcctgtgaaaggcacactgtagagaccacatccagctcccttcatttcctgttagtgctgggttgccaaccgctctggtactggagcccccatttagctagggactctcagaacaagtagttccctgaggaagaacacatcagaggtaaactttttgaggccttgcccatctgaaaatatgttccttctacaattttcttgatagtttggttgagcatcaaattttaggttagaaatcattttccttcagaagtttgaacacattgttccattgtcttctagttttttgggcattgttgagtagtccacagccattttaatttgtgacccattgtctatgacttgtttttctctggaagactgtaggagtttctctttttcaccagtactctacaatttcataatgatattccattgtgtatatctattttaatccactctaggcactcagtgggttcttttagtctagaaacttgggttctgaagctctaggaaatgttcttgcattatttcattcattattttcccctctttttttctctttctagacagtcctactattaggatgttggaaccctggactagttccctaattttgttatgtatttcctcctttttttttttttttttttttttgatacgtggtcttactctgtcactgaggctgtagtgcagtggcacaatcacagctcactgcagccttgacctcccaggatcaagcaatcctcccgccccagcctcctgagtagctgggaccatagatgcataccaccacacctggctaattttcttgaattttttttttttttttttttgtaaagatgagatctgtgttgcccaggcaggtctcaaattcctgggcccaagcaattctcccaccttggactcccaaaatgctgcaactataggcgtgagccacagggcccagtcaccactttgtctttttgctcaattttctggtggatttgatctgatttgtcagtcagccctcctattcaacctttcatttctgctgtcaaattttgaatttactagtgttcttttggtctgaaagtccctgttgtattacatcctgttcttgcatcatggttgcgatatcttctcttacctctaaggatactaatattaagtaaattttgttttctctcttattccaagagtccttattccaagttggacgctttgtttgattgctcatattttaagaattggggattaaaaatctgtgagctctgagtttgtagtaggggctcacccactgagctccattatagggtgatctgatttagtggtaattcccaggtaatcccagtgttagtatctctgggtcattcttttcaggctggtcagagtccccagagatttttctgcccttgtgccaagaagggaaggagaacaaaggttcagcatgctgatgtttactcaatccctctgttttgacacttcacttgctttcatctgccctgctccaaagccagagagcctctgctgaaccatctctggaggatgagcctctggccttcttctggggtagatggggcaggtcccagcctcttggtgtggagaaaggacctggatttctaactgcttctttttttatttttatttttatttttttttgaggtggagtcttggtctgtcacccaggctggagggcagtggcgcgatctcagctcactgcaacctctgcctcctggattcaagcgatttttctgcttcagcctcctgagtagctgggactacaggcccgtgccaccatgcctgcctgatttctgtatttttagtagagatggggttttgccatgttggccaggctggtctcgaactcctgacctcaggtgatccacccacctcagcctcccaaagttctgggattacaggcgtgagccaccgtgcctggccctaactgcattttttttttttttttcagacggaatcttgttctgtcacccaggctggcatgcagtggcgcattctcagctcactgcaacctctgcctcctgggttcaaaaaattctcctgcctcagcctcctgagtagctggaattacaggcctgtaccaccacacccagctaatttttgtatttttagtagagaccaggcttcaccatgttggccaggctggtctcgaattcctgacctcaggtgatccgcccacctcggcctcccaaagtgctgggattacaggcatgagccactgcgcccggcccctaactgcttcttaaatagacctttgaccagtccttgtttatcatacttccctgcttccccaccttcagaggtacctggtgcccctgggtcctgagctttggataagcaggagatcttctctactgctagcgggactcagttttctctgatctgctgagagatttgcctgcatctttccgccttccagcttcccgtgtttccgtgcctcagtgcaccatccttgttgggtatatgcctttgcatgaacattgctttcctgtcatgttaatggggtttcaggaaagaacacgtgtctgtgtcccagaagttcatgtcrttttcctatttttgttacctttgtactctcactcttcattagactatgagctccatgaggatagtatctgtgtttgtttttcccaactctccacccacccctgtttcatctttagtggcaagaataatccctagtgcatgacaggcactacaaattagtattggctggatagttgaactaacatctcccctttcttggatctggaactccccctcatttatcaaagtctagcacaggtacccctcctttgtggggccctggggactcccccaggactccccctgaccactctgtattgccaggttgtgtggccgcaccaggttctaattcatctccttccctctaggctggcagttcctgagggccaggtgttagttaggtcagtgcatgtggaacctcgtcccctctagttgaagaactgtagttgggactttgcagccagcctcacccaacctcacttccacatccttcttttgaaagtgtgtttacattagagtggttgtgtaaacaggaaaagaagctgcttattctctgggggcacttgactcactcctaatgctctgaaagctgagaattaatggtcattaaggagcatttgtgttttcaacagcttttctgttggcttccttaaaataattcatctctcttcacagaaggcgagcctggggagccttgagcctgctaccaaggcccccaggactgttgctggcagtgcctgccgcctgcttggcaagatggtggtggtgccattggcgggatatttactgtggtactctcttaggaccaggcttcctgggaccggaaggaattgagaggctgaggcttctcttccttctctgtgaaataaagggggtgacaccagcttagggatgttggagacgatctgcctattacgaagataggagttataaagaaatactttttaggcaactagaaaggagtaaaaggaataaaggagtaaaggttctcagtggaaattttcctgtaataagaagcaactcctgaaccatttcttttctaaccgaaaaggcggcttaaagagccaggccagcaagctttgatatgcaaatgtcggcaattagaaactaggtccacccaacatggcaattcctgccctcttctccttgtcaccacctgtgccaagtgtcatgaccgcctccagataactcatacatgttcaggacatcatggcagctcacgtttgcatattaaagggctaaggtgggagggctagattttttgcgggctacttgaatgtcacacctggtcaaaccaatcccctgggccctatgcaaatcagaccccacctcctccagccccccaatataaccaaccacttttccgctgcacaccggatttctcttggttcagactcccctggccccctccgccgtatgggggagctgttttcttctttctaccaggcaccatgcttcacatatgcctggcatttaggagatactgtctacaattgttaattctaaaggggtcttaaggccctcgcagaggccagttaaacactgccccatcacatcacacagcttcctgcacacccccctcaagttagttcaaagtagctggaacaatagcagacaactggaaacttctgttaggctaatccctctaaaagtaatggacttggggccagatgtggtggctcacgcctgtaatcccagcactttctgagcctgaggtgggcgaatcacctgaggtcaggagttcgaaaccagcctggccaacatggtgaaaccctgtctctactaaatatacaaaaattagctggatgtggtggcgggcacctgtaatcccagctacttgggaggctgaggcaggagaatcgcttgaacccaggaggtggaggttgcaatgagccaagatcgtgccactgcactccagcctgggcaacgagagcgagactccgtctcaaaaaagaaaaaaaaagaaagaaagaaatggacttgggctgggtgtggtagctcatgtctgtaatcccagcactttgggaggccgaggcagctggatcacctgaggtcaggagtttgagaccagcctggccaacatgatgaaaacccatctctactaaaaatacaaaaaaaattagatgggcatggtggtgggctcctgtaatttcagctacttgggaggctgaggcagaagaatcgcttgaacccaggaggtggaggtttcagtgagccaagatcgtgccattgcactccagcctgggcaacaagaacaagactccatctcaaaagaaaagaaaaaaagaaagaaatgcacttgggttattgtgaggtgggagatctacaaagtatactgaattagtccagacaaggattgagttctccacattgagaaagaaaaagacgaatagcacagtaggaaataggcaaagggtatgaacaaaaaaatgtaggggaggaatccagactggccagtgaatgtgtggtgaggggttcagcctcaccggggatatgggaaacatttactcacagtgaggcaccgttcacaccagcagactggcaggtactaaaggtaactccatgcactgcagatattcacgtgtggctgggctgtagagcagcattaggcacatagccaaaggtcccaagggcccaccccagcggagtcccctccatcccctgcataggagactgctctgaacttggtgtgcatggagatgaccagcatctttgaactgttaatctgtgtgtatgtacctactgtttgaaaaaaaaaaaaaaaagcaaaaaccaatgagtcgaatgaaatttcctactgaattagctcctaggtggggcctggccagagatcatgagaataagagcattaatccttgcagatgttcatcctgtccagtggttcccaaactttttgtgggatcattaatgagtagcttttcttatttctgaagaagcctccttgtcactaggaggagggggggtcccagtgccatccccagcagccttctgatactttccccaaggagtcaatggagctcctgccaccctgcagattggccaacagcatgagatctgctggttgggaactttggcaatttaaaactttttgtgtgtgtggcatatagatatacataacaatatttaccattttaacgtgtacagtctgtggcattaaatacattcatgttgtgcaaccatcatcaccatgatctccagaacttttctcatcattcacaattggacacctctacccattaaacagtaacttcccattatcccctcttctggcctctgacagctattctactttctgtcattaagaatttgactactctaggctgggcgtggtgactcacacctgtaatcccagcactttgggaggctgaggtgggcggatcacctgaggtcgggagttcaagaccagcctgaccaacatggagaaaccccatctytactaaaaatacaaaattagccaggcatggtggcgcatacctgtaatcccatctactcgggaaggctgaggcaggagaattgcttgaacctgggagggggaggttgaggtgagccaagatagtgccattgtactctggcctgggcaacaagagcaaaactccatctcaaaaaaaaaaaaaaaaatttgactactctaaatacctcctatgagtagacgcctacagtatttgttttgtgtcttagcatattcttaaaggttcatccatgtaagcatgcatcagaatttcttccctttttaaaagagagttgactgatattccattgtgtatatatatataccacattttacctatcagttcatctgttgataagacacttgggttgtttccatcttttggctattgtgaataatgttcctgtaaacatgagtgtgcaaatatctgttcaagtccctgctgcaattgtttttaagactttgggaaagacatttggcccagccccttgttttgccatgaagcccagaggtaagggctgcccacagccaggaacaggacccagaagccaggccatggcactcctgagactgtattcttttgcagtgacttcccgctgctgggctgaggagcccccctcagaggctgtgcatgttggatataattctgccctttctcctatttatagctatgccctttgccttctgtacgagagagaagcttccttggacagaatttgctgagtcagcagaggatgggcccaccaccagattctgtcagaaggtaggacattaacggtgcctctggcagcagctgccaaatatgtgcaagtcacagagcatgaccacagctgccrggtttggcctttcaccatggaaaatgcacccatttggtgcttgttttgccagataagattagataagactatctgccactttttttttagcgtactcttagaattggggcgtgtaaggctccagaagggccattagctttttcaggcaagggagctgcagcccagggagggtggtcggaggtgacttttgtagcaagtcccacagctggcaagtggcagagctggcattcagggaccagagaagccagtttctcatccagagctctgcatgctccactgcagtttgcttgagtcacagaagcttcgatgcatggcctgtgtctcatcagcatagaaattggttttgatttttcttcattaaaaccttataatacatattgtatgatcccatttatataaactgtccagaataggcaaatccatagagacagaaagtagataagtggtggctaagggctgggggtgagggaggaagggagtgactgctaatggatacaaagtttccgtttagggtgatgaaaatgttctaaaattagatagtggtgaaggttgcacaactctgtgaatatcctgaatactactgaattgcacacttcaaaagagtgactccttgttctgctgtttcccacctctcgctactgtacttgaccaatcttaaagtgaatcttatgctctgtgaattatatatatatatayattttttttttttttttttttgagatggagtctcactctgttgcccaggttggagtgcagtggcacgatctcggttcactgcaagctctgcctcctgggttcacgccattctcctgcctcagcctccggagtagctgggactacaggcgcccgccaccatgcctggctaattttttttgtatttttagtagagacggggtttcaccgtgttagccaggatggtcttgatctcctgacctcgtgatccgccacctcggcctcccaaagtgctgggattataggcgtgagccaccgcacctggcctgaattatatcttaataaaactgttatcagaaaacccatgaggtgacgaatggtcatttatccttattttcacctctaacacaataactcttttcatttctttgtattctctttcaggttttatacatatacttaggggcttttggggcagagctataatcatggtgactttatcaatactcagttgtgattccaaacatcgatgttctcaggctgtaggggaaaaaaaaaaatctctcattcaccaggttgttgatttcttgctatggaaaaaagaggaaggagactggttaggggacttttgcagatgataagtctgagccagggctggaggaagagtgtgaaagagagctggtgccagagacactccgcctccacagggacctgaggctgcccttagcatggctcctagtgttgccttctgagcatgcctctcccctatcctgttgttaaggccagagatcatgacrgctaattagagtagaggacaaatgacccgctgggctgctcatcctgtggtcaccagggactgatgttcttacttgagacaaaaggaatttgatgccaaagaaatttatttttggcatagataagtcgtttgattattatttttattcttttttcaagtggtaaaatatacatataaaatgtacyattttaaccacttttaagtgcacagttcagtagtgtaaagtatattcacactgtgcggatctccagaatttttgcatcttgcaaatctgactctgtcccattaaacaatagctccccattcccccagcccctggcaaccaccgttctattaatattatastttccatttctgtgagtttgactactctagataccttacacaagtggaatcatacagtatttgtctttttgggactggcttatttcatttagcatagtatcatcaaggttcatccatgtgtagcgtagaaccrtggcatctaaggctgaatgatactccattgtatggatgtgccatgtttcatttatccattcacccattgatgggcacttggttggctcccacctctttgctattgtgaataatgctgcaatgaatatgcgtttgcaaatctcttctgctttcaatacttttggatatatacccaggattaggattgccagatcaaatggtaattcttgtttaattttttgaggaactcccatatggttttccagagcagctgcaccattttactctaccaccaactgtgtacaggacaatgtgattcttatttagcaaagcatggacatcagggtatttagtgttccaaacaacaaatgcaagtggttgctctgacccaagcctattgatttagtaggatcattcttctttgataaaaaactacaacaattggtttataagtgggactctgccatatttatcatttttccagctggcgaagaaccatgacatggtggtggtgtctcccatcctggaacgagacagcgagcatggggatgttttgtggaatacagccgtggtgatctccaattccggagcagtcctgggaaagaccaggaaaaaccacatccccagagtgggtgatttcaacgaggtgagccacccataagatagataaccagccctgctcacttgcccctctgtatgttgtagatctctgtgggactttctgtggggaagttctgtgcaggatcatactccatgtcacgtacactccacgggagcacagtgtggctgcagtgctcagagggttacctgacattgccctatatcacacaggcagacaggattcaggcgggactctcagaggagtcccaaacacctttagcacaatggggcatatatttttttaatacaacctgatttggcctcctgaattctttgaagtaagtggtatataaattaaaaccaaaactaaatattgcacaaacatgaaatgattcctgtggcccctttcaggctcagagcctagcacgccacagccctgtccttgtttggagcatggcattccttgtctgtggatcatgggggggtctgaggtggcccatgtttgtgtgtcaggtggcagtaggcaaacatgcatgtctgtatactgtgcattatgtgaagtttcatgtgcccatgatcagggcataagttgggggggccattttggttggttaatgccaacccctgggtgggtaagatgggagcggtggatgtttgaaggagggaaatgacctctgcctaatgcctaagatgttaaatctgaacttgatttgccattaatrcagttgttcaggatgtgatgtccccagttctctctccatgaatgtgggggtcctggccgttctcaggctggtcaggcagataagaaatggcctgcagagctagaggaggtttcccagggagaaagaagaacccagcgtttctcagtaacagctggaggtgggggtgggaagacgcgcccctcacctgtttaccctgggattaatctttagctccctgcagatagcacagggcttgtctcagcacagcaggatctgctccggtgttcaccacgtgcacacatcctggttgctgcctgaccctggccaattttgatggccaggatcaggaggaggtggaaggctcctggagcagatctgtttgggaccctgatttgccctctagcttccctcagtgctgtccaggacagtgtccctgccctggcacccttaggagcagacagagaagcagggatgggaggatggggtctggtccgcctgccccacagggacctccttaaccctaggcaggatggagaaggtgcgctttcagggtgtgggttccactagaagctttggccttaatcatttgggcgagctatgccccctcaggaagcagctttctcctctgaccagggagagagttgcttggatgtgctccaggtctccgggctccaccgttctatataatgacatgtgattgctgagggcattgaccaactcgtgttaatgccaaccaaacccgagccttgagttggaccataattgaaacctcaccagagtttgaaatagtgtggaacgtcattgtggggatttttgtgacatgtcagaaaggagactgggcaaatgcttaagccactgtgatttcccccgggggctggcttatttggtgtcagggtttttttgtgtgtgttttgtttttatcatattgaaattctggaacttagagtcacactcaggagtgtaaccacctctggactattggtgatatttcagtttttctgctgagtctaaggaaatcttgaaggtcagaggcatcagtatatggccctttgcttttcagtcaacttactacatggagggaaacctgggccaccccgtgttccagacgcagttcggaaggatcgcggtgaacatttgctacgggcggcaccaccccctcaactggcttatgtacagcatcaacggggctgagatcatcttcaacccctcggccacgataggagcactcaggtcactcagttggtggggtctggggggcttcctggggcccagccagctaaagcccaaggctgggctgtggagctccaaggtggcagcaggcaggcgcagccaccaggatgttaacagagctgagcccccaggattgcatgttgtacatgtgaccagcttttcagtgaaaagaatcctcaagatggcaatgagcaatcccccacccgcagcaagagctgctctacagtaaaacaccaacctctgctgtgattctgaacactgagatgaaaataattcccccctttccctgtagtcagcagggggcttcaaaaagccccacattgggctgagctcggtggctcacacctgtaatcccagcactttgggaggccgargcaggtggatcacttgaggtcaggagtttgagaccagcctagccaacgtggtgaaaccctgtctctactaaaaatacaaaaatcagccaggcgtggtggtgtgtgcctgtagtcccagctactcgggaggctgaggcaggagaatcacttgaacttgggaggcggaggttgcagtgagccaagatggcaccactgcactccagcctggtgatagagcgagactccatctcaaaaaataaaacaaaacaaaacgaaaaaacaaaaaagaacccccacatctaagtccttggagcatagtaggtgcctagccagcattggctcttggatggggaactgtggattcctagtcctcacatctgcagcatcctgcacaggcaggacagacatctggacaagagaagctgcaaatgagggagttggagatcagtcgaggaaacttgtctttaaccagagaagggttttatttttataacacataacaagtgtttcggtgttagcctcacccctaaacagatagaaytgcccttgtcaaggcrgggctgggggatgaggggagggtggccccggaagcccgagaactgggcagtaccccacccctggggcccctcatttaggaggggcatccagcgagctgatctgactgcatgactctgctgctgctgcctctctcttccacaaaggctgagcatttgggtggtttccagttttgcatcactacaagtaacagaactctaggaatttatgtgcaaatacttttctccccaactcacttctttccaagcaggattcctgcagcaggaggtgctggctttcactttctgtggtcttggctgccagtgtccccagcaggacaggggtgtgccctgtcctgccatgggtggggagcagggggagttctggtgggtgtgcagctttagtctctgtcagcctgcacttgtctctcttgtcctcattcttgactaaatttcagttgaatttcttcttttttttttttctttgagacggagtcttgctctgtcacccaggctggagcgcagtggcgcartcttggctcactgcaagctccgcctcctgggttcacgccattctcctgcctcagcctcccaagtagctgggactgcaggcgcccgccaccatacctggctaattttttgtatttttcgtagagatggggtttcaccgtcttagccaggatggtctcgatctcctgaccttgtgatccacccaccttggcctcccaaagtgctgggattacaagcgtgagccactgcccccggccaaatttcagttgaatttcttctaaacgtcagggtgtgacatttaccttttcttttcatacagtgcccctttctcaagagtaatatcccctccccattcaacatttatttacatagcaggttccttctggagccagaatgcaacccctcctctgttacctcaggtctaccaccctgcccatgtacctggaggtctggtccatgtccaggaggggtactgttgggtagaaggggaatatcaggcctccatctcccctcagagaacatactggagtctcatggtggtcagatcaccagtgatagcattcattggtggttgtcagtagggtttttactggtcatccagctaccaggcctgggcagaactttggggccaccccctaaagcagccccctctgctggctctgggtaagacacttggcaagctccatctycccactggggtccctagaggaacccgaagcactagggcatctggcttctgggccagggcagacaaagttgtggctgtggactcagatggctcctcgccttgtgtgtgcagaggccctccctgaccctcctatctcaggcttttattggctccagttaggcaaacagaagcaccccagtgtaatatgcatataattgctatgtcctcagcagcctattaggcttattaaaaatgattgatttttctttcctcagccaagaatcatccaacccttggctttccagggtgtggtgaggctggcagtaaaaactaacaggtcttttggaaagcagtatgtttcatgagctcctaaaatgctcatgccctttggcctgataatgatgctcctagaactgtagcctgaagaaacaatctaaaagaggagggaaggccaggcacagtagctcacatttgtaatcccagccctttgggaggccaaggctggcggatcacttgaggtcaggagtttgagaccatcctggccaacatggtgaaacctcatctctactaaaaatacaaaaattagccgggcayggtggcaggcacctgtagtcccagctacttgggaggctgaggcaggagaatcgcttgaacctagcaggtggaggttgcagtgagctgatattgcaccmctgcgctccagcctgggtgacagaacaagacagaaaaaaaaaacagggaaaggcaatgcatgtgaaggtgctcacaacagcttacttacaataagggaaaagctgacagcgggggaagtgtctgagctaagcacattacagcccacctcttccacaggttattgtacagccactataaagagtcatgatgaaggtaatkcaaagtgatgaaagcctgtgagcaagaaaaagacgtgttcaggctgtggtcagaactcttggaaaaaaaaggaaaaaaaagtttgcctatggatgaggatagtcatggagtgtggataaaaggcaacaggtggtttattaagatggtaggatcctggcttgttttcttaaaatgatgaatgatggaattgatagtgtttttcagcataatgctgggcaaatccccaccagcattggatcacagcatccagaaccatccatccccttttctggcaccttctgccgcctgtattagagacagacatacacatgtgcatgcacacacatgggtcagcagggtgtcctcattcatttttgagtcccacagttctaagtacatagtagtgtctgaatgcttttgattaggttatcctcataatccaaggatgtgtcccttacagcttgggtgaccaaagatttctaccacctgtgtacattcattggcaagtcaccatcctatcctcttgctgcatcttgcctttccactgcgattatttttaggggtgtgtgtgcaccgcgctgggaatatggcaaacgtccccactccccatcagacgtcatgattcctgcacacactgggctctcactaaccccagcttcctttcccctggtggttttgagagcataaattttatttccagctgtgggtttgggtcctatgcagaacacctccctggagaattgcaactaagatgtttatggcaatcgccctgcaagtgtctatttaattcctgaaaatgtcatttactggtgtgtttctgtaaaaatcatttctgaaaagttttgtcagcttggcttagcagctgggggaaaaaagcagcaaaatgagtcccctcaatcaagcctgtgattttttattttttcagactcatgaatcctcctgagaattaggcttatgacaagcacccaccccctccacctactccctggtttaaaccaggtgcctgctgacacgaaggaagattccggggcattttgatcctagtcacacagtgtttctaagtgggcattactcctgtcaatccacagtcttaaagatgttcctcagacaaaagataattagtgacaagaaggcccactagattccatgtcatatcttagttggcgggccagagaaggacagggtctctggttggggccgtgtctcccatcgcattctccctttgcaggtgctgaagtgaggaaggcccacagctcagccaagcacatggggtgcctccctcctgggccactagcccactggccagtaagagaaccagggagcctttacttagagactcaaggttcagaagagggaaatgggaagtcactgggaaatggcccagcttggaggaggtgaccctgctgccgaatctgaccccttatcctattacctaagttcctttcttgtttactggccctgaaatcacccgctttggagattgccttgcaaggcagcatagcagagtaggagagttagggtagggcaggtacagcctgtgctcagccctcacaggccctgcacaagcccaccaggcccccggctcccttctggcattcaccaggagaggttctgcccagcccagcaggtgggttccaggagaagggatggaggtgggaagtggtggttatggaactcctrccacttggatcttcacctgcatggtcattcagtcttcatagtcttcttttgaggacatttcagaaaaggaaactgaggctcaggatgaggatttgatccagggctgctaattcttctgacagagcacagccacgtggcttatgcctgcagcaggcccttcccaaaggctgttcaggccagggcaaggtgctgaggacaggctggcctggttgcaggtttggggtgtgaccrgtgagtctcctggttgtccccaccactggcccaggaaagcctgcagccaggccaggctctgtccccaccactggcccaggaaagcctgcagccaggccaggctcagggctgagcatccactgagtctgcctggaaagtcggcaacctggttcctcttggtcctctcttacagcgagtccctgtggcccatcgaggccagaaacgcagccattgccaatcactgcttyacctgcgccatcaatcgagtgggcaccgtaagtcccgaggtctggctggggagaggagccaccacctggtggctctggtggggacaccccgttccctctgcacacatgccacaaatcctagggtccggaaaggggtaaaactggcttggtccgttacttttcaagatatctctgtcctcctgttttttctgtttttgtatttggctgaagcccttttgaaaagatctttgacatggcagttctcaccctatcacctccaagtatccagtttattttccccattgaccccatacacttaacagttttgactgccaaacagaatgcacttattatatctcttcctcatccttattaatcagatagcaaactctaatcagaagatcttttcagtctgagataaccaaggtttctacactaagtctatctgacttctagcagcataaagaaacctgatgttttggctgggtttggtggctcatgcttgtaatcctaacactttgggaatccgaggctggcagatcacctgaggtcagaagtttgaaaccagcctggccagtgtggcaaaaccctgtctctactaaaaatataaaaattagcagggcaggctggcacgtgcctgtgattccagctactcaggaggctggggcacgagaatagcttgaacaaggaggcagaggttgcagtaagccaggatcgcgccactgcactccagcttgggtgacagagtgagactctgtcaaaaaaaaaaaaaaaaaaaaggccaggtgcggacgctcatgcctgtaatcccagcactttgggagaccgagtcgggtagatcacctgaagtcaggagttccagaccagcctggccaacatggagaaatcctgtctctactgaaaatacaaaaaattagccgggcgcggtggtaggcgcctgtaatcccagctactagggaggctgaggcaggagaattgcttgaacccrggaggtggaagagccgcggtcgcatcattgcactccagcctgggcaacaaaaatgaaactccgtctccaaaataaataaataattaaataaataaatagaaargaaacctgatgttttagttagcctatgtaaccccatcacaggttgatgtacagtttccattaggttctggaggaaatactgaaagcagtgtgtgtacctgcccactgccttcacacacccmggcctggggttttaattacttcaagcaggccagcctcaggtgcccacagccctgagaaccagtctgtgcccagtttctttctcttctctcagattatgaactccccaaaggcaccatccaggtttttaccccgcttgtcaaattcccctctggcccagggctggctgctcagcaggagtgtttaataagcacttaattgcccggtgagtacagaccattccagctcaccttaactgtttcctggctgactcrcctctcggcctgattgccctgctcatctggctgagtgngctggaatgagtgtagtggtagtgccacctataggttcctcttaccttggtcttatttcacaggagcacttcccgaacgagtttacctcgggagatggaaagaaaggtatgtcccatgaaccatggtggctgcagttgaggagtgggccttcctctccccttctctgtctgcttcctccagtcaggatctgccacacagatcacatctgcatgcctggcacctaggaggaggcgccaattcctctctgctttattgcctgcagtgtgggaatcgggctgtgrctggggtgtggataggcagtcctgagcttgagragtgggttggactccatccattcccygggactggtgtgaaratgaaccaagaggatgtgggggatcctctgtgagctctctgaaagggagaggtgctctcatccagcccatagatctccctttccactttcctttgtccttgtcccccctccccttgcccaaaccagctgtactgatgccacagggcattggcatggatggccctgggtttctagagtccatggcttgttttgatccaagggcatataccacctcacctctgctaagaaccctaaagactcctttcccatgtctctggccaagaatgagggaggtagggactgcccccctcaccaaggaggtatctgaaccttggtgaggtagcttggacacttggaggtagctcagagtgtcctctagaaagccaggaggaggccaggcatggtgtctcatgcctgtaatcccagtactttgggaggctgaggcgggcggatcacctgaggttgggagtttgaggccagcctgaccaacrtggagaaacccagtctctactaaaaaaaaaaaaaaaatacaaaaaattagccgggcatggtggcccatacctataatcccagctactcaggaggctgaggcaggagaattgcttgaacccaggaggtggaggttgtggtgagctgacatcgcaccattgcactccagcctgggcaacaggagggaaatgccacctaaaaaaaaaaaaaaaaaaaaaaaatgccagaaggggctgagcgagtctgttttccaggaaaacacttcctgaaagggtcccagatgccgccatttcaggtccccygacttctagagtccctgatcctagttaacttactgcaaatagagatgcagaaagggcaggggaatgagcgtccactgggtgcctgctgcatctgggccatgctaggccctgcccagccccacctgctccttacacatgtgtggggtggctgctagtcctccctgactggtgaagggaccaaggcctggagggaggataagggtgacgcagctggcaaggcagatgaaggcagagcctccagctcactgtgagggcccccataggaagcccccagagtgtgactttctgttttccttaggctgtgggtagaagygacacctctcagaagggtgacatttagacatttccccaggggcaaagggaagcagcataagggggccatttgcagcaatttgctgggccttcaggcctgagatgagagacaggccttttgggcctcagcatttggcagacactggggaggatggcatggactccgtgtcctgggcctgcctcaaggtgcctgaccctctgtggagcccacagtgcatctacacaagctcacagatgtgtttctttgttcctttaaagctcaccaggactttggctacttttatggctcgagctatgtggcagcccctgacagcagccggactcctgggctgtcccgtagccgggatggactgctagttgmtaagctcgacctaaacctctgccagcaggtgaatgatgtctggaacttcaaggtaggtccccaggacccctgttgttgcctgctcctctgctttggccctcatcctgctctcaggaactgctgttgcggggttgcccatggcagcatgaggtaccagctcccacctgagggctctgtgtgagctgagggctgaatctctgcctccttgctggctcccgggaggaacagttgggtcaaacaatgtacaagcagcaggctgcaataaattctcctctcatctgatttagattctgggtgccttcagacaaattaatctcaatttcatttgtccagagaatagaatggattggctcctctaatcctttttcctttccaggcatttgcacttatcacaagataaatatgcatgtctggttctgcttgtggccagtccctgcagtctaggccttgacgatagcaggaaatgggtcatgcagagaaatggaatctaggcctggctctgccacagccttccttccttggtcaccttaattaagccccttgtgctcccaagccttagtactcccagttgtaaaatacggggcttaactcgaaggtcccatgctggctttgacacctaatgccctgtgatgtcaggagtcagaggaatggagatgtctgccctcctgggatgggactccaccctagaaaggctcacagcttcagagtttgctgtattagtgtccgaaagtatttccaccaactcagcacccctttttcttttttggtggagtagggggcatggagacaaggtcttggctctgtcatctaggctggaccaatggcacagccatagatcatggcagccttgacctcctgggctcaagccatcctcccacctcagcctcccgagtaactgggactataggcgtgcaccaccaccacacccagctaatttttaaaattttttatagagaccgagtctcactatgttgcccaggctggtcttgaactcctggcttcaagcaatcctcgcacctcgggctcccaaaataccaggattatagacataagccactgtgccctgcctcagcaaccttttataagcaaattgtatatgcaaatgtccattgttataactgactttgcccggtgtgactaaaagaccaccagggcctctaatccacccagacatgggcttttggccttgatcctgttttctgagcatgggttcctcagtctcggatccttgtcagacaaacaaggtattgggcatgagagagtctcctgacctctctctcctcttcctgggcaactaggatgaatgtaggattccacccaaatcagaagggagccaagaatgctggccaactctttttaataagtatcccaggagcagtaaaccaaatgttttctcattagacacttcttagaagcagaagccttcccaactttggtaatgggcctgagctcctgtcaaggcttttgggagtaatccaccttgggaaaggagggagggagggagggtgtgctgggtgtgagcactgtgggtgggctttccaactccaccagcctctgtatccacgatgagatgccacatggagtagacagaactccaggcccatccaggagcccctggttcaaatcccagccttttctacaactggctagtgacctggagcaggtcactcctctctgggctgtaggatgctcttctggggagcaacaggaccacgggactccccttctccatcctgcctcagcagaccacactttctggatagacaggtcgaaggggtcacagcagccaatgctgggctgtatgagtcattgtagcatctgtgaactttgccacagtactagaatcagtgccaagaggtcactgtcaacgagccttcctgatgcgttcctgccccatgactgccctccagtggcaagaggtggtggcgtgtaagtgatggggatttataaaaccagaacctctaaagtacatctgtgttttgctttcagatgacgggcaggtaygagatgtacgcacgggagctcgccgaagctgtcaartccaactacagccccaccatcgtgaaagagtagccggcttcagtgcctgccttggggtgaggaagacacctctgccccagtggattagcaagtgtggcaggcttaacatgtccaggttctccccaataacattgtccaggttggttttaaaattcccaggcagggggagagtggcatggggagtgacttcttaatgggtaaggggctgcttacttctggggtattggaaatgtttggggactaggtagaggtgaatgtactaaatgccactgaatttgtatacttcagaatgtttgttatgtaaattttacctcaactaaaaaaaaaaatgcccaggtactgcttgtgcaggtggatttgaggttaggcagatgatgctgtccatcccgtacaccagtgggaagagggtgagggctgatccagagaccctgagcctacagcaaggctgtggtgggtcggatggtctttggatgtgtcagcttagctaggccacagtcaccagtaattcaatcagacactaatctaggtatttctgtgaaggtattttgtagatgtgacagaagtccattcccaattgactaagtaagtgagattatctcagataatctgggtcagcctgacctgattagtcagaaggcctaaagaacagagctaagggtttccctgaggaagaaattctgcctgaggacagcagcccagtgcttggcgagagttcctgacagkctgcccttctgatagcctgcctcacagagtttagacatgactagccagctcctacaatcactgaagtcaattccttgcaataaatctcaatatatcccctactggttctgcttctctagttgaatctgactgatacagattttggtgccaaaagtggttctagaaaaatagaatcttaaagatgagttttctgcattggttctggatttttttagaattcttccctagtttgattgaacttaaaggcatcaatgactctatttccatagagtcagggtaaagagggtagttggtagtccatggcatggtgcagcaatagttatttatgtgcgagactagccatcagccatcagtttgtgcccagagttccagcctgccctttctgatggcttgtcctgtggatatcagacttgcctgaccagattccatcatcatagaaggtaatttgttgcactaaatccttttatatctctatccatcacctactaattctgctagttctgctaatgtggttgagctccattttacacatcagattactcacttctctacaccttggtttttacatctgtaaaatgggactgggccaggtgtggtggggtggcttatgcctgtgatcccagcactttgggaagccaaggcaggtggatcacttgaggtcaggagttcaagaccagcctggccaacacggcgaaaccccgtctctactaaaaatacaaaaattagctgggcatggtggcgcatgcctataatcccagctactcagcaggctgaggtatgagaattgcttgaatctgggaggcaaaggctgcagtgagctgagatcacgccactgtgctccagcctggacaacagagtgagagcctatctccaaaaaaaaaaaggggtggggaccatattcctgctttatgtcaagacactggtaagagacagactagatgggccagggagccccttggcagttatcagtgcagcgcctatttagccctgtccctgaacaacacggcaagagcccaacctgccaagtctcaaatagcagttaaccagagtatcgggttggaggtggggttgagattctgtaattccccgcttattgttcccaatcagagaaggcagccagagaaggcagcttcatcccttcactggcccagcagctgaactatatggaaacctccatgtcagggctagggtactcctggacagccaccaaggatgagaaaccctgatggagctgcctggccacagctctgcggtaacttccttgaactctctgtgctgcaggttttcactttacctaatggcccttcttgcacctttaaaaaaaaaaaaaaaaaattccagtcctacagacacagtgagcttttttgcctgttcctttagctttcaaaatttagtgtcagccaaggcgggcagatcacaaggtcaagagatggaaaccatcctggccaacatggtgaaaccccatctctactaaaaatacaaaaattagctgggtatggtggcgcacgcctgtagtcccaggtactcagcaggctgagggaggagaatcacttgaacccgggaggcggaggttgcagtgagccgagatcacaccactgcactccagcttggcgacagagtgagactccgtctcaaaaaacaaaacaaaacaaaacaccttagtgtttttggtttctagagggtgtaatcaacctaatacagaagccagcttaggtgacaaattggtacatttgtgaaacaggcatgaataaatggaccacaactctttgattatctgcaactctcattgcctggaaacagaacagtcaggcccatcttagagtatgcaggccctgtacagccaaggtcatttcaaggtttaactcatccctggaacatgcagatgctcagtaaacatttgaatgaatctgtggtggaggtttttgcttcctggtgatcattgctgatgctacagggcagtctctcagacaagaaattgcagtggttcagtgtacatggcctgcaggcctgtgggcccctgtgcaatcttggatgaagccttctgacccctcagttttctcaccggtaagataacaggtggctgggctcaagaatttctccctagaaattctcagttctggaaggccaccttcctgccaggctatagctttattgccggaatctggggtggagtaggtgaacttcagtgtgcccaaaagaaaaaaaggaggctgtgcacagtggctcacatctgtaatcccagcactttgggaggctgagacagggggatcacttgagctcaggagttgaagaccagcctggacaacatagaccttgtctctataaaatttaaaaaaaattaataggaaaaaaagggctaaggcattattaaatataaaccagaccacgtattagaccacaaaaaattcccagtaaacttaaagattaaaatcataaaagtgtattttcccatcacaatggaacaaaactagaaatcagtagttgaaagttttaaaaattaaacaatggccgggtgcggtggctcacgcctgtaatcccagcactttgggaggccgaggcaggtggatcccaaggtcaggagattgagaccatcctggctcacacagtgaaaccccatctctactaaaaatacaaaaaattagccaggtgtggtggcaggtgcccgtagtcccagctactcgggaggctgaggcaggagaatgtgaacctgggagatggagctttcagtgagccaagattgccccactgcactccagcctgggagacagagcaagactccatctcaaaaaaaaaaaaaaaaaaattaacacactttttgttttctgagacagagtcttgttctgacacaactgtggctcactgcaatctccgcctcccaggttcaagtgattctcgtacctcaccctcccaaatagctgggactacaggcacatgccaccatgcctggctaatttttgtatttttagtagagacagggttttgccgtgttggccaggctggttttgaactcctggtctcaagtgatccgcccgcctcaacctcccaaagtgctgagattacaggcatcagccacccttcctgaccaacaacacacttttaaacaaccaatggatcaaaaaagaaatcataagggaagttagatatcttgagacacatgaaacaaaaacacaccgaaacctgtgggatacagcaaaagcagtactgaaagaaatttatagctataaatgcttacatttaaaaagaagagtctaggcatggtggttcccacccataattccagcactttaggaggctgaggtgggagaattgcctggcccctctacaaaaaatttaaaaattagccagggatggtggtgcacacctatagtcccagctattccagaggctgaggtgagaggattgcttgagcccaggagtttgaggctgcagtgagctaagtgagctatgatggcaccactgcactctagcttgagcaacagagcaagatcctgtctctaaaaaaaaaaaaacaaacaaacaaaaccaactgaactgtacacattatttacacattaaggcacaaaaaaagagcaaatgaaagagctaacagaaggaagccaataagaacagagctagaaggaagataacagagctagagaatagaaaaagaaaaaaagagaaagtcaacaaaatcaaaagttgcttcgtcaaaaagatcaacaaaattgacaacctttagctagattgagtaagaaaaagagtcaaattactaaaaggagaaatgaaaatcgggacactactaccaattctacagaagtaaaaagggttataaagtactacagacagttgtatggaaacaaactggatagcctagattaaatgggcaaattccagctgggcatggtggctcaaatctgtaatcccagcactttgggaggccgagaccggtggatcacttgaggtcaggagttcaagaccaacctggccaacatggtgaaaccctgtctcactaaaaatacaaaaattagctgggtgtggtggcgtgcgcctgtactcccagctacttgggaggctgaggcacgagaatcacttgaacccgagaaacagacgttgcagtgagccaagattgtgccactgcactccagcttgggcgacacagagtgagattctgtctcgaaaataaataaatgaatgaatgagtgaatgaatgaataggcaaagtcctaaaaacaaaacctaccaagattgagtcatgaagaaatattaaaaagcacaaacatcagatcaaaaactgaatagtcagagattttactctatttgcaagctaggttagcctactgcagtagtttcacagatgctcatagaagatgtacttttttttttttgagatggagcctcgctctgttgcccaggctgaagtgcagtggtgcaatctcagctcactgcaacctctgcctcctgggttcaaatgattctcctgcttcagcctcctgagtagctggaattacaggctcctgccaccacacccggctaatttttgtatttttagtagagacaggatttcaccatgttggccaagctggtctcaaactcctgtcctcaggtgatccacccaccttggcctcccaaagtgctaggattacaggcrtgagtcactgcacccaaccagacaagacactcttgggtcagacacaaaggacagtttattacagcaatagcagtagccagagtaccagcattttcttacagccatttcccaagcccagttcccttagggcaacacaaagaggaccaagtgaatcctgcacatgcagtgggttttattgaggaaaggaggagggaagagagctaacagaatttgcgtcttttatattggatggttggtatgccttccctttgcactaacaggaggcattatctccaccaaggtcacaagaacacctgtcctttgctctgtagatgcaaagcacctgtgtctatcttccaaggctatgccagcttctttgaaaagatagtctagaacaaaggccttcatagttttagctgacaagacacatacagaaatgtgagagacctgtggacaattatctcccaataatatccacscctcatttccacattgtcttggcttctggcaattttcttatgggtatgccattttatcagtcactgattaatctgacaataggcatagagcaaatcagttcagcttgtctcacagaatttaatttaatgaacagcatttcaacagaatgagtccaacctgcaatattaaccccaatcctgaccccagggttttytttttttmctttatttctttttttgagacggagtctcactctgtcgcccaggctggagtgcagtggtgcgatttcggctcactgcaagctccgcctcccgggttcataccattctcctgcctcagcctcctgagtagctgggactacagacacccaccaccacacccggctaattttgtttttgtatttttagtagagatggggtttcaccatgttagccaggatggtcttgatctcctgacctcgtgatccacccacctcggcctcccaaagtgctgggattacaggcatgagccactgcgcccggctgaccccagggttttcaactcaacaggttgaacaaatcctataaaccatcaaggtctacctaagaaagccaggtgactttctcaaatattgacctttccactcagcccaagtcattaatccaggtacagcaggatatattagatattgcataatctccactggtggttcacagggaggaagcctagggcaactctgtcatccatacaacctccaccctggccagtgagttgccgctgacctgaatgccttccaggggcaaggtggtaccactgatcacccaactaaagttagagacaaatgttgcatcacctttcctaatcagaggactcccatcatagggataataagtgcacataaggaatgagtcaattatcagtccaagaagttcccctgagtaaacaagggcagcctcactttagaaagatcttcacagttgtcagctgggtgcgatggctcacgcctgcaatcctagcactttgggaggccaaggcaggtggatcacctgaggtcaggagttcaagaccagcctggccaacatggtgaaaccctgtctctaccaaaagtacaaaaaaattagctgggcgtagtggcaggcgcctgtaatcccagctccttgggaggctgaggcaggagaatcgcttgaacctgggaagcagaggttgcagtaagccgagatcacgccactgcactccagcctgcatgacagagcaagactccatctcaaaaaaaaaaaaaaaaaaaatctccacagttgtctgtgggctacataatctattggtggtatttgcttaaacacttgaaggtctcttgaccaccctgaaggggcaagacactattttggggaggatgatgagttaatgtttagcctccacacaagtacagtcacaagggcacatatcgttacccctagaaaatatttataattgttggaggtcccccaagtgggacctatatttgttggagcacaggtcctggccacctggtggggcttcaggttcccagtttactttcttttttttttttttttttttgagctgaagtttcgctcttgtcacccaggctggaatgcggtggcgcgatctcagctcactgcactctccctgctaggttcaagtgattctcctgcctcagcctcccaagtagcttcccagtttgaataattcagtctagtccttgtatttggaaggacagcctgagggcagttagtccaatctatcccatttgtccataccactagcaaggtggcactcgttctctccacagaatggctgagtggagtctatgggaatagggatgggaacgacaactgatggtatcacaggtgattttcatggaaggtgcaggagccagggacatcccctgctctttccagtggacttctggtaaggttaatgggaatggtgagcaaaccaaatggtggccaaagccatctgttgttggggcaaggcagaacccacagtcgttaaatttgtttwatttgagacaggttctcagtcttgcccaggctggagtgcagtggtgccatcacagctccctgcagccttgaattccttgcctcaagcgatcctcccctgcaacttcccaagtagctgggattacaggcaggagccgctatgcccagctttgcagtcagttaaatttgaggtgcttgcaaaagcttgggagagctgcacagatcttttttatgttcataaggaagtcttcaggggcaattatgaaggacaaagatcrtaaatgcctccccctctttatctcctggaatccaaagtattttctgtctaggtgccagaattgctgctccccctcccaaatcggtgtctcatttcaatacctatagtcacttctttaaggaaaaagaggtgactggactgaccagtaccagccacctccttttccagttatcccctttgtgcacctagactttttgattcgaagagtcaggtccaagaggaacaagggcatgtttacaaaatgcgtggggacccattatgttccccactttgtcctgtatgtgccaccctaaggggtctcagcgagcagcgtacttgcccaagtggtcattattcttatgctctaagaccatgtcagtccaacaagagaatccaggtggctgaaacacaatcaggtttgagcccctagacccccttacagttggactgccatctaggaggtgtgcccaccaggctggcctgggattgctgccaggggaaagcaagcaagcaacacgcccaggaagagtctgatcagaatcccaaattttaaaaatatttctttataaccttcctacacctcttcattcagacacaccttgctaggaagtagcctttttaaagacagctgcatttggtgaccaaaatgttttaatagggccaggcgcattggctcatacctgaaatcccagcactttgggaggctgagatgggaggactgcttgaggccaggagttcgagaccaacttggtcaacatggcaagaccccatctctacttagaaaaagaaaaagtggggtgcagtagctcacatctttaatcccagcactttgggaggctgaggcgggtggatctcttgaggtctggagttcaagactagcatggccaacatggggaaaccctgtctctactaaaaatacaaaaattagctggacatggtggcgtgtgcctgtaatccaagctacttgggaggctgaggcaggagaatggcttgaactcgagaggcagagccaagatcgcaccactgcactccagcctgggcgacagagcgagactctgtcttgaaaaacaaaaacaaaacaaaatgctttatgaaagtgtgtggaccaggaaggagggagaaaagtagagtcagagaccttgagttgattttttttttttttttttttttgagacggactcttgctctgtcacccaggctggagtgcagtggcgtgatctcgggtcactgcaacctccgcctcccatgttcaagcgattctcctgcctcagccttcagagtagctgggattacaggcacccgccaccatgcccagctaatgtttgtatttttagtagagatggggtttctccacgttgctcaggctggtctcgaactcccaacctcaggtgatctgcctgcctcggcctcccaaagtgctgagattacaggcatgagccaccgcacccggcccagtttttgaggaagccattccaatactcaacaatgccagaatctcatgatggcagkagtgtggaagatcttttgaataccactattgttgagtggcttttatgataaaaggtgcaccattgtcacactgcagatggtccagagagccaaaacatgacacagattagtttcaggggttgcagtggtatgcccagagctggttgataggactgcaacaatccaataacctgaaaaagtgtcaacagtggtaaggcaccaccaatagccccaagaggtcaaaggtctaatgragttgatctgccatgagtaggctgaggccacgccctgtgcaagatgacctcctcctatgcaagagaaatgggccaacctttggtaggaatcacagcctggtatgtggtggtagcgtctgcatcagaaatagtcctttccagctgggtgcggtggctcatgcctgtaatcccagcattttggaaagccaaggtgggtggatcacttgaggtcaggagttcgagaccagcctggccaacatggtgaaacgctgtctctactaaaaatacaaaaattaactaggcatggttgtgcgtgcctgtaatcccagctacttgggaggctgaggcaggagaatcatttgaacctgggaggcggaggttgtggtgagccgagatggtgccactgcactccagcctgggcgacagagtgaaactccatctcaaaaaaacaagcaaaacccccccacacacatacacaaatagtattttccattgtgcccagtccatggtggtggatgtgttgccatgtccggcataatgatggatcccagtagcaatatggctagtgcaggctccctcaacagccttatttccgttggtctaatcagagaacaggcttcaaccatggacatctacatgtgtgacccagacagagcaatcacagccaaaacttatttccatagttcatgaccccaaagatgggtgtctttaatctgccagttgaggttttctaagtgtcagaccgaacacctaggccattggcaacaccccaagagtcagtaaaaatataacaagggttaccaagaggagtattggctcagggcctactgagcagagttactcatcaattttctgttctgcgcagctgtttctgagggtgaacagccacagcagccctgtggacaccatgaggcttccacttcatcagaccatcagtgaaccaggccctggcatttaggagaacctctgtgaacttaggttcctgttgacccagtgactttgctttggtggagtgggggatataagtgtcccccaaagggttagctgccagttttttcatgtaaaactgagatgtcagcagggctagactagctgtgttcttaaatataccatttccatcttaagtacacgtacattccataaaagccatccttttgtgggtcaggtattctgttgtaagaagccagatagtaagcttttcaaaagagaagtacctggccactgtgtcagggagacaggcagtaagtccaaaacaggggcacctctgggtacagtctgcttccctttgccaaatgttccaattagcaaaattagtcacagagacttatatagctcaaagggatcattgggttgtgaggacccacaggtagagtgggcttgctggacagcttccaatacagctttctggcctgggccctgctctaaagggtgctggttggcaagttagcagatgtaaaggaccaagtaggatgcccaaagtgaggcatatgctgtctgmaatacccaaggagtctgagaaggtgcagggccttctttttttggtggtggtggaaggactaccagcagcttttccttgactcctggaaggattaaacattgcgaattggccgagtgcagtggctcacacatgtaatcccagcactttgggaggccaaggctggcggatcgcttgaggccaggagttcaagacctgcctggccaacatggtaaaactccgtctctactcaaaatacaaaagttagctgggtatggtggcgtgtgcctgtaatcccaactacttgggaggctgaggcagaagaatcacttgaacctgggaggcagaggttgcagtgagctgagattgcaccactgcactccagcctaggcgacagagtgagactgcatctcaaaaacaaaaaaacaaaaacttgtgaatcagcagttgtattccaagaaatggaattttgtcagggattgtcagtccctgctgctggtggagatgtggtaacactatgatcaggatctccaacactgggactgttgacttgccatccaagaggacatcatctgtatggtgaaagttttggacatcagagggcagagggactgagttaaaccctgactcacccatggcgggtaaatggcaggggagcttatcccactggcattgactgagagaaccccctttggcacttcagggctggaaggagaagcaccagttcctaacacaaattcaggtatagatgcaacaaaaccaagacttcgaattgtcccaaagggccctacagcacttggctttttctctctgcactatgaaacttgtccaaaccctgtcagttgaatttggacactccctttcccccatgagaccaggtaggatggtggcttatgcacccatatccaagagacaagtttcaaggcacttttgtccccagtgtaccttagcatactcgggtgctcacggcctttggtcccccttgaggacagggagacctcatccctgtccctcatcatttctccttaaagcagctgaggttgaggtagagaataagtgagggaccagggattgtgggcaagagccttgcaggcaagagactggttctgtgccattaaatgagggcacttcttacttctaggttcaaagagtgtggcagcaatttgtggctcaaacaaatgagtttccaatattttcagcccacccacagccctgtatcaagtggcaaggccaccattactgactctgtttatttcagctttggggatcccttgactccatagccacattgctttctggttgaggccccagggattttgttcttcgctgactcagactagacgtaaagccagagtgccagaattttcttgcactgattctccatccagggggattggaggccaggggacacctgcacttgcagaaacctgtcatgaggggaatcctaagtttaaataacatgaagccttttttttaaaaaagtgtttttcgtttttttttgtttgtttgtttgttttaagtgaaaaggtctcactctgttacctaggctggagtgcagtcgtttaatcatggctcactgcagcctcgacctcccgggctcaagcatcttcacacctcagcttcccgagtagctgggaccacaggtgtgcaccaccatgcctggctaattttttgtatttttggtggagatgagctttcaccatgttgcccagactaggctcaaacttctgagctcaagtgatctgcctaccaaggttgggattaccttccaaggttgggattacaggtgttagtcaccatgcctggccattttttgtttgtttgagacagggtcttgtcctgttgcccaggctggagtacagtggcacaatcacagctcactgcagccttgacctcctgggctcaggaggtcctgtcacctcagcttcctgaacagctgggaccacaggcacgtgccaccatgcccggctaattttttgtagaggcaagattttgccatgctgcccaggctagtctcaaactcctgggctcaaatgatccacctacctcagcctctcaaagtgctaggattacaggcatgagccactgtgcccggccccacacaagtcttgaacttctagcctcaagtgatcctccagcctttgcttcccaaagtgctaggattaccggcatgaaccactacacctggtcacttgaagcttttctaatgggcagtacatcttgctccttccaccattccttgtaggagagagtgtctcctgaatcctgggtgacatcaaaggattcaagttctgcctcccctttatcattattattaattttttgagacagagttttgctcttgttgcccaggctggagtgcaatgatgtgatctcagctcaccacaacctccacctcccgggttcaagcaattctcctgcctcagcctcctgagtagctgggattacaggcatgtgccaccatgcccagctaattttgtatttttagtagagatagggtttctccatgttggtcaggctggtcacgaactcccaacctcaggtgatctgcccgccttggcctcccaaagtgctgggattacaggcatgagccaccgtgcccggccttctgcctcccctttaatgattacttttagttctgaaaagtacaggaaagctgctgaaacaggtattgttttagcctactatccgttcactcacatttactgaacatctactaggtgtcagatactggggctatagcagtggagacagacaagatgatgtgtttgagggaggatgggaaggaacagaagtgcttctttaaaagtgatgacattggccaggcacagtggctcatgcctgtaatcccagcactttgggagactgaggcaggcagatcacttgaggctgggagttcgagagcagcctggccaacatcatggtaaaacctgtgtctactaagaatacaaaaattagccgggcgtggtcgtgtgtgcctgtaatcccagctactcaggagactgaggcaggagaattgcttcaacccaggaggtggaggttggagtgagccgagatcgcactactgcactcttggtctgtctacctcaaccccaactctgcatgctctgagcagccagctccacccagcactcaccatcccacccactttcgtctctcctgcttcaacatctccctcattctgttgtgtctcctgtagttgcatttgttgcagttcacttgagctgagccccgaggcccttctacctctagtactgcctgtccaggacaggcacaagcatccaggcctgaacgggatggatatggccctagaaaacagaaaacaggattccagtcccagctaaactgggtatggcaagacaaggacctgggttcccatgtgctcatgctgagaacttgagaagggacaggaattctgcagatcaacacagcttcataaaggccagccaggggctaccaccattttgcagtgagaataatgtttattgagaatggctcattacaaacaaaatatatataaaatctctgcaatgcaaaagatccctttcatccccgtggctagaatgaacaaagcccaactgtcccacatggcttcaggtgctgtgctggtccccagcatgtgaacaggctgggcagctgtcggtgtcatgtgctgtgggcaaaagtccctgatgtccaggctctctggctccattttcatgacttgtgcaagaatgcaacacagtgtgtcttacatcctgcctctgtgaccctccctaggcagatgagtcttgagaatgggcagctttctcattcatctttcaggaaggtgacctttaacttgtggcatgccctgagaagccatcctctgggaccagagactgagtgtttctaaacattttggctggactgaggtgctgttaccaccctccatgaaggccactccctagtgacagccctaacagcatgtgcactgtctaaatcacatcccaccatcctgaaaacttcatttcctcccactggtttccttcatacagctattctaacgattttaccagaacaccacctgaagatgcccacaccccacagctgctgtgcatgggtactcctgggccacctggcattaaggcaatggagatgagaccagtctagagccaacaccggtctctgaaacccagaagggctgcccaactaacagcacctccctcttggccaaaggctttgtctagggttgagaagcaatttggctgggtggtctcactgccctcctaaacagagcccacctctgcccccagagtcatctgtgctccaaagcaatgggcgggggcacagctgccaccatgccatgccttgggcattggaagagcaggacccaggagtgcagggatggtatcactgttgcccctttgaaaatgacccatttcccactttgggaggccgaggcaggtggatcacctgagctcaggggttcgagaccagcctggccaacatggcgaagcctggtctctactaaaaatacaaaaaaattagccgggcatggtggcatgtgcctgtagtcccagctrgtggggggctgaggcaggaggatcgcttgaacccaggaggcggaggttgtagtaagccaagatcgtgccactgcactccagtctgggcaacagagtgagtctccgtctcaaaaaaaaaaaaaaaaaatccatttcctttagttttttaggtgcagactggggttcaagacccagctccaccactgtcctgagcagactcccaagactgggccagctgcctcgtcagctgcctcgtctgagaggtgaaggggcaggtacttaaaccactggccaagtccctttctctgaaaaagaacttgagctggctaactgccctgtgcagaggtgttagtggttccaaagtaccttcactcttgctattactgttttacttgaaggtgattacccctcaaaaatgaaaacttaaatctcaaagaaacaacccctgaccccaacctccccaaaaaagaggaaggaaagagctctatgctacttgctgtgttgtaagatcctgggcaggaacccctcttctccatcaagatagacaagacccagtatcctgtgcaatctggtgtgaagaccaggttgggtgggcagctgcaggctgccccagcccgttgctttggagcacaggccttagcagccaaccttaaaggactaggggctccccacactcaagagggcagaccctgctgtcaggattttggctggtgtcaggaggcctcctgggtgcagggatccctctggggctagggcagctgtttattcccagagcactgctgccagccacgaggcctaccagtgggatctaggcccgagagccctccatctgacagagctggaggacctggagggctgtggggggtttaagagtctccagcggccagggctctgcatggcagggcagctgtgaggtgtgtctatgctgggtggcaggggtcagatgccctgtaatgagccacagaaacttgggcccatgggtaggcaggwggtggtggtatcatcaaccactgggcacaggggcatatgcagcacttccaggagagaggggcctggaggggtcctcagccctgggggattggggtcagctatgctgtctccagacactcacatactgtcctgaca

SEQ ID NO: 96059 - DNA, 18898 bp, Homo sapiens
  misc_feature (1)...(18898): n = A,T,C or G
gcatgctgccttcaagcatctgtttaacaaagcacatcttgcacggcccttaatccatttaaccctgagtggacacagcacatgtttcagagagcacagggttgggggtaaggtcacagatyaacaggataagaatttttcttagtacagaacaaaatgaaaagtctcccatgtctacctctttctacacagacatggcaaccatccgatttctcaatcttttccccacctttccccactttccattccacaaaaccgccattgtcatcatggcccgttcccaatgagctgttgggtacacctcccagacggggtggtggccgggcagaggggctcctcacttcccagtaggggcggccaggcagaggcacccctcacctcccagatggggcggctggccgggcggggggctgacccccccacctccctcccagacggggcggctggctgggcggggggctgacccccccacctccctcccggacggggcggctggccgggcggggggctgacccccccacctccctcctggacggggcggctggcctggcgggggctgacccccacctccctcccggtcggggtggctgccaggcggagacgctcctcacttcccagacagggtggctgccaggcggaggggctcctcacttctcagacagggtggctgccaggcggaggggctcctcacttctcagacggggcggttgccaggcggagggtctcctcacttctcagacggggcggccgggcagagacgctcctcacctcccagacggggttgcggccgggtagaggcgctcctcacatcccagacggggcggcagggcagaggcgctccccacatctcagacgatgggcggccgggcagagacgctcctcacttcctagatgggatggcggccgggaagaggggctcctcacttcctagatgggatggcggctgggcagagacgctcctcactttccagactgggcagccaggcagaggggctcctcacgtcccagactatgggcggccaggcagagacgctcctcacttcccagatggggtggtggccgggcagaggctgcaatctcagcactttgggaggccaaggcaggcggctgggaggtggaggttgtagcgagccgagatcacgccactgcactccagcctgggcaccattgagcactgagtgaactagactccgtctgcaatcccggcaccttgggaggccgaggctggcggatcactcgcggttaggagctggagaccagcccggccaacacagtgaaaccccgtctccaccaaaaaaatacaaaaaccagtcaggcgtggcggcgcgcgcctgcaatcgcaggcactgggcaggctgaggcaggagaatcaggcagggaggttgcagtgagccgagatggcagcagtacagtccagcttccgctcggcatcagagggagacagtggaaagagagggagagggagaccgtggggagagggagacggagagggagagggagagggagagctggccattttcatgatattgatttttcatatccatgaccatggaatgttcttcctttgtttgtgtcctcttttatttcattgagcagtggtttgttgttcttcttgaagaagtccttcacatcccttgtaagttggattcctaggtattttattctctttgaagtaattgtaaatgggagtttactcatgattgggctctctgtttgcctgctattggcgtataggaatgcttgagatttttgcacattgattttgtatcctgagactttcctgaagttgcttatcagtttaaggacgttttgggctgacgatggggttttctaaatatacaatcatgtcatctgcaaacagggacaatttgacttcctcttttcctaattggatgccctttatttcttcctcttgcctgattgccctggccagaacttccaacactatgttgaataggagaggtgagagagggcatcctgtcttgtaccagttttcaaagggaaggcttccagtttttgcccattcagtatgatattggctgtggatttgtcataaatcgctcttattattttgagatatgtttcatcaatacctagtttgttgggagtttttagcatgaagtgctgttgaattttgtcaaaggccttttctgcatctattgagataatcatgtggtttttgtcattggttctgtttatgtgatggattatgtgtattgatttgtgtatgttgaaccagccttgcatcccagggatgaagccagcttgatcatggtggataagctttttgatgtgctgctggatttggtttgccagtattttattgaggatttttgcatcgatattcatcagggatattggtctaaaattctcttttttgttgttgtgtctctgccaggctttggtatcaggatgatgctggcctcataaaatgagttagggaggattacttctttttctattcattggaataatttcagaagggatggtaccagctcctctttgtacctctagtagaattgggctgtgaatccatctggtccaggactttttttggttgataggctattaattattgcctcaatttcagagcctgttattggtctattcagagattccacttctttctggtttagtcttgggagggtgtatgtgtccaggaatttatccatttcttctagattttctggtttatttgtatagaggtatttatagtattctctgatggtagtttgtatttctgtgggatcagtggtgaaatcccctttatcattttttattgtgtctatttgattcttctctcttttcttctttattagtcttgctagtggtctatccattttttttgaccttttcaaaaaaccagctcctggattcattgattttttgaagggttttctgtgtctctatctccttcagttctgctcttagttatttcttgccttctgttagcttttgaatttgtttgttctcgcttctctagttcttttcattgtgatgttagggtgtcgatttcttgtctttcctgctttctcttgtgggcatttagtgctataaatttccttctacacactgctgtaaatgtgtcccagagattctggtacattgtgtctttgttctcattggtttcaaagaacatctttatttctgccttcatttcgttatgtacccagtagtgattcagaagcaggttgtttagtttccatgtcgttgtgtggttttgagtgagtttcttagtcctgagttctaatttgattgcagtgtggtctgagagacagtttgttgtgatttctgttcttttacatttggtgaggagtgctttacttccaactatgtggtcaattttggaataagtgtgatgtggtgctgagaagaatgtatattctgttgatttggggtggagagttctgtagatgtctattaggtccgcttggtgcagagctgagttcaagtcctggatatcctttttaaccttctgtctcattgatctgtctaatattgacagtggagtgttaaaatctcccattattattggggagtctaagtctctttgtaggtttctaaggacttgctttatgaatctgggtgctcctgtattgggtacatatatatttaggatagttagctcttcttgttgaattgatccctttactgttatgtaatggccttctttgtctcttttgatctttggtggtttaaaatctgtgttatcagagagtaggattgcaatccctgctttttttttctttttttgctttctatttgcttggtggatcttcctccatccctttattttgagcctatgtgtgtctctgcatgtgagatgggtttcctgaatacagcacactgatgggtcttgattctttatctaatttgccagtctgtgtcttttaattggggcatttagcccttttacatttaaggttaatattgttatgtgtgaatttgatcctgtcattatgatgttagctggttattttgctcgttagttgatgcagtttcttcctagcatcaatggtctttacaatttggcatgtttttgcagtggctggtactggttgtttctttccatgtttagtgcttccttcaggagctcttgtaaggcaggcctggcggtgacaaaatctctcagcattagtttgtctgtaaagaattttatttctccttcacttatgaagcttagtttggctggatatgaaattctgagttgaaaattcttttctctaagaatgttgaacattggcccccactctcttctggcttgtagagtttctgctgagagatccactgttagtttgatgggcttccctttgtaggtaacctgacctttctctctggctgcccttaacattttttccttcatttcaaccttcgtgaatatgacaattatatgtcttagggttcctcttcttgaagagtatctttgtggtgttctctgtatttcccaaatttgaatgttggcctgccttgctagattggggaagttctcctggataataacctgaagagtattttccaacttggtttcattctgcccgtcactttcaggtacagcagtcaaacgtaggtttggttttttcacatagttccatatttcttggaggctttgttcacttctttttctcttttttctccaaacttctcttctcactttatttcattaatttgatctccaatcactgatattctttcttccacttgagcaaattggctattgaagcttatgcatgcatcctgtagttctcatgccatggttttcggctccatcaggtcatttaaggacttatctacactgtttattctagttagccattcatctaatctttttttcaagactgttagcttccttgtgatgggttccaacatcctcctttagctcagagaattttgttactctgaccttctgaagcctacttctgtcaactcatcaaagtcattcttcatccagcttttttctgttgctggcaaggagctgtgatcctttggaggagaagaggcactctggttttttgaattttcagattttctgctctggtatctccccatctttgtggttttatctacctttggtgtttgatgttggcgacctacagatggggttttggtgtggatgtcctttttgttgattttgagctatttctttctgtttgttagttttccttcaaacagtttcctcagctgcaggtctgttggagtttgctggaggtccactccagtccctgtttgcctgggtatcaccagcagaggctgcagaacagcaaatattgcaaaacagcaaatattgttgcctgatccttcctctggaaacttcgtcccagaggggcacccacctgtatgagatgtcagtcggcccctactgggaggtgtctcccagttagtctacacagggttcagggacccatttgagaaggcagtctgtctgttctaagagctcaaacaccatgctgggagaaccactgctctcttcagtgctgtcagacagggatgtttaagtctgcagaggtttctgctgccttttgttcagttatgcactgctcccagaggtggagtctatagaggcagaaagccttgccttgctgcagtgggcttcgcccagtttgagctgcccagctgctttgctttcctactcaagcctcagcaatggtgagcaaccctcctcctgccaggctgctgccttgcaggttgatctcagactactgcactagcagtgagcaaagctctgtgggaatgggacccaccaaaccaggcacaggatataatctcctggtgtgccatttgctaagaccattggaaaagtgcagtatttgagcaggagtgtcttgtttttccaggtacagtctgtcacggcttcccttgtctaggaaagggaaatcccctgacctcttacacttcctgggtaaggcaatgccctgccttgcttcggctcaccctctgtgggctgcacgcactgtccaaccagtcccagtgagatgaaccaggtacctcagctggaaatgcagaaatcacccattttctgcatcagtcacactgggagctgcagaccggagctgttcctatttgcccatcctctccctgctttctttacctctgaggttggattctccctgtgggatcctgcaatccttctgccccaaaaaactattatagcaggagggaacctgttcctgctcactctttgccttctccttctcatcctagacagcctgaccgtgccctagttttcagaggagtgattgattctggggtgcggagcaggatgaggaaactcaggctcagagagggatttccacctaatgtgcctggaaaccatgggtagctacycaataaggcctttctatgttcagaaggtcatggaccaggagtgttggtatcggagctttgtagagacagttttgacccctgtacttagagcagaggggtgtgtttgccatggagagtgtgtgtgggcagctgtgtgtaagcctgtgtgagttctgtgtatgttcctgtgtgaatatatgtgtgtgctccttcatggacacagcatgcatgtagtgggcatagcaaggcagagagaaatcaggagactaggggcacattgcccagtaggaagatagtatcttcctactgggcaggacttgaggtgtgcaaaggtgtgcatgagtactgcaaaagcagttcaaagagcagagaggtggggccagaataaatatgttgcagaaaggcagtcatcagggaggaaagtgaggattccctgccaaaatgcctgagggcttccctgcctaccacagccctctgtgttcttaaatcctcctgtctgaacagaggccagactctggtttcccccacagcctgtctgtgtctgtcctctgcaaagccatgtggctctacctggcggttttcgtgggcctgtactaccttctgcactggtaccgggagaggcaggtgctgagccacctgagagataagtatgtgttcatcacgggctgtgactctggcttcgggaaactgctggccagacagctggatgcacgaggcttgcgggtgctggctgcatgtctgacggagaaaggagccgagcagctgaggggccagasttcagacaggctggagacggtgaccctggatgttaccaagacagagagcgttgctgcagccgcccagtgggtgaaggagtgcgtgagagacaaaggtaaccacccaggtttgtcaagtctgtctgtgtcttccctctgtgtgaagggaccacctcctgtctgctccctgggaagattcctacagtgtctttccaggttgaagtaacagtagctttctaatatttctcacttaacaggctgcctgaaccccatctcttttcaatccttaacctctcccgacattggaggtgtctagtcttggggagagtttgccctgatgagattttctctccagaattcctctctatcctctccctcctgtctaagcagaagtcatgtgttgtttgatgctaagagcctgggttagagatctggagacttgctggagcatcgttgagaagggagcacagggctgcaagtgtgcacggaggctgtgcctgtgctggagccaggcttatgttcccagcactttaccttgtttttgctagggcccatcagcgtccactgagagctacgatcatctccatcttcagaggagagtatcagcttaaggactgcttaaggaaggcagaactagtaaggggttactttttctttctttcttcttttcactacactaattcatctgtcttattatagaggaagaaagaaacatggatttattttatgtaacaataaatcagaatatgatctttgtggaaaacactgaaaagaataaagatgaaaacaagtttccctgaaattgtcatccacacataagtcctttttacaattatacaaaattaggattttatattttgttcttagtttcagtcaccttaaattctctggagaagatgaacacttttccaccataatgactgtttttataaaattatatttaattatttagaatactgtatccttccaatagccttacctatgtaatccatactgagtggttggatatgaaattccttcctgctttttattcatcataaatgtcatcttggtggacttttatttgccaacgtctctgtaagtgtgagtattgattggattcttaaaaatgagatgtctgggtggaggaatctgcatttgcatcagggcagggcctgttattgagcaggggacaggttcatatgcctgggccaacccttccagatcaacaactgccaccccctgcctggactcaagggaccctgtgctcctgccccctagctctgtgggttgaaaactctattgacttgaagtcctggggattgtgtatttgcatcttccagagagattttcccagagctgggtgaacttgggactaaagggaaggatgaagagtgggcttctgatgcagtaggaggagagggtgacattttctggggcagagggtggagtctgtgtactgagtggggtgacgcaaccttgctttcttcccaaagcctgtgcattggaattcccctgtgctttctataaaaatgttactgatgcaggatgtttcaagaccagtgccctgagttcaaacacttgggaaasaggatgtttcccaagttcccccaagcctaggatttcaggtctgtctctttctctctttcctgtctccctcactctccctctttcttgtctcttattccatcaacagatagttgctggacaatcactatataaggtgttagcacacctgaaaatgcagctgtatgtctgtaatgtctgcaacattcatgtttaactaaccaaacattggtcttcatgtttccagactaatgcatggacaatagttctttaacatgatttcatgcagtccttaaataggggtaatagcttattgtctttcaggcagtaggctggtccatgaagagtaaatggagaaagacctgggttttgtggcccaccagctgctgaatgctcagcccccacccctgtgatactgtggtgtttgttataccctcctccccatcccacacctgtcagtctgccytcactttattgggatgtgatttgcaccctaactctgtccacctgcacaggcacaacacagtgatgctctctcatcttcccactgtcccaggactctggggcctggtgaataatgctggcatctccttgcccacggctcccaatgagttgctcaccaagcaggacttcgtgaccatactggacgtgaacttgttgggggtgattgatgtgactctgagcctgctgcccttagtgaggagggccaggggccgtgtggtcaacgtctccagtgtcatgggccgggtgtcactttttggtggaggctactgcatctccaagtatggcgtggaagccttctctgactccctcaggtatgggtctgggatggggcccaccctmgtcttcctgctcctgtccttgtggggaagtcttttccagggagttccttgaatcccagcctgtaagttcctttcatgagatcactctctgtcttcatgtgtgacaccctcatcttcctctttctggattgggctggccattcactgggaagcaccttcctgagtgctgggcgacaggaggggccccaggtcagagagtttcttgaacgatacctcttccctggatggatctcttggtcagaaactgccagaggcagaattggacctggatctttggcttcagatcctaccaagaggaacacagtactgaggttaccaagcccaggacaggggaacactgtgtatcaatgactaatcccagggaaggaccctaaacacttcttcccattgcaccttggtattggagccacaaaggcagaccaggcagtcagtgctggatggaagaatgctttgcaccctagagaaggagcagagaaagatcagctacagcagtgtgtgttggtcccctagccagggaggctctcccagcagctgacactgggcatgtggcttgctaacacccctctcttgctgtagtagaaggaccccaacccctcctcccaggaatctgaaatacttgtaaacctggggcatgccttagggccgcggacacacacaagctcatgcagacgcaagagcactcactgagtcagaaacagggaaagatatttccacaccaggagatgggtgcctggctctggggctcttcctctctagggagagaaatgcttcaagccctgaggccattccttcatggctctctggggcccaaagacagcatgcaggagatggtctttcccagcagaattcatatccagagcccctttgacgatgggtagagcatctgagtccacacaacagacactttaggcccttgtccaagtggccaaaaatccatccttaacaacaaggttttgtctgtgacttaaaacttgatacctgggagagggacaagagatatagaatcaagtgccaatgcttataaggttggtgaccaagtcaaccttgctggccatggtacccacctgagttgaggagagtcctggagattccatctgagctggggattgaaaactcaagctggggattgagaactccacctggcagcctggtaaggaagactgggaaaggctcctagatgaaggaatgccatcagcccaggcccagagtgagcattagccacctgcatgtactgcagaatcctcttgtggtgaaggtcaaggccaagcctggtgggggatgctgggcaggtggtcataggtgggctccttgagggcctgtgggccctggacaggagttgtggcttatgctgttggcagtggaaccccctccaraaaagggatttgctcaggggagctccttggtccagtcagcttctagactcccactgactgcaggaagcccagtggttgtaagtgtggggagccagactgaagacagatgcttcttagaggacagctgccatcacccagctcagaggccagggagattcctggggcaggaaaacgagggaggggactgaggactggagaggaggcaaaatgtgggaattctggtgatccactggatgtgagggacataggaggagacagcactaaggtgctgccttgctttggaattggtaggatttagggctagtaagctcaggtgtgtaaaatatggaaactccatacagagggaatgccaccatgataattatgaccccttgattgctggaaattaaatattccaagctttctattttacccattgtcctcatatgttgtgatatcatagttttacttttattgtttgtnttttaccttccaagacccccgangtttttcccctctgcttctctgtcttgcaggagggaactctcctactttggggtgaaggtggctatgattgaacctggctatttcaagactgctgtgaccagtaaggagagattcttaaagagcttcctggagatttgggaccggtccagtccagaggtcaaggaggcctatggcgagaagtttgttgcagactgtgagtaagctgtggacagtggggagagaagcaaaccctcgtgtggaatccttggtctaccattggtgtctgaagggcattagagtttgatccccaggctctcccttccccacagagtggagacctttagccccatttccatgatgggtgctgtgtggtcaactggtcatgaaaagcaagtgtccaggcttctcagaacttgggaccagtgtctatctgaacccatcgttaytgaggaacaaagggaagccagaaagggaagacattggtggctgatcacaagctggcattagagacagcttgtttttatgtgctgagacttctactgtgggtggagaccatcatttatgcagtccagatattcccaaagagagacagacatgacttagtgtgagacacttgctactttcacatggatgggctccagctcagggaatttggataaaagagatttgaggcattgcttgactgggggttgtggggtggcatgagttcttagaccctttccactctaagttgaatccaaagcaggagcggttagaggtggaaatatacatggattgtttctgattcttaacagataagaaatcagctgaacaaatggagcagaagtgcacacaggatctgtcgttggtgaccaactgcatggagcatgygctgattgcctgccacccccgtactcgctactcagctggctgggatgccaagcttctctacctccccatgagctacatgcccaccttcctggtggatgccattatgtactgggtctctccaagcccggccaaggctctatgaagctaaggttggatgcatggttgcatggatttrgggtgtgctatgaggggtggtgtatccttgggagagatataaagtggagggagggagccgtccggtcagtagggcaccaatcccacctccttcattacctcctggccatgattctcctgggagataattctgctctctggagatgttggtaggaaagtttcaagttacgcagctgagaaacagggaccaaatagtgctcctgggtgcattgtcaccgtgggtggccactcaagggtccaagcctctagggccatccttgggctaamaactggggtgggtgtgagcaggtggaaggagcctcagcccatgccattacctcctgcttccttatcaggctgtgtgttaattctgggccagtctacaccctcccacggggtggaaatggcctggaggatgtgagggcacccctcctctgaagatccctgtacacgtggtgttgggactggaaccattatgcggccccataggcctcaggagtcatcccagaagcagtggctgggaggtggtgtcctaagtaaggatctgtgcagaggacaaataaatcagtttttgatttgtcttgaaagcatggacttcctttgactcttttgatgttgaaaaagttgatagtttcacccatgtgcagtgatttgaatgttcttgtgaagctccacttggattccagacacatgagattgcaatccctctctgagtctgggttcccacctttgctcagcacccagagtcactccatccagaaagtcaggtcactgtcagcctccctaggactagaagtcaaaggcagaaaagagtgaacaggaatagatctcctcctaatattgaattttctgctagaaggagaacaagatcccaatggggaagtctgatcttagaggcaaagaaaggggaaaaaggaaaatggggatgggaactcccaagctgctgggagggagtaatggagtgacttacacaagagggtgtcaagagtttttacactttcactcctgaagatgtcctttccctagatttgggtggccttggggagcagtggcaggaagaggcaggtaccttcctgaatatcaggggatgagaggcatggcctgagaatggatttgaagagagaagttggactatccctgccctctcccagcccttgttgccaccaaggtgaggggcaattgttttctttccagggggttctggagtagcctgtggtcacagaaatagacccaaggacaagacagcaaggcgacctcaacagccatattgacaggcaggcctcagatcccttccctggggcaactgaagcctcctcccctcacccgtgccctctctgtgtcccttagtgacggaccctcactttaaagtcattgcactttccctgtgtcatccctcaggtcccccaccatatcccaacacacccacccctccagtgacagggagtgagagtcactgctggactcatctttcatattttctctccctttgttgagcccctgctgtgtactggagagaaattcccttgaatgacctggtcctcatcctcaatgtcttcagttttctgatgatgtcgcaagtgtggactcaacacagaaagcattaggggaaaggggtgtagaatcctggactcaacacaaattgtagttgggaggtaactccccaggattctcatttttctttcttcaggataaaagtctaggtctaggatatggagcctttaggaagccccatgttgtttaacaaatcagtatttattgtagaaacagagattgaggtcagatgttgcagggccactgaatttaaaacacgcaatgaggcatggtgactcatgcccgtaatcctagcactttggtaggctgaggtgggttgattacctgagctcaggagttagggaccagcctgggcaatatggtgaaacccggtctctattaaaaatacaaaaaattagctgggtgtgttggtgtatgcctgtgttacagctacttgggaggctgaggtaagtggatcacttgagcctgggagacgaaggttgcagtgagctgagattgtgcaactgcactccaacctgggtgatagagtgagacccccatctcaaaaaaaaaaaaacaaaataaaacaaacaagcaaatgaaacacacacagtgaggagcaggtggagataaatggcagagtagaaggcttcacggatcattctctcttccccaccccacaccaagacaccaagttaacaattgtctccgtatcaaaaaacaccttcataagaaccaataatcaggtgatgataactctttaacctggttttaacctcatattgctgaaagaggcactgaagagatagaaaaaaacagtcgtgaatcacagaccctaccgctctccaaaccctggcagtggaggcacagtgctgagagcatctctgggtgctgcgggagggagaacacagcaattgtgaggcactgaactcagtgctatcctgttagagcaggaagaaaaaccagaccaaagtcagctgatgcccatccatggagggagcatttaaaccagccctagctacaggggaatcaccgatcccagcagtcctgagtgcccacaaacctcgataccaagggctacaatgctccatgtctccaaataaacttacatggcagtctaggccataagaactgcaactcataggtgaggcctagtgccacaggggagtctctgatcacagcaaacctaacttgagtgcccgcaaacctcgccaccaagggctacaatgctctgtgtctccaagtaaacttgaaaggcagtctaggccataaggactgcccctcataggctaggggtagtgcagaactaggcccagaggcactggattagggggacacatgacatattgagacgcaagctggggcagcaaaggggaatgtttgtatcacccctcccctaaccccaggctgcacagcttgatgttccaaaggagacccctttcttccacttgaggagaggagagagaagaagagtggggaggattttatcatgcatcttggataccagctcagccacagcaagatagggcaatgatcagagtcaggaggccctcatttcaatccctagctcccatatgacatttctagacagaccctgggccagaaggcaacccagtgctttcaaagaaaggacccagtgctggcagcattcatcaccttctatctgaggagaccttgggccccaaataaccagcactgatgggcagttactacactgaggaccttgggtgagcctctgagacttgctggcttcaggtgagactcaggacattcccagctgtggtggctatggagagagacaccttctgtttgagaaaagtggaaggaaaagtaaaggagactttgtcttgcaccttaggtgccagcatggccacagtggagtggagcaccaagcagactattgtggtttgtgattccaggacttgactcttggatggcactttctggacccaccctgggccaatggggagcccactgacatgaatggtgtgtcccaggccaggcagcattcaccacaagctgacttaagagatcttgggctttaagggaatattgatgggagtctagcggtactccatgtggcttggggtggtggtgactatgaggtcaggctcctctgtctttggacaaggaagagaaaagcaggaaggatttgttgtgtggagtgagtgycagctcagctgcaatccaacaggacaccaggtacatttctaaggtttttgactctagtccttgattcctgcacagcacttctggaaccacacggagactgggggacatcactgctctgacagaaggacacaggcctaactagctttgttatctgctgattgtagagcccttgggcttgagcaaacataggcagtagccagggccttacaacaggccttgagtgagacccagcactgtggtggcttcacgtctgacccaatgcagtcatagtggtggtgacacaggggtgcttgtgtcactccamccccagctttagctatctcagaacaaacacacacagagttactctgtatgtatgggagaaagtaagggaagagaacaagagtctctgcctgataatccagagaattctctcagatcttgtcccaaacatcagggtggtacatctacgaggttctgcaagaaccatagaattactgggtgtggggtgccccctagagcagatacggattagatcacaacactgaagtctttccaaatatttggtaagtcttacaagaaggatgactacaaataagcccagacagtgaagactacaataaatacataactcttcaatgcccagataccaaagaacatctactagcatcaaaaccatgcaggaaaacacggccatgccaaatgaactaaataagggaccagggaccaatcctggagaaacagatatggggcctttcaaacagaaaatttaaaatagctgtgttgaggaaactcaaggaaattcaaggtaatatagagaagaaatttagaattctatcagaaaattttaacaaagagtttgaaataattaaaaagaatcatacagaaattctggagctgaaaaatgcaattggcatattcaagaatgcatcagagtcccttaacagcagaattgataaagcagaagaaagaattagtgaacctgaagacaggccagttgaaaacacatagaggagataaaagaaaaaataataaaaagcaatgaagcatgccttcaggatctagaaaacagacttaaaagggcgattctaagagttatgggccttaatgaggaggtagagaaagagaatatggggtagaaagtttattcaaagggataataacagaggacttcccaaacctagagaaagatatcagtatggaagtacaggaaggtaatagaacaccaagcagatttaacccaaagatagtaatcaaactcccaaaggccaagggtagagaaaggaccctaaaagcagcaagaggaaagaaatgaataacatacaatggagctccaacacatctggcaccagattttcagtggaaaccttacaggccaggagagagtggcataatatatttaaagtgctaaagaaaaaatcttttagcctataatagtataatagtatatgtggtgaaaatgtccttcaagcgtaaaggagaaagaaagacattcctggacaaacaaaagcttgtaccattgtacaagaagtgctaaagggagtactttagtaagaaagaaaaggacattaatgagcaatacatagtacctgaaggtacaaacctcaccggtagtagcaagtacccagaaaaacacagaatattatgacattgtaactgtggtgtgtaaactactcttatgctaagtagaaagattaaatgatgaactaatcaaaaaaagtaactgaaacaacttttcaagacatagtcagtacaataagctataaacagaaacaacaaaaagttaaaaagttggggaacaaagttaaggtgtagagtttttattaattttctttgagcttgtttgtttatgcaaataatgttaagttgttatcaggttaaaataatgggttataagatagtatttgcaagcctcatggtaatctcaagccaaaaaacatacgatggatgcacaaaaaataaaaagcaagaaactaaatcatatctccagagaagaacatcttcactagaaaaaaacaagaaggaaagaaagaaggaaaggaagttcataaaacaaccagaaaacaaataacaaaatggtaggagtaagtccttacccatcaataataacattgaatgtaagtatcctagactgaccaatcaaaagacatagactggctgaatggatgaaaaaccaagasccattgatctgttgcctgcagaagaaacacttcacctatgaagacaaacatagactgaaaataaagggatggaaaaagatatttcttgccaatggaaaccaaaaagagcaggagttttatctcagataaaatagatttcaaagaaggtcactatataatggtaaaggggtcaattcagcaagaggataaaagaataattttaaatatgtaatatatgcacccaacacagaagcacccagatagataaagggaatactattagagttaaagagagaaataggtcccaatgcaataatagctggagactccaacactccactttcagcattggacagatcttccagacagaagaatcaacagggaaacatcagaatgaatctgcactgtagaccaaatggatccaatagatatttacagaacatctcttccaatggctgcagaatacacattcttttcctcagcacatggatcattctcaaagatagaccccatgttagatcacaaaagaagtcttaaaacattgaaaaaaatgaaataatatcaaacatcttctctgaccacaatagaatgaaactggaaataagaataataattttggaaactacacaaatacatagaaattttaaaatatgctcctgagagaccagtgggtcaatgaagaaattaagaagaaaattgaaaaatttctaaaaacaaatgataatagaaacccagcataccaaaacctatgtgat

SEQ ID NO: 96060 - DNA, 17242 bp, Homo sapiens
ccctcgctggagcggcatctccatatttcttcctcttgcttcctgtctccttcactcctggccacccccactcacccctaccccagataattgatggcccgggcctggcccggccgctcctgcctctcgatccatcttgtcctcgagcccatgctgtctccaagatcggtggccacctgagacacatagaacgggtgggagcaggagggggctccttagcccccttggagcccaggaaaagaacggccaggcggcctccaccagagtggagcactggcgactgggagggatacccaggctttcctcctctgctcaactggttcccagcactcactccttgcaggccagttggggctgaggcccaggtgggggctctggtctctgaggtcctggagcctctttctttttctttttcttttcctttccttttttcttttcttttcttttttttctgagagggagtctcgctctgtcgcccaggctggagtgcaatggtgcgatctaggcttactgcaacctccacctaccaggttcaagtgattcttccacctcagcctccccaatagctgggactacaggcgcaccccagaacgcccgcctaattttagtagagattaggtttctccatgttggccaggctggtctcgaactgaactcctgacctcaggcaatctgcccacctcagccccccaaatgctgggattacaggcgtgagtcaccgcgtgtgccgggcgggagcctctttcttgatgctggatgttaatgtggtcacagcctccctggctcagtttgctcagagtccagtccctccctggctcattactggaaccaaccaggtgccgggccaggaaagatgagccaggatccagagctccactccctactcaccttcacactggctttgggtttttggccctcattggagctctgtgggccacatcaggattcttgacgtcatttcacagatgtacaaactgaggcccagatccatgaagtgactgggccaagactacatagcttgaaagggctgcagttctcctccaaggcacgctccctgcccgctgcgggactgcgtgattccatttggtctcctagcggctgtggaaagggactggcgtcgatagggctctggcaggatggcgggrgacaaccccagcgtctctctctcctctttcttcgtgcacaggccgtcagtgcccagataccagagtccggaaggccgcagtacctggggctgcgccccgccgcggccggagcgggtgcccccggccagcagctcccagagccaaggtcttcggacggcctaggcgtgggccgcgcctggagctgggcctggccgaccaaccacacgggggcgctggcccgggcaggggcagccggggcgttgcccgcgcagcgcaccaagaggaagccgtccatcaaggcggcgcgcgccaaaaagatcttcggctggggggacttctactttcgggtgcataccctcaagttttcgctgctggtgaccggcaagatcgtggaccatgtgaacggtaccttcagtgtgtatttccgccacaactcgtccagcctgggcaacctcagtgtcagcatcgtgccgccctccaagcgtgtcgagttcggaggagtctggctgcccgggcctgtcccccaccctctgcagtctacgctcgccctggagggggtgcttcctgggctggggcccccgctggggatggcagcagcagcggcggggccggggcttgggggctccctcgggggcgcactggcggggccgcttgggggcgcgttgggagtgcctggggccaaagagtcacgcgctttcaattgccacgtggagtatgagaagacaaaccgcgcgcgcaagcaccgaccgtgcctgtacgacccgtcgcaggtgtgcttcaccgagcacacgcagagccaggccgcctggctctgtgccaagcccttcaaagtcatctgtatcttcgtctctttcctcagctttgactacaaactggtgcagaaggtgtgcccagactataacttccagagtgagcacccctacttcggatagcgcccctccccagccagtcctgagcctcccgccaaatcccagcctcactaggtgggacccccttcccagtgttctgccgctcctgtggccatgtcgcccactccttccactctgggggcggaggggaatggcttctcgggaccctcagctagcgtgggtgcccttttccttatgcggagtgcccgcaaggctggggtagccccctccagtacaccccaaagtgaaagggataagagtgcagccccagaataggcggggcttggaggcggtcccaatgtcccctgggtccacagtgggtccccttttcacccttggcgctaggctgcgcactccctttccccgcagctttaataactcctggcctggcaccctcaccccaccctgactttcccatcccccagcgcttgtcctgcttcaccctaccccgcctaagactgtaaaggcctaaaaacctcggcctgtcctcccaccattctgcctgccatatgcctgtccccttttcctccaaaccctattagggtaccggaagcagaacccctgggctgaggccctggccctgcccccggcccctgcccctgcccgcccccctccagtccaggcagtcgagctccacctgccctctcctgctgcttcctctcggtgatattttttctacgccaaaacagacgggaaagggaacaaaataaagtgaaatccaatacacgcctgtgtgagacctttgtarggaatggggaggtggcgtggggcttctatgtggtagagacctggccaaggccttctccctcagcggctcttggggaaaccaagacaaagactgacagagctagcaccttggaagtcaccaaagaccagatcaaagagagctgagggttaccctcggggtaggagccccgcctgaggttgggattctcctccctgaggtgggcgaagggaagctgcagcaagtgggatggaaatgagacctgagtggggatcaccagcggacgatttggggaaggaggtgtaagaccttgaatgggatggacagggacagtgtaggcagagcgctgacaacctgctaagctccacggggccggcgggaggtggcaggttgggagggagggggaacggtgttcgcggcatctggagtcatcgatcttccttttccttcctaatttcgtgggcgctgagtttgcagacggaggaggtggggagggagctttgggatgagggggtgggggaagggaccagcgcgggtttggagggcggggcccgtggccgctacttgccactagcaaacacagccccctttagccagctgcccaccctcccccaacccctgcctccggctccctcctgcagccgaggctgctaattttatccgcccccgaccctggcctgggcgttaattggctgcggcttcattagcggttctccgctcagccgccccctccccttggggcccctggctggaggagggagggggggcggtgcggacaagctgaggcaccgagaaactcctcatcttcgccttgagtccggggtcagggtgcccactgggagggcagtgttccccaggggcttgcccactggctccagcctgaaactgagtcagacacggggtctgacccagacatatctgggagtgaaaagtcagtaagcagaaaataaatatctgctggctggctggctgaataacagggtcaactgaaaagaggagggagatcaggaatggttctggatccgagattggccaaaagcagaagaacccggaagtctcctaacaccaggcttattgctggaaacacctgagaagagctgagcctagaatggcagggaaggagcttccggctaaggggagatttctaagggctggtatgagaaccaggtgggaacggctggaattaacaaattcgcccatctgggccttagtttccccacttgtaaagctacagtaaaatagtgtgtggtggggattctatgaggcttttcctgtgaacatgctgctgtgctggatagtcctcccctcttcctctgcctcctcctcttcttcctcatacagctggacatctgagagcagagttaggtgtgtcttcctgtcattgcacttgtcacactttgttacctgttcacctcttggtatcctagcagccagtgagctcttcatgtatctccagggctatggaatgcctggcatagagtaacattgctacataaggcaatgattcgcaaaaccactgcttaacaggctggtccaagtgcagtgatgtttacttgatcataatcagttacattatgataattgatcataatcagttacaggtttctttgtttcttcttcactcccactgcttcacttgactggcctttaaaaaacaatttttttggcctggcgtggtggttcacacctgtaatcccagaactttgggaggccaaggcaggcggatcacctgaggtcaggagttcaagatcagcctgaccaacatggtgaaaccccgtctctactaaaaaatataaaaattagctggacgtggtggtgggcgcctgtaatcccagctactcaggaggctgaggcagggagaattgtttgaacccagaggcagaggttgcagtgagtgaagatcatgccactgcactccagcctgggtgacagaatgagactccgtctcaaaaacaaaaaacaaaaaaaattttttttgaagacagtcttgctctcttgctcaggctggagtgcagtggcttgatcatggctcaccttgaactcccgggctcaagtgaccctcctgcctcaaccttcccagtagctgggactgcatgcacataccaccatgcctaggtaatttaaaatttttccttttgtatagatagggtctcactatgttgaccaggctggtttagaactcctggcctcaagagattctcctgccttggcctcccaaagtgctgggattacaggcatgagccaccatgcccagccaaaaatttttttttaattaaaaaaaaaaacttggcttatcagaatcactgaggagaggtttagttgtgtgacagcataagtgggcaaatgtctactctttgagatccattgaattagaacctctgaagacagaccccacactcatatttatatcatattttctaacccattctgatgctgaggtttgggaacctactcctggaggggttgatgaatcccattcccaagggtttcttccggatgaagtcaggctaaaaggaagatcccttccagtctcaaagatctatagccctggggaaaaaaggagagcccaccgactcctgggacatcaagaagtggacaggtaacaaaatgggacaagtgaacaacaggaggggtgccttcctctgctcccagatgtctgaggagaaagaggagatgccatgtaggaggcaggtctgtgggtcagaggaagaggggaggacaatctgtcacagcgcatgttcacaggaaaagcctcattgaatcctcaccacacagtattttcttgtggctttaccagggaggaaactgaagcccacacaagctaatgcactagtcccagagccggaacttgaattcaggtctccgacccttctaaaccacggtgctttccagtgttccatagctctttatcttgtgtgggggtctagatctcctggagtctaataatgctagctagatattcagtaggcaccctataaacgtttgtcttgacaacaagcagagagaaaaccctgaaaagcttcaagatagtaaggagagggggcggcactggacctctgtttttgttttttgtttttttccccccaggcaagggcctctaaccctggggctacagacgggaatcataaagaaaaaagcggtgagtgggcgaactacaattcccaaaaggccacaaaggggccaccactacgcatgcgtagatccctcccgttagctttggcgcctcagcgagctcttctcgcgcatgcgttctccgaacggtcttcttccgacagcttgctgccctagaccagagttggtggctggacctcctgcgacttccgagttgcgatgctgtacttctctttgttttgggcggctcgggtaagaatggggctccaaacgctgggtaatcagtggaaaggaagctcttctcctaccttagttcctagtcacaaactctggggttctcttggcttttccatgcacgtggattggggccycagggagcggacgtgtaactggggaatccccaagacccctgggcgcgcgtggagttaactgcgagcctgtcctcattctggcgatcagacgccccagggcctcgtgaccgcccatttcacgtggcattaggggagaggacagccccggatgccccgcggacccggtgctggcaaatgagcggagttttcggcctggtctcacaagctgagcctttccggccagctctgagccctgcagatgatgcaaccgagcttcactgcttgcatcaggcaggggtcccggcggcagtgagggctggaaggaggtggaacgggtagggggctaagtaaggggaaagggtattggcttactctcgggcagatccccacccccaccactcccacacagctcttcctcacggactgctaaaggtctcccctcccacctgcattgctctacaatctgtggcctcagcccttgccaactctgcctcttcccccgctgactggggtatcagtttatggtgccctgcaggaagaccctcttgttcctgtgggtgggaaggttctggaatctcagttgccctctctggagttggggagacataggcttttggaggacaagctttgcagagtggttcatggagtgaggtggtgggagatttctgaggtgcggtgcggtgaatggagcaaatcagaaccaccccttggacgttgatctcaagcttggctccagaactggcttttgaaggtggaggtgggggtagtgagaactgaaacaggctggctggacaactggcagcttggtgtggccttagaagcatgagtgagggtggccgggagacgatttgtctggactgttgtgatttcaccctgacttttcctgccttcagcctctgcagagatgtgggcagctggtcaggatggccattcgggctcagcacagcaacgcagcccagactcagactggggaagcaaacaggggctggacaggccaggagagcctgtcggacagtgatcctgagatgtgggagttgctgcagagggagaaggacaggcagtgtcgtggcctggagctcattgcctcagaggtgggacctggggagatgggcaggggttgggccaccatgggtacaggaagtaacaaagttatcttaactgatatttctccaaaaccccctttcacactcaggacctttctttgggctttatcttcctttcttatctccctcaagcaaaggcagtgcaagtccagtttatggggttgggacatttagggagcctccagggtccctacagtttcatctgatcccttccttcctcctatgaggaaggaggagcctagaagcacaagtttgagtgggtaggtggcattgaggggccactgctcatggcagatgggtttctgagaatgctgcctctggctttgccccaggcctggtgctgagtgaatggagctttctgcagggagtactcccgctttcagctctggctctggcagggagggactgtgggagtccaggggaaggggctcaataccttctgacattgccccccaccaccccagaacttctgcagccgagctgcgctggaggccctggggtcctgtctgaacaacaagtactcggagggttatcctggcaagaggtgagggctggagggcagtgtcagggatggtgctcccagtgggggaacccacctgtaccttcccagtgttcattgaggagtgaacttcccagtcctttgctgatggttgagagtcctttctctgtgccctcattacccctctcccacggcagatactatgggggagcagaggtggtggatgaaattgagctgctgtgccagcgccgggccttggaagcctttgacctggatcctgcacagtggggagtcaatgtccagccctactccgggtccccagccaacctggccgtctacacagcccttctgcaacctcacgaccggatcatggggctggacctgcccgatgggggccagtgagtatggatgggctggctgatggtcttggcggcaggattggtgtgggaaaggagttatttattgaatacctactgtggaccatacagatggaacaggccttgccctgtcctgcatgtcacagtggatgaggaagataagatcccagttatagtgcctaccacagagtggacagagcagtgaggcggtgtgtcctaggactggtgttctggggacagagaactgtggagttgaagggagtggttaagtccgggggtccttccacccaggccttcttacttcctctcacttcgcagtctcacccacggctacatgtctgacgtcaagcggatatcagccacgtccatcttcttcgagtctatgccctataagctcaacgtgagtgctctagggtgtggggaggggctcttggccctggtggtggtcctcccctggagaagctgagggcctggagcgccgggccgtccttagggttaaggaggagagtgagctgccctgcttccttctcagggctttagctgtttgtgtgtctgtccagcccaaaactggcctcattgactacaaccagctggcactgactgctcgacttttccggccacggctcatcatagctggcaccagcgcctatgctcgcctcattgactacgcccgcatgagagaggttggtggggggggctggagactgggcacctccccagggggtggtgaggaggtgtgggaggagggcagccttgggcaggcctctccgggccctccccaggctgaggccttgcctctgtacctgcccaggtgtgtgatgaagtcaaagcacacctgctggcagacatggcccacatcagtggcctggtggctgccaaggtgattccctcgcctttcaagcacgcggacatcgtcaccaccactactcacaagactcttcgaggggccaggtcaggctccctgaggtcgggccttgcctttccctgccttcaggcctattcctggggcactgttggcctggacctgagaggaattcattcccacctgcagcccttaagactcctgcccagtctgtgagagttctccttctcttgcccatggtggccatgccctggcaggggatttgtggatgggattgaggggctgattccctctaccactggaatccagtgtaccaagcccacgtgagctgtgcccttggggcccaggtccgccagcttcctctgccttctctgtcccttgtccttcttttcagcttagactctgaccatccacctctcacacaggtcagggctcatcttctaccggaaaggggtgaaggctgtggaccccaagactggccgggagatcccttacacatttgaggaccgaatcaactttgccgtgttcccatccctkcaggggggcccccacaatcatgccattgctgcagtagctgtggccctaaagcaggttggggatcctgtctttgtagggtgtgggggggcaatggcctggaggcttagaccctgcaccttgctaactgatgctggggctgatggaagggaaatgccaggatggaaggagtcaaggctggggtcacagagctatgctgagggtgcagggccagagggtagtgcagggcttgggtccaggcctagggtgacagctgctactgtctcatctccaggcctgcacccccatgttccgggagtactccctgcaggttctgaagaatgctcgggccatggcagatgccctgctagagcgaggctactcactggtatcaggtaagccagcaggtgatgggtgagggcctctgtagcttcaggcagaggcccaggactcaccactccccatttcttacccrccttaggtggtactgacaaccacctggtgctggtggacctgcggcccaagggcctggatggagctcgggctgagcgggtgctagagcttgtatccatcactgccaacaagaacacctgtcctggagaccgaagtgccatcacaccgggcggcctgcggcttggtgagacctggggtttgaggagggaagggrctcccatgctggatgactgccaggtgaccttgggctatgctcatccctccccttgtgcctcgttccaggggccccagccttaacttctcgacagttccgtgaggatgacttccggagagttgtggactttatagatgaaggggtcaacattggcttagaggtgaagagcaagactggtgagtgagcaagaaggagccccgggccagccagttcccactcactgtctgctccctcccccagctgatctcactgccttccctagagctctgaccacttgtttcctcaccctctctctctagccaagctccaggatttcaaatccttcctgcttaaggactcagaaacaagtcagcgtctggccaacctcaggcaacgkgtggagcagtttgccagggccttccccatgcctggttttgatgagcattgaaggcacctgggaaatgaggcccacagactcaaagttactctccttccccctacctgggccagtgaaatagaaagcctttctattttttggtgcgggagggaagacctctcacttagggcaagagccaggtatagtctcccttcccagaatttgtaactgagaagatcttttctttttcctttttttggtaacaagacttagaaggagggcccaggcactttctgtttgaacccctgtcatgatcacagtgtcagagacgcgtcctctttcttggggaagttgaggagtgcccttcagagccagtagcaggcaggggtgggtaggcaccctccttcctgtttttatctaataaaatgctaacctgccctgagtttccattactgtgggtggggttcccctgggccaaacagtgatttgtctccctcaatgtgtacaccgctccgctcccaccaccgctaccacaaggacccccggggctgcagcctcctctttctgtctctgatcagagccgacaccagacgtgattagcaggcgcagcaaattcaatttgttaaatgaaattgtattttgcccacggctgcttctgtttgatccctggggacagaggggagcaagggaggggagtggcagggggaggcccaggtgtggggctggagggggtactgggcggcagcgggaggcagtaggcttgggcaggggaggagtgcgctgcgcctcaggaggcaaaggtgccccagcctgggcaggccctggaccagcccaagctgagcagcgccgcccctgggctggctctcagagcctgggctaacgtggagcccgccacgtcgcttggcactcagaggcccctgcttcttgttggctcacgtaggccacgctcaacacgtagcctgtgccacacccttcgaggcccgggtaggagggcagaggggctggtctgggctcttggtggacccctgctggtgctgcctgcctcctcctcccccacgtgggactcaagccaagggtcagaggcgcttccgctgctgggagcaagggaggagagtaggggtggagcagcctcccctctgcgtgggaacccggcctgtgtaagcagtagcgggacagggtggccggagtgatgccttggggcctgcggggaggagtggaagaagtggatgggctggctggctgtggcttgcatggcactggcagcccagcctggcttagaagtctggccggtccttcttcagcttcttatagtcagtggaaactgcaaggaactaagaggagagggaaagggggttgcgctgagtaccccaagcctccctttgcttctagtacgggagttgtgggtgccaggaccaggagataagaggatggggggcaaccctagagccatcgagaggtaccttgtattggtcattggggctcaggcggttccagggctccgggttgttctttctgtcccagctgtggagcaggaggggggagggttagggtctcctccctgggacccagaactctgtaacccaatttgacccccaagctccacccggaggctctggccccaccccagtacccctgcctcctgccctgggggtcccatttcccagatactgacaaaggaacggtcatattagcaggtgctgacaagtgagacaagaagcctgtcaccattgtcagcatggggctgcgtgacaaactgacaacggggcccagggactcccacttgctgcctgccaccctaggttaaccctaagagcagagtcgtgggaatcagacacagatcccaaggggctgggtttctggtgatgtgccgggaattataaagccatgggtgcgcctttcacttccggaccctctccgcggccgggtgtgaaatctccgccccacactggtccccaatgccacccccagcagctcacccggccacaaccccagtgctctggtgaggacttagaggtacccaaaagcccaagcccaccgctggctgagcggcgtcgtcatggcaaccaggccgggagaggcgcgggttccgcatttcagggcgggccaagctgaggagtgagcggccaggtgggctggaggggatacgggggtctcccaggtcagcagtgggctccagccctgagatgccggtcggtacagtcgaaggtgcatgcagcagggcacgggatccccactagggccgcctatttccaccccatcttgcctcacccaggcccccgtgagcatcccaagccgtgcctttaccagacgtcggggctgcgaagggcgagtcgcagcaagtaaagcgcagcgctgcccatgcccaggcagattaagccgatcatcgggatgatctgcggggaagagggagagcacttttggggtcagccctctccccgcagttcccagtcaccctttacaagcttttctgcccaccccaaccccaccccgggtctggtgctccctccctggaatctcctacaaccatatttcctggcatggtctccctcaccctacagcgatcgtgtccaaggtagtagatttgtgggacacagggacgtttcggagagagactggggcaaccttaggggaagaataggagcgctgagggacctgggcacaaggcaaggcattgggggatttggagggtggggcagcaggagagttaggagttagaggttctgaggttctgaggactcacccccggatgtcttttgatctgccggtagaagcgggccccaagactggctcctgccatatcgttgttttcccagtctggtcctctgcagtggctctgtcctctccctcctcctggggtcccgcccctgagtggggagggatcagcccagcccagagcagcttagcttggcccagcccgtgcttctttggactcaccccaccccaacttagctcactttctcctcaattccaggcccaaagcctgtaggggaattgtctgggagccaagtggtttctgctctccgactctctcctccagatgtctgcacctggaccaagggacaccatcattcttggggcttctggcatctgagggaaggacctcagtggcataggaccccataagatgtgggaggaggcatggccatgggacaggcacttagcaaaatgcatgtgtggaatgttcacaggtgggaccaggaggggctaaggccagtgagggcatgtgcagcacttccctgacacccttagagctgtccaggagcgggtcctgagaaccctggttctgtcccctccacagtgtagtgggggaaggaggaagacaggcccacaccgtaaagctcccccagcccctcttgttctgagtggtttcttcaggttgtggttggactggaattgcggttggaggctggaagaaccaggtgtatgttaatcatggctcaggatagaatacgccagtttatttattctaccacagtcatggcagtgaggcttgagagacttgcttgctctgcctacctggggtagggtaaaggtggggccgcccaaggaggccatccacttcctctggctgtgggatggataggaagggaatggagtgggggaaacaggaaagatcggacagatgctgaaagagaacaagacacagacacagaaatgcaagcgattccctcctgtcctcaaccatctcaggtgtgtgctgtgctgctggggtggggaggctcacagcccccgtctctggggaatttgggtcttagggacgtaggaaccgagtcctaatatctctccccactcccacgataacctccaccaccccctccctcctcgcagccgatcctgcagagcacctccccctccagagcccgccctgtggagggcgcgggcgggagcgagctatgcacccgtctctgggatcgtcggggtacagggagggagagggcgctttctagggtccgcctccctttccttctcgctgatacttccgccgccccctactctgacaagcgcggctgtaattaggctgcggggtcccgggctctccgcctcactccggcggataatgagataaagtgtcagagacacggcgagaacaaagagacagagactcgctgcgatgtgtgtggggggggcgggggagcggggctgacgggctgttagagcctccagcagcccagccctcccgagagcccgcgcctccagggcccaggaagggagggcgtgtcctgtcacccgcgcaccccagccctccagtctctgggaccaaaaaacaatcccagagctcaaactcgagcggccgcacaactgggctgcacatctggttctctgtggcacagctggggagccaggacgccggaaggggcgcctggtccttgcgcctttgctcacaggccctcgcctgcttccttgtgccctttgttctgagttccggtgaccccggccaggtcccaaattctccgtcgcgctccttttccagagccgccgctgtccctccggccttgggcctccgccccgctcaccgagatgcaacgttacattattgcctccgctccgcctctccgccactctctgacccttctcctgcttctggtccctgtctctgtgaatttatttctaagcccccttccatctttggttcccgtctctggctcgtggcccatggggccgatctggaatacaggactccttgggttccggatcccatctctcctcgctccccacactttcccaccacgaggactcaggccacgctggcccagcggggtgagggaccgcaggagtcattagccgcagattaggcacggcccgggatcccgctgggactggactccaagcgctaacccgcaccaggatcccaatccgcgcgctggctgcacagagggtcaaaggcagcgggactcagcggatcgagcgtgttgcaggggccgtgggctcgggcgccccctggaggccgagcggcccccaagctcggggaagaggccttgggcaccccctgtcgggcagtgtcgaccctgcactcccggcgttcgggccgctaagttggtgcctggagtgtccgtccacgcccagcccgtcactccgccactcccgcctccaagacagtgggtcctgcagcctccactcttctggtgtgagatgggaccggagggcggagaggggacgcggaagctcctatctctccagccacaatcggcacccagggttcaggcgggttcctcttctggggttgggcatcctcagatgcctgggggccggggaggcgggggcttcatctctgcttctgggctgcagattcgagattgccctaagccctctgacccggcctgtcctagcctctggctgcccttctttctgcctcttgttctttctgccttctgtctgcttcctgtctctgggtatgtccatctctctcttccctattctggctgtgtctgtctgctctccctcttgctgccttccctacctggctttgtccctctgcatcggtttttctgtgtctctttgtgtctcgctccctccctccacatctctccatctcactgtgtctctctttactaatgcctctctttgtctctgtctttatctctgtctctccccaaccccactccccagctctattcctattctctgggttgctgcctctggggactgaagcagcccaacagggcagcccggagacgcctcggggcactgcccggggtcctcatcctggtcacctccacatgcccgtcaactccgcgcagcgttgatcttcccgctgcggctgtgggacgtggaggggcgcccggaaaggaagacacagggcccagcatctgctcgggagccccggggcccctgacccccctctgccattattaagggcgcctggtcccgaggcaccgagatgatcatgattgcatcagccagacagaagcggagccgggagctgcgcggtgagcgaacgagtgagacaaagccgcccgcgccatctgtttatgcaaagcgctctccgccggggaccccggcgtcccggctcctggccgggcttggggcaagggtcataagcccattcccacccggcgcccccaccgcgccttggcttcccctctcctcagcacccagagggccgctgggcgagcggaacggaaagggggcgggggtgttgatgtgattggagcggacgcggctgtttcttcaataatggatggagatgatgcggatggcgaagccgagctggccgggagaggagagaggaatagaaatggggaaaggaaggagtgggggcgggagactcaccccggcgcgcgcacacacacactcgcgcgcgcacgtgcgtcacactgtcattcggatacacgccgccgcgcggctcacacccaggcacacgcctacgcactgtcactgagacacacatacctgcaggcggagacgcgatggcaacacacactccccgctggctcttcctgattttcacacatacacagacctgcaggcggagacgcacggaaacgcccccacgcggaggcacacccgggcaaaatcacccagatgggagctggggacggggaagtggacaaacccgacagatatagacacactcaggggcacagacacacacccgggcacagagtcggacacacctggggctcaggtagacacacctcacatacccagg

SEQ ID NO: 96061 - DNA, 22426 bp, Homo sapiens
  misc_feature (1)...(22426): n = A,T,C or G
cttattgtttttccaatattcctagggtcagtctccgtctcctgtaccccccagccctcacccactcacacccctgcccctgctggcctggagtccgtagttctgtagctctgactgctccagatctttcatgctattagtttgctcccctatgtcttctgtagagtcttccccaaagcttgctggaccctatggggatagggcagaggtggccttatgagatggtgggaggaaaaggtggtacttcctggggcagagagtgcagtctggacacctgtgtggcatgagacctctttccctcctcccctcctgctctggccattcagtccacagtgagctttgggactcccaggtacacaaggtgaccttttcttccaggacagatattgccttgacattgatgcaggttgtagcacagcttgtcccctgatgcccagtgcaggcctgctctctaacttcccccagtcttaggatttaagtgtatctctcttaaccaggatgcagaaagcaattatttatgtgtttttcttattctttccttccattttcctttctcttctgtcctttccccttggtttctctgtcttaccccattcctgtcttcctgttttcctgtctctgtctctctcccttggagagatatttgttgggtcctggaggcatggggagagcatctgagtccatacaatatactcttgtggcccttggaagagtacccaataaactcagcctaggacaacaacagggttttggccctgacctaaaagctctgacacctgagagaggagcaagagagccagaaccattgttgccagttctcataggggttgtgacccagtcagccctggtggccatggcagcctcctaagctggggagggtcctggcagtgggatctgagctggagattgaggatccccacctggcagccttgaacagaaatgggggaatgacttttgtcttcagcccagacctagggggagcctcagctgcctgcctgtgctgtggggtcctcatgaggtgaagcacagggccaggcctgtggaggaggctgggcaggtgggttcatatgggctcgtggaggccctggacaggagctgtgcctcatgctgttggcagtggaacccccaaagaagggatttgctcaggggagctctttggtctaatcggcttctagacacccacttactgcagggagcccagtggctgtgagtgtggggagccagactgaaggcagagggacgctccttagaggacagctgccatcacccagctcagaggccagggagattcctggggcaggagaagaagggaggggactgaggactgcagaggaggtagaatgtgggaattctggtgatccattggatgtgaggggcataggaggtgatagcactgagatgctgccttgctcttgaattggtaggacttagggctagtaagctttggtatgtaaaatatggaaaccccagagagaggcaaggccaccatcataacttttatctgctatctgctgcccttcccaactctccaagctttcttgcatctcccactgtcgttgcatgctgggtttgtattgggtttctttgttttttgtattttgcctcccaaaatttcttaagtccttgcccttctgcatgtctgccatgcaggagggagctctcccactttggagtgaaggtgtctgtgattgaacctggtcacttcaggaccagtatggccggctctgagaggcatttacagaacctcaaggagctgtcggactaggccagccccgaggtcaaggagacgtatggggagaagtttctgatatcccgtgagtgagctgtggacagtggggagataaagaaatccttgtctagaagtctgggtccatcattagtgcctccaacagtatgagaatctgtcctccaaactctgcctccccaaaaaagtgaggacatttatccccattcccagggtgccatgtggtcaactgttcacctaaaggaagcatccaagctttctataattgggaccactgcctcatctgaatccctcattattttgaagaggaaactaaagtcagagacagtggctaccagtgggctcatgggcagctgggtttagagatagctgattttcatattcttaggctgttagtagagaccttccatttatgagtccagatatctcaaaaagagaggcagagggggcttagagtgaaacggatgttccttgggtgaaggttggggcactctctggggaatatggatggattagacttgaggcatatcatttggggggcctggaattcttagacactgtcctcctaattcagagctctaaatgggagggaagggatgtgctagtactttaaggatctttcctcatccttaacatgcatcagaaaagcatctagaaggctttgggcaaaatgcagtacgaatctatccttgttgacccactgcatggagcgctcactactcagctggctgagacaccaatcttctctacctccccatgagcgacatgcctaccttcctatggacgtcacgctcaactggggctctccaaggctggctaagcccctgtgaatccaagactggggtgcatggttgggtggagctgggtgatctgggtgaggtgatgtgtcttggggagagtaatggtgtggtgggagggagcactcttgccatttggatgcctatcccagcttcttcctcatgccctccacagaattccactgagatatcactcaggactggcaacataggaggaaagaaccaaggtgttcttctaaagattgggacccagtaacgctcataggtgtcctgttgcctttgagtctcttggccaattctgaggagtctacacaatgggagcgtgtgaggaggggaaggatccacagcccacaccttctctgcctcctgcttcttccccaggtgtgcatcaacctggccagtctattacactctctccatgatggaaatggcctggaggaagtggatgggggctcctctgaatatacctgtggataaggtgtggggcgacagggcagccatcagcctgacccctagacctcaggtgccagctctgggggcattggctggcagtggtgttctcgatagggattctgacagaggacacaggaaccaatgtttgaccctcttaaaaccattggctggcagtggtgttctcaatagggattcggacagaggacacaggaaccaatgtttgaccctcttgaaaccatgaccctcaaaaaaccatctggttactttagttctagagcaaaagctaaaaagtgcagccatgtgcagcaagttgccttctagtctgaggggagcatgggctgtgaacaagagggaggaggaggcaggtgccttcatggggatctggggataagagggatgaactcaggaggaaattgaagagagaagttggattatccctgccctgtctcagccctttctgccaccaaggtgaggggcaattgtttcctttccaggagtgaatcaagtagcctggggtcacaggagtgcacagagggacaaggaagcaatgacatgtcacaaaggcactggcaggcctctttgtagcactttgtagcgacctctttgtagcactcagtgaccggccctcactttaacatcattgcacttgggaggggtgctgtttcatggggtgagaaatagagtggtgggagggagctctcaagttcagggtcatgtacctcacttccctcacctctgttctagtttttttctgggacgttattcaggactctggtgatattaggaggaaagaaccacattttgctgcttaggaagggagacccaatcacagataatggcatcccacttccttgggctctgagcttcatggcccacctgtcaacctgaagaatccacacttgtggaaggtcttgagcaactgggggtgggtgagcccacacctgctcttcctcctgtctacctcatcagggtgtgtcttggacctcagcagtctatgctctcccactggagggaaatggcctggcagaggagagggctcctctcctctgagatacctgtgtgcatggggtggggatggggagtgcagctaccaacctgacctatcagaccttaggggccagcttggcaaggaatgctgtcatctgagagagggaggcatttctagccctgggaagaagagccttctatgtggtcctacctccctcacaccccccaccctcatggactgtgtgtttagtttgaggccaggggaacactgccagcatagaggcccaggaggtgctgagtcaggcccaggcctgtgctggggcagttctgagttatccttatgctaagtcagacccaactcctggacctcacctgtgtcctcaaggactgggatacccaatgccccggacctgctcagtcttgagtgacatggtctgacctgtttcagccaagacttctctgttcattcacccaggaggcagacagagactgggagattgttcccagatcccgcataggaggtgctctgcctcgggttggttatgaagtaggtgtggtttgctttctaccatttcccacctccatcccctataagctttaggtctgctctttgggggtgggttcataatctggccccctcccctactttgttaaggaacggccaaaccctgcggggctttcccagggtgacacctgctttatgtgattccacgctggtcagacttggcaaatggtggatcacagagatacatcctttgtcccttcacactagagaactttgtggtcccatttctgtgtcagactcgctaagccatgaaggtgtgagctaggaccaggctcatcccaaggaatggtgaccctagatgttgatccaaagaaccacagaggctccagcatcattccctgcatcttatgcaattctgggtgtggcccctcactactcacacctctggtttccttatttcctttcctttaccaccttacctcttagctttctgtaaattatttgctaaattgcctagaatctctgtttctcctccaagtcccgaccctgagaattttctatgtctctggccccagttctctgctcctcctatatctcatcccctcttacagtcaaggcctctgcccagacaattccctcagctgcccagtgaactcatgatccctcctcatcatcttgcccagggctgcttactggtgacctgagtatgacccccacagggtgtcaggcctgagtcccccaggtctttctgctttctggtggctaagcttcacatgccagcctcccctataggagggccctgctgcctctagcctcaggacaatggaggtacatccaccctaggagaaatccattgcttttcatcctctctcatgatggagacttacctaagaattccagagagctgatgacctgcgacttgtttctcttggggtttggaaggtacagaaccaatgttgtttgttttacattaataaatttgtcttgagtattttccctgaaaataaacttatttacatacctgcactcacgacaaatgattttgatccctggagaccaaaatccccaggctgggttgggggcagggtggggacaggatttctaggggagctgtctggggtgagtcctcatctttcatttgcctgccttacaccgcctgggtgagccaccactcatcaccaacattacaagtggattatttccaattcttggcagctttacccatcagggcagggggagagagggaggcagctaccagggctgtcagaggtgacaaggcttcaggttggacttgaatttcttgcatctgggctaattgctgtggtgatgcatccacctataaaaattacagcgtggctcacccagggacctagatttgttgcaagctgtgggaggaaggagagttcttcttccaggtggtttcctgcagactgcctgctagggctcagaggaccagcttcttccctgctgtctcctgagcccagtccctcttggccatcacattccccttgccctatggcggccctcacagacctctcatttatgtatcgctggttcaagaactgcaatctggttggcaacctctcagagaagtacgtcttcatcacaggctgtgactctggcttcgggaacctgctggccaaacagctggttgatcggggcatgcaggtgctggctgcttgcttcactgaggagggatcccagaaacttcagcgggatacctcctatcrgctgcagaccaccctactggatgtcaccaagagcgaaagcatcaaggcggcggcccagtgggtgagggacaaagtgggcgaacaaggtggggcgaattacattctttggctttcttggtttctccttcttcctcttcctctctcccgaagcatctgacagtatcagagaccctgatgtccagattgggtgggaggggtgatgtagggaaaggcccctgcctcaatctgattggaagccactgcatggtttggcctgttcacatgaaggggtgatttcccaaggaagttttctgtcctggaaactcagagaaacgggaaagaggtctcaataggaagcgaggggggaagatgtgttctgtgtgtccaaacctctaaaaatggacgtgcctggctgggcgtggtggctcacgcctatgagcccagcactttggaaggccgaagtgggaggatcatgaggtcaagagatcgagaccatcccggccaacatggtgaaaccccatctctactaaaaagtataaaaattacctgggtgtggtggcacgtgcctgtagtcccagctactcaggaggctgaggcaggagaatcacttgaacccgggaggcggaggttgcagtgagccaagattgcgccactgcactccagcctcgtgacagagcaagaatccctctcaaaaagaaaaaaaagaaaaaaaaaggatgtgcctctctgatgtttcagcagtcctaaccatcagctcctggggaaatacaaacacatttcttgttgggatcaggatgggggagggggaatgagacaggaggctggatcccatgagtgggtgcagtttgtctccttgactatgtcaggcaggggagaaagagatctggtctcttcttgacatcatggtgggtgttgatttgacttcagggcaagtatgtatgtcacagtggctgctcctattgggaaaggaagctgtggactggggctggcccaggactgtgtggggacctgcctcatgcacttccagcacacagggtgtgggcccaggaacaggaggaacaggatggctgagttgcagaagcagcagactagaggaagtcctccctcctaaaggaactagtctggagcccatgcgcaggtcagggcaacagagccctggagccagggggatctagacagtaactccctgcttgattcttctccttagcacttatcactagtcaatgtacaatagattttacttatttattgtctgtttcctctgctagaataaagcttcctggggacaaggatttttgtcccttttatttactgtacatccttagtacctagaataatgtctggcacctagtaaggtactgaataaatagatttgagtgagctaattaattaataattcagcaagagtgagccnctgtcttcagcaggctgtctcagccagttccctacattcagccttgagccacttgccttaatacctcacttagcatgtgagtttcctgttgctattgtaacaaataacacaactgtrgggtctgaagacaatacaaacatattatcttgtagttgtggaggagtaatgtctaaaataggcctcactgatctaaaatcaaagtcagcagagctgtgttccttctagaggctgtagaggagaatccgtctcatcgmcttttccagcttccagaggcagctggcatcccctggctcctggcctgctacctccatcttcaaggcccgcaaggttgggcccagtctttttcacacttttctcaagctctctgattctccggtttctgcctctttccacttaggacttgtgattatattgggctcaccaggttaatccaggataatttcccgtgttagcttcctccctaactttaaggacaattaattagcaacctccattccacctgcaaccttaattcccctttcccatgtaatccagcagattcacaggttccagagataatgaggatggggacatctttgggggaccattattttgcctaagccacttggcaatatcctggtctaagaaacactgggaactggggtgggtagggggatgggagaggaagttctttcatgctttctcattgctcctgaatggagaaaggcagggagactgggyaggggcatggcttgggtggggaccccagccctagagggaggggtggactaggatttatgtttgtgttgagacctgccctcaggagacagtgggatgcgcctgcagagtatcttggggctgctgaggctggggctgtggtgsgaatcaccaggcagtaggacttggggaatccttgcatgaaggagctggaaggggtccttgaggagtgtttagaggggtttacagtagaaccccaatatgtaaaacaaatgaaaggagagcttctcctgcattttcctccccctagaaggcttgcaaaatacagcctggaaacaactgttttagtctaatctgatgaagagcctgaggcccagagagggaagtgacttgttcaaggctggaggtaaaaccaggactggacctgaagctcttcaaccctgggcccctgcagagttgaatgacaacacttagcattatttctttccatttgtaccaacctaattgaaatatctcaaggatagtcctcatcacattttccataattattttatttaaatattttatatatttatttataaatattattatttccttctaggcttgtgagttccttgagggataagatgctgtgttgttcattttatgtctcctttgccctgtattttactttattttattttatatcgttttatttcattttatttttagagacagagtctcactctgtcacccaggctggagtgcaatggcaccattatagctcactgtaacctcgaacaaggtaacctgtaacccgggctcaagtgattctcccacctcagcctcccaagtagctagaactacaggcacataccaccacgcctgactaattttttttctttttttgtagagacaggggtcttactctgttgctcaggctggtctcaaactcctggcctcaagtgatcctcccacctcagcctctcaaagggttgtgattacaagtgtgagtcactgcacctggcctccttcaccctgtaattgtcacagactagataaatgcatgaataaatgtgtgaagatgaatgaatgaatggattgattttggtagtatgtgaaatgcagttggttatacttaagtgaatagagagggagaagtatgatggggaagggatctaaacattaattcattggtatgaaaatgaaactcttatcccaaagctgatagctgaaatgctgtcacctaacacctcgattgtagctrgtacagagcgccagctagccggcagactttatgtgaatcaggaaaaagtgtcccttcagggaaaacgagttagtaaaagacacaccttccttttatgttatagcctgaccgagttatgtcttgtgcacctgctcaaccatccttgagggcactgagccggtggggagcagaacttggttctttcccaggcccactgatgatttctgtgtggttcatctcacccccaggcctctgggccctggtgaacaatgctggtgtgggcctgcccagtggtcccaacgaatggctgaccaaggatgactttgtgaaggtgattaatgtgaacctggtgggactgatcgaagtgacccttcacatgctgcccatggtcaagagagcccggggcagggttgtcaacatgtccagctctggtggtcgtgtggctgtcattggtggtggctactgcgtctccaagtttggcgttgaggccttctctgacagcataaggtaactgggccctggtactgaacaattctgggtgaaaatcccagagattagagagggttgggagtgacagcatgtgggcaggggaattccgcagacaggaagctaacacaatagcagaaggaaggttagacctcaaggtgctttctccaaggaccaagagcagggatgaggagaagaggtagggtggaaatacaaggcatcaggtgggccttcccttgagcggcaccagggtgagtgaaaccctgtttgggcctgtgagaggagggagagtcccccaaacagacagacaggcctggaggcacaggtcccctctgggaggtccttagaggagcgtgcaggccttgtgtatatccacaccattcaccgtgtgggtgttgagtgaggggttgctaatgggagggacctggtgggaggcaaggctttggcctagattctctattgacttcttcccgctggttgtgcctaatgcaaattgcccagagactgytgggccagttttggaaagggctgagtccctaaggaagggcttatttgcacaaaggcaatgccagggccaagtacaggggtgagagaagcatctctaggttcctgaaagaccagcccatccagaggtgactctccgtgatgattgtcatcttggggcccagactgactgcaactcttctttcccaggcgtgagctctactactttggggtgaaagtctgcatcattgagccagggaactatcggacagccattctcggcaaggagaacctggagtcacgcatgcgaaagctttgggagaggctgcctcaggagacccgggacagctacggagaggattatttccgcatctgtaagttcctggggcaggagaggggtctctgaggggggcgagtgggtcttggggtcattagctggctttccgtttacagatggtgagacaaaatgcagaggagttcaggacccaaggtcacatagtggcacagctggggtttgagaatagagagcaagtggcagaatcatcacttctggagcagcccggggagttaagggcaattcagcccactcctggcacctgcccccacagcatcatgatgcaggggaatcaggtgaaaatgcactgagataaatacagcaaagagatcaagggcatggctgctggagccggactgcctgggttcaaatcctggctctactacttaccagctaggagactttggacctattacctagttttcccatgcctcagttttcttatttacaaaatggagctaaagatagtgcctccctcatggggttgttatgagggttagtatgtgtgaagtactttgcacattctgagtgcttgttaataaagaagaaaatgagcacatggggatttaaaagggagggtctctaggcaactctctttctttccctgagctgagggtctcctgtgaatcataggtgtttttggagggtagaggtgggacacggcagctgtttaccctgctgccccaaaactttctgccacgaaagttgtctgctggatgtcrtacgtcaacagagcacaaagccaagtcagccatttttttcacttaatacatacacactttattgcatttttgttttttgtttttgttttgaatcagtaatacaaagcatgcaaggctgccatgtcccaagcctgtgtggggctggagagctggagcggacacagcagtatgcctgcccttcactgcctgtagcttatggcccagtaggggagacaaacatwaatcaaaacacatgtgtttatggtagatgtggataagtgctacagaggagaaacagggttgtgaaagaagaatggagcaggaagttgcggtcccaattcagactatggtgaaggggagagcttctgagttgactttgaggaggaataagagttaggtgttgctgggaaggggaaagaggggatgcgtagggactttttttctgcaggaaggctctgaggcagaaaactccatttgaggaactttaaagaaaccagcaggtgggaagcaatgggaggtagctggggtatacggaataaattagagcatcaaagcacactgaggattaaggggtgagggagaggaagctatcaagggtgagtgttagctttacagcttgaagaacatggtgaatggaggtgtcttcattcattgatttagggaagtctcagggaaaaatgtttggagtactccttagataaattcatcttttagtgctagacatgttaggattctgtgagaagaaaatgtctaaggatttacactagttgggacttactcagtgacagaagatccaatgcaaattatttaagcagaaaaggaatttcttgcctcacctgactaaaaagttgagcaagataagcttcaggtacaacctgacccagactgcaaatgatgttgctaggacctggttccacccatttcttggctctgcttcttttgcactgactccagtctctaagctctctcccctgtgggagccacattgctgcagcctctcttcacctccacctagggtgaggtctgctgggaaaataggagagttatttccagtacctctcccaaaagtcctaatgtacactccgacttggaggaccttatggtgaccgcgtcatgggggaccacaagatgcacccaaccctaaaccaatcactgcgcccaggggaatgtgaaggtgtgattggctcaggctgggctgtgtgctctgcccagaccaatggacacagtgtgggggaggcataggtccccagagggaaatctgcagctgttgggaacaaggagagaagatgttagcatgtgtggggaagaatatttatcctctgtgtgatcattcttagcaaagagtagttcaaattatttgtggagctgcttggaggctggggtgaaatgggttcagccagtgtctggaaacctcacaaagtcattttctaagtaagcactcagggtgaagagagcttgtagcatctttagtgtggtccatgaaagaatatgtataaaggcaaactcctccgaaaaccttgtccaaaagctagtattgtactaaagaatagtaaggattgggtttataaaatatcttaggccaattcacctgtagtccacaccataatttcagaggaaaattttcaggcagtggtcaactacatttagataaacgttttcccaagtggttatactagaatttttgcttcagttgcccagtgtttattgggattcagagatgagacactctccaggaaactagcagggaagatgtgaaagcaaatacaccaccacatgaagaatcttgctataatggacatgcrtacaaaacaaagcagcaatgcagacttcattctgctgtcacagaagccttacagaggtgacagttaatgccttaktgagttttgaaggatgaataggastacaccaaaagggaaagagatggcggatgtttcacacaagaggaagggtgtgagcaacgttttagtgacctgacatagcattgtatgcttttggaggcagtgcagattcaggcttgtattccagcagtccctctaatcatgttgtatagctctccaaacttgtttatccatttataaagtacaattcctctctcatggattgttaggagaattaaacagaaatgcaaagtactcagctctgctacagtaagagctgaacaaacctttgccattgccattatagtctggcaggagtgctgtgggtgatgattgaggaggggagagattaggagtcagatcatgaaatgctttgattgctatagtagggagcatggctcttatcctaaaggcattagagagccttgtaaatggctctgaaatgaaggatcagatttgtgtcaccgtgggaaggataaaaagtccacctgggggactactgcagaaacccagtgaaggaacgataaagacatgaagttgtaagtcctgatggttctggtggtggggggtggctatgtgacagacagaagagatatttaggagtagtcctagagcatcgctgggtacaaactcagccagttgctgtgactgaccaaacaggcccctggcttgtaacccctaggaccaggcctgatactttatagattttgtcctgcttaattctcccaataacaaaaacattttcccaggtgcccagctccaaagcctatgtccttcctcactgtgaaggagagtgacaaagctggatgggtccttccgtctcccrtcctactccatgcctagcagggtgcccagcactgaatggcagctaatatctatttgagaaaacaatgaaagcaagtgcctcataccattccccatgtctggggtaacttctcccaccccactgcctgtgcaagccctccccacctctcagaacccagtccccagcccatctcaccatgtcagcttgctccacatcctcagcccacaaagctttccctggcgccgagggggcagagagagcctcctgggcatcctgaacgattccttcgaccctcagccctgctgctggtggcctctgtgccagctctacggtcagaggtcagggtgtggcttcctaagacattactgctttatggacagtctggctttgagttagtgtggctcttgttgagatcccaaaatatagtttggcttttcccctgcatcagttttctttccaggaaacagaaaatggagtttctcggagtctggggtkaaggggactgaagtgatgctgccccattctcaccaaccacccacaagggtcctggccccaagcgggtgaattccttgcctgcctggaccattctcaaagtcagggcagctttggcttcctctccattttcaagttttcataccttatcagggcagtctgactttgaagcatcattttccctggagtcctcagggctctcaatgaagcatgaatccccctgtcctggggtgaggatgcagatgagggcctggtgggtgtgtggtgtggcccttctcccatttatgtcatgaactttggcagacttgtactatttgggtgctctgtccccatctccacccctgtgggtcaatgcaaacagaacaactcctcacatttgtgagggccccacgaggtgcttgtctatgccttagattatttgagtgacagtggccttatgactgaggtaggggcagtwttactatttttaaataatattttctcctgcatgtttttgtttaaatgtgggaactctaggaagtacatagaagaaaaaaaaaagggctgttttcccatcatgtttgctcttctgtactcccccagtgtctaccctgctgttaatcatctttgttattctccaggacagatattttttgagatggagtctcactctgttgcccaggctggaatgcagtggcgcgatcttgggtcactgcaacctcccactcctgagttcaagtgattgtcatgcctcagcctcctgagtagctgcgattataggcacgcgccaccacgctcacctaatttttgtatttttagtagagacaaggtgtcaccatgttggccaggctggtctcaaactcctgacctcaggtgattggcctggcttggcatcccaaagtrctgggattacaggcctgagccactatgcccaaactttaggaaagatagtattatctccattttatagacaataaaagtttaagctcaaagtcatataactaataagcggcacagttataaggagaatgtgcacagttcttctcatcaccagtctaatgcaatagtaggacttcaatgcacaattgttgaattcagaaagataaataagactatttgtttatttatttatttatttatttattttgagacagcgtgtcattctgtttcccaggctggagtgcagtggtgtgacctcggcttactgaaacctcagcctcctgggttcaagtggttcccatacctcagcctcccgagtagctgggattacaggcatgtgccaccaagcccagctgatttttatatttttagtagagatggggtttcaccatgttggccaggctaagattatttataatagtcttataaatgtgtgtttgtataagggaccacctggagggtgtggcggacctgcctgaaatgttagatcagggatctgatggaaagggaacttggayggaattcggaagaagccatcttttatgaagaataacagagcctttttcccctctctgccctcaaacagatactgacaagttaaaaaacataatgcaggtggcagagcccagagtcagagatgtcatcaacagcatggagcatgctattgtttcccggagccctcgcatccgctacaaccctggcctggatgccaaactcctctacatccctctggctaagttgcccacccctgtgacagatttcatcctaagccggtaccttccaaggccagcggacagtgtctaaactggggaggatcaatgggtcagtggagcctagaagtgggggaggaaggaaggaccgtggggtcacaaaaggtggtatcggttatcctgggggcattggctgcaaaggaagcttggctcagctgacacccactgctgtcgaatttaccagtaacttctaacagaaggtgaatgcctcttcccaccctctgggaccccacagaaacctgaggtggtctttgcaggttcagcgatctgcagcaatagctccaaggacgtctgtcacccaatcaggatacagctttttctggtcctggaaaagtcatggagaagaaaaccagctcctgtggaatcatgagcccctttcagttatcactgccactgagaaatactgtgggataatcttgcctccaggagaatctaaccaccttcctaatgggtccctcaatatgcataacttcattcacataacccattactgaagtatgcggtagggcagatagggagtgcaagattaaatcagacaaaagtttaaaatattttctttctttttagattcttctatctataggttattgggatccacatgaaataacattcatttatttaatcaccattaatttttcaaatatttattgagtgcctactacctaccgggcactttgtaggtgctgggggaatataaagatgattaaatcatggtcttggttttttattgtttattttgtgttttgctttgctttgttttagcacaatatctagtagctgagttaggacaaacagcgatagaaggaatagaaatcagaatacaaatttttagagctatgaaggaccctggaggtcttcatccaatacttcacaagcttggctgtaccttgtatcacccagtcaattaaaaaatacagactcctgtgccaatattagaaaatctgattcagtaggactgagataaggtccagaaatatgtgtttataacaaggacctatatgattctgatgcacccgagcaacttggagccaccaataattccatagaataagtaacttaacactcagagggggaagtgacctacccaagcccccagtttagtaactaagacaaggatagaaatgaggcattcagactcccagaccaggattatttttcagttataggaaaatcaatttctcaaattagtaacactgtcaaataagtcattgaactaattttttttaaaaaaagacttaaactcctgggtcatatgaagttctgtggaagagacttttttttttatcttgataaatggtcatgtaataaaggtcaaatgtgatttttttaactaaaatatctttaatttgggtctcttcaacatctgaaaataataaaatataatccaggtacatctgcaaagactccaaataaggtaacactcacgggttccaggggttagcttatagatatatctttagggagctactgtgcaactcactacagtttgttgtttgcagcacttctattcctggcaccaaattctaaatcagatagaatgcattcaacaagtaacagaaaaaccaactcacactggcttagacaatgaagagtgagggcagggcccagtggctgaatgatggcattgaggctgtaggctctttctacttctttgctccgctgcccacagttttatctttaccctttgttgctgtggtgtgactgccaggcaaagggaactctacatttcctcattcacaacttagagaagaagaaagagcctgcctttccacagcattcaacattgaagaagtttctttcttagagccctcatcatgtgtctccttgaatctcattggcccaaattggtttaggcttgtccacccctggcaaagaggtaaattgccatgaattgcttagattaatcacgggacagatgggatgttgggaaatcagtcacaatgtctactaccttggaaaatgcaaaactcagacattatgctgttgagagggttgaacaaaggtcaaaaataaattttctgaagacacaaaaatttactaaggggaaactggctaggtaatattttgagataataatttacactttttcattcctccctgtttttttttatttccccttcttccattcaaatagatagccaatttggtacttctttacctagggtgagatgtttgatgggataaaacacataaatttcctgcactttttccagctttagtttcccccaaccctgatatatttagaaaaattatagagttgtgggaaagaagtaaaacagaatgtgacttatgggtgtaccaaatgactcagagaaaaagagactttcccctatgacaaagagattcactctgatgagataagaagttgatgtttggggttcccaggacaggagggaccagggcccactttctagagcaccttgggggcacaccatggggaggtgacaagactcaagagagtcacagctacattgtatgtttaggcagattcgacttcagatgacctcacaggagactcatgtgtcccaccatggcaggaaggtagtagaaatttgctagatataaagggcatgtagactggaacagcagacactaaagtggtaacctttagaagatagaagacttaattttttggtctgagggccatctctccacctcatcattaatagctgaggtattttttgaacttatgagctgagattcatatatgctccagagttacattttggttgatttcatattagaaccatcacctttcttatataacttttgtattttcctggagttttgaattgccttttcttgttcatttattcagcttcttaatcatttttatctccatttttaaagtaggggagtaatgtgatctgatctatatttttaaaagatcactggggggctctgtggagactgaaatgaagaagcaatggtggaagaaaggaggccattgcataatccaggcaagagatgatagtgccctaagctgaaatggtgttagcagaaatgatgctaatagatgaagtcaatatataatttggaggtagaaccattgatggactttaatcattagtcagtctgtcaagaagaatttatcaggctcctactatgtgctaaatgtggttccagattctagagttatagtggggtataagacagagtccttgccctcaaagagtttacattctaacggagggaggggttggccaatagacatataaaaagtgaatgaaataattttatatactgataagtgccatggagaagagaaaatataacaatgtaatagatgaccagggaggctgcttacctttttttctaatcaacattaatgaggtaaagtttgcataaaaagaaatgcatccatctaagtgtaccatctgatgagtcttgtcacatgtttacacctgtacaaccaccaccagtcaaaatataaaacatttttctcatcctagaaagttcccttgtacctgtctgcagttaatcatccctcctctccaccctggttccagacaaccactgatgtgtttctgtcactatagattcattttgagactgcttactttttaaaaagaccacttttgctgccattggggaatgaattggaagaactggattgaagaggtgcaagtctagacctgataagagaagtgtgacaataaaataatagaaataaaaataactggcatttattggacatttattcagtccaagcactgcgcttagaatttcccacatattatccattcaattttatttaatctctgcaacaagtcctgtgaggttactcctatgttatagaggaggaaactgaggctcacagaggtaaagtaatttgcacaagattacactgctaataaatggcagagtcagagtgcggttcgccacatgctacaatagcaagcacttccagagtgctcaccacatgccagacactgttctaagcactttaattttcttttttttaattttttattttactttaagttctgtgatacatgtgcagaacctgcaggtttgttacataggtatacatgtgccatggtggtttgctgtacctattaacccatcatccaggttttaagccctgcatacattaggtatttgtcctaatgctctccctcccctagccccttaccctcagacaggccccaatgtgtgatgttcccctccctgtgtccatgtgttctcattgttcaactcccacttatgagtgagaacatgcagtgtttggttttctcttcctgtgttagtttgctgataatgatggcttccagcttcatccatgtccctgcaaaggacatgatctcatttttttaaaattttattattattatactttaagttttagggtacacgtgcacaacgtgcaggcttgttacatatgtatacatgtgccatgttggtgtgctgcacccaccaactcgccatctagcattaggtatatctcccaatgctatccctctcccctccccccaccccacaacagtccccgaagtgtgatgttccccttcctgtgtccatgtgttctcattgttcaattcccacctatgagtgagaacatgtggtgtttggttttttgtccttgcggtagtttgctgagaatgatggtttccagtttcatccatgtccctacaaaggacatgaactcttcattttttatggctgcatagtattccatggtgtatatgtgccacattttcttaatccagtctatcgttgttggacatttgggttggttccaagtctttgctattgtgaatagtgccgcaataaatataagtgtgcatgtgtctttacagcagcatgatttataatcctttgggtatatacccagtaatgggatggctggctcaaatggtatttctagttctagatccctgaggaatcgccacactgacttccacaatggttgaactagtttacagtcccaccaacagtgtaaaagtgttcctatttctccacatcctctccagcacctgttgtttcctgacttgttaatgatcgccattctaactggtgtgagatggtatctcactgtggttttgatttgcatttctctgatggccagtgatgatgagcattttttaatgtgtcttttggatgcataaatgtcttcttttgagaagtgtctgttcatatccttcacccactttttgatggggttgtttgtttttttcttgtaaatttgtttgagttcattgtagattctggatattagccctttgtcagatgagtaggttgcgaaaattttctcccattttgtagattgcccgttcactctgatggtagtttcttttgctgtgcagaagctctttagtttaattcgatcccatttgtcaattttggcttttgttgccattgcttttggtgttttagacatgaagtccttgcccatgcctctgtcctgaatggtaatgcctaggttttcttctagggtttttatggttttatgtctaacatgtaagtctttaatccatcttgaattaatttttgtataacgtgtaaggacatgatctcattttttatggctgcatagtattccattgcgcatacgtgccacattttctttatccagtctatcattgatgggcatttgggttggttccaagtctttgctattgttaagtagtggtgcagtaaacatatgtgtgcatgtgtctttatagtagaatgatttatcatcctttgggtatatacccaggaatgggattgctgggtcaaatgctatttctggttctggatccttgaggaatcgccacactgtcttacactgtcttccacaatggttgaactaatttacactcttaccaacaatgtaaaattgttccgatttctccacagccttaccagcatctgttgtttcagcaccttaattttcataacaatcctgaaaggtgttattactccagttttaatgagaggaaactgaggcccagagagggtgattataatacatagcctataagcatctggcagagcagattctttgagttctgtaatgctattatttaattgtttgtcattgcttta

SEQ ID NO: 96062 - DNA, 18267 bp, Homo sapiens
  misc_feature (1)...(18267): n = A,T,C or G
attgcacaaaactcggccaggcatggtggctcacgcctgtaatcccagcactttgggaggccgaggtgggcagattacctgaggtcaggagttcgaaacctgcctggccaacgtggtgaaaccctgtctctactaaaaatacaaaaataaaaataaaaaatccgggtgtggtggtgctcgcttgtaatcccagctacttgggaggctgaggcaggagaatcgcttgaacccgggaggcagaggttgcagtaagccactgcactccagcctgggggagaaagtgagaccctgtcaagaaaaaaaaaaaaaggaaggaaggaaggaaaggaaggaaggaagggaaaagaaaagataaatgtacatatctgatcaaaaaaatcaactgcaaaaaacaactagaaatctggcctcaaacttgttgatatggaggttggacacagataagggatttctatggagtgaattaatgacttgtaaggcactagcaatgtgatatggctgcttccagaagggctaacatactcttgggttatattcttttaagggaattataaaaattgtgctgctcttttttttttttttttttttttgagatagagtttcgctcttgttgcccaggctggagtgcaatggcacgatctcggctcaccggaannnnnnnnnnnnnnnnnnnnnnnnnnnnnnnnnnnnnnnnnnnnnnnnnnnnnnnnnnnnnnnnnnnnnnnnnnnnnnnnnnnnnnnnnnnnnnnnnnnnnnntgtgccaccatgcctggctaattttgtatttttagtagagaggagatttctccatgttggtcaggctggtctcgaactcccgacctcaggtgatccgcccacctcggcctcccaaagtgctgggattacaagcataagccaccgcgcctgaccatgctgctcactttttacttacacactggagtatttttaaaggctgacagcatagtcaaggacctggaatctggtagtgaattccctgttatttagctacattcaagcagaatgtgggtgacccacctgataggatgttttagggaaagtccctgcatggccgggcacagtgggtcacgcctgtaatcccagcactttgggaggccgaggctggtggatcacgaggtcaggagattgagatcatcctggctaacacggtgaaaccccgtctctactaaaaatacaaaaaattagccgggcgtggtggcaggcgcctgtagtcccagctactcaggaggctgtggcaggagaatggcgtgaacctggaggcggagctggcactgagccaagattgcgccactgcactccagcctgggtgacagagggagacccgtctcaaaaaaaaaaaaaaagttcctgcattaggcagatggctgaactagatatttcctccaaggcctcttccaactctgagatctctgagatcccattattctatagttctctgacctgattatagacagccagggcatgtgttcccaagacagcgtctccctaactctggtgccccctccagcctgtagcagccatgatggaggaggagccagagtcggccagaccagaggaaggcaaaccccaggatggtgagtgttacccacctccatccagagatggagtaggatcagaggctcagctgtggaacagagggtggaggagcaaagggcaggccagctttggatagacgaggcccttccacaaaagggtaagagaataagaattgccctccaggagacagacaatttgttggtgtttcctatcccaggaaaccctgaaggggataagaaggctgagaagaagacacctgatgacaaggtaagaatccttcctccctgcaaggaacccagttctctccccaacccagctctgacaccactactcatggccctggcagaagctcactctttaactcctaggcttcccatcacttctgacccacactctccatcaacttgcacacccacccacgaccaaaacacttctctcagttcagggacctagaagagagttggagtgtagagtgtgtggtgaatgtccctgccttggaatcctgcccctcagtgtggggtagaggagccctaagactcatcattcccttgcacccccagcacaagcagcctggcttccagcagtctcattactttgtggctctctatcggttcaaagccctggagaaggacgatctggatttcccgtgagaggccttggggcagggggctggtactgcggagtgaagaggaaagagctgggttcccccaagggaaaggaaaaggggggactcagggcttggagcctattgatgctggacccggggcacagcaggggacctgctatgtgagtgaggcccctcccttcccctcccaggccaggagagaagatcacagtcattgatgactccaatgaagaatggtggcgggtgagagaaatggctagggctagggtggagtgtgggttgagtccagaacccgacattgagagatggactctccctactatcttccctaggggaaaatcggggagaaggtcggatttttccctccaaacttcatcattcgggtccgggctggagaacgtgtgcaccgcgtgacgagatccttcgtggggaaccgcgagatagggcagatcactctcaagaaggaccaggtaggctgttgccccaacccaatcccaggcctgaatgctccctagcccaccacactccttggagagcttaaccattaataagactagggtgagcccctgtaaaccccggctcccctgctgtcctctcctaccttttcctttgattcctctcctacttctgatcctttaatcttctagatcgtggtgcagaaaggagacgaagcsggcggctacgtcaaggtctacaccggccgcaaggtggggctgtttcccaccgactttctagargaaatttaggygtgcgggcgcctgcaagcgggagacacccacaccccattctgggcgggcccagtggagtttggggaggggggcgaaagcaacgggactgctgggagaggaggggtaggaaggcccgcctgagcgcgacggggcttccgggaagggactggttctcgcccccttccccagcctggggcctcggatacctgctgcccagagcagcccggacccgaaacctttcaggccccgcttgcaagagctggaaaaaaacgcgtatctactaggaggagccagggactggggcggggggcgggggcgagggagggcgaactgtcgaatgttgcgaatttattaaacttttgacaaaacttagaaaagttgttatttaactggggttgaggagagggcctgcggaggggtggagaatcctccctagctgtcccgcctcgttaccatcgggtaacctgagacccatctgggctgaggttggcgggaggtgggaagtgcgcccgccaggtgaggcctctgtagtcagtaaagaaaggggagcgcagggctggagtcgccgcccccgcgccccagcggttgggagcaggatcttgtagtagggtaagtccccccttgctcttggcgatttagccgcaggcagccccttgcatttcggaatctggcttggcgccgagctaggccgccagggggcgatgcaagatctcggttggagagcgagggatggggagggggtggagggtgggtaaggggagacaaccagagacaccaagcccgagaccctgggcctgggagggggtggggtgcgtgccgtctccatggcaacacttcctcaagtcctccgagaaccgagctagctaggccgggggcctaaccccacccgcgcggcccctgccctaaccctttccgacaggtaccgagtgagaacggagggcaracagctaaccggctctcgcggagacacccctgcggagcaccgtatgcaaatgttattatttgcatatgcaaatatgcaaatacgccggccctggtcagggcggcaggtggcgaggagcaggaaggtgtggggaagggagcagaaggagacgaggagtttggggacctgagagcggacccagtgagaggcaggctggggtggtcgctggagtggggcaggcgtgtgtggggggggtcttgagctcgatgccgggtgggggagggtcggcttggccagccaggagctcctcttctcgtctgcccgttgtctgccaggaccgaggttggcaccgcctagcaaggttggcagcgggagcccgggcaccatctgctgctggcggggggagggcagaggctcagctgggctggggaagaggaggcctgggacgggcgcgccccccttccagaaggctgaggtgtgatgggggtagggaagcacacaagaagactctgcagaaccgggttcagttttctgttccctttgcccttgacggtcccggatgcctgagggggtgggggcggagtcattaaagaagaccccccctttaatcgcgattgagctggaataggaacagatcacaggcaaacacacacaccaaccacacgcaaatcaagcattctgtccttatccttccttgaaatccacctaccaggaatgtatgaggggagggaccgcgagggctcgggtcgtctctattcatcaaggtctgagggactcaaaatcagagccccccgagatcctcgagagacccccgccaatgctaaggcaaaaccaatttactggctcattgggcggcaatgctggtgtgcggatgccgagaagcagggagagcggctgttctcccccaacactcggggggcgcccccctccctagcctcactgagccggcagctgtccctaattagagcggcggtttaattggatttatcagcagttaataggaaattaagcaaagggcccgagagaaggggggcgggaaaagcggggaaacaggctgtgctgaactagaaggaggggtgctagggtaccaggggtggggacatgtgacccagtgtcccgatcgagccccacggtcacaccctcccgtcattactcaccaagactcttaagccctggcccgcgggccggagagcaggtccccagagagggcggcaggcgtgacagcgaccctatgtgagctcccagcgccctccatccccctaaacggcgcctgggtgatggatgatactgccgcatgctgcaaaggtcataagtctgggccaaggagcagactgaattgaaaacagatccgaggaagggccggtactggggtacaagacaaccggcaccccaacctcctccactgcccactctactcagcgcgcgcgcgcgcacacacacacacacacgtgccccttgaagttggaagactgggcagcacggggggaaaaggcagagtacagagtgaccctttctataaaccccaccagcagcagtgttggggatcctgagaatctctcggtgcagctccagtgttccctttaggctctccctccacgaaactgcccgatttgggtcagtggggtccgcccggtctgctgctcaggggcagcccaacgtcggcgctacccgccctaggggccagtcaaggaagcttgcagacagctaagccctggtgcacgggcctcctagtccacagccccaggcgcctcctgtcaccaagacctcatcatactgctaggctaacaaggcctgctccggagaccctgacgacctccctgccacattccaccccgcagggcacagatggcaactcctgcatatgctaaggtgtgctagcctctgagtgggtgtgggtgggctctccgtgcccctggcaattatggacgtctgtatctccggcgtgtggttagtgtgtgtccgtttgttccctgggtatgtgaggtgtgtctacctgagccccaggtgtgtccgactctgtgcccgggtgtgtgtctgtgcccctgagtgtgtctatatctgtcgggtttgtccacttccccgtccccagctcccatctgggtgattttgcccgggtgtgcctccgcgtgggggcgtttccgtgcgtctccgcctgcaggtctgtgtatgtgtgaaaatcaggaagagccagcggggagtgtgtgttgccatcgcgtctccgcctgcaggtatgtgtgtctcagtgacagtgcgtaggcgtgtgcctgggtgtgagccgcgcggcggcgtgtatccgaatgacagtgtgacgcacgtgcgcgcgcgagtgtgtgtgtgcgcgcgccggggtgagtctcccgcccccactccttcctttccccatttctattcctctctcctctcccggccagctcggcttcgccatccgcatcatctccatccattattgaagaaacagccgcgtccgctccaatcacatcaacacccccgccccctttccgttccgctcgcccagcggccctctgggtgctgaggagaggggaagccaaggcgcggtgggggcgccgggtgggaatgggcttatgacccttgccccaagcccggccaggagccgggacgccggggtccccggcggagagcgctttgcataaacagatggcgcgggcggctttgtctcactcgttcgctcaccgcgcagctcccggctccgcttctgtctggctgatgcaatcatgatcatctcggtgcctcgggaccaggcgcccttaataatggcagaggggggtcaggggccccggggctcccgagcagatgctgggccctgtgtcttcctttccgggcgcccctccacgtcccacagccgcagcgggaagatcaacgctgcgcggagttgacgggcatgtggaggtgaccaggatgaggaccccgggcagtgccccgaggcgtctccgggctgccctgttgggctgcttcagtccccagaggcagcaacccagagaataggaatagagctggggagtggggttggggagagacagagataaagacagagacaaagagaggcattagtaaagagagacacagtgagatggagagatgtggagggagggagcgagacacaaagagacacagaaaaaccgatgcagagggacaaagccaggtagggaaggcagcaagagggagagcagacagacacagccagaatagggaagagagagatggacatacccagagacaggaagcagacagaaggcagaaagaacaagaggcagaaagaagggcagccagaggctaggacaggccgggtcagagggcttagggcaatctcgaatctgcagcccagaagcagagatgaagcccccgcctccccggcccccaggcatctgaggatgcccaaccccagaagaggaacccgcctgaaccctgggtgccgattgtggctggagagataggagcttccgcgtcccctctccgccctcsggtcccatctcacaccagaagagtggaggctgcaggacccactgtcttggaggcgggagtggcggagtgacgggctgggcgtggacggacactccaggcaccaacttagcggcccgaacgccgggagtgcagggtcgacactgcccgacagggggtgcccaaggcctcttccccgagcttgggggccgctcggcctccagggggcgcccgagcccacggcccctgcaacacgctcgatccgctgagtcccgctgcctttgaccctctgtgcagccagcgcgcggattgggatcctggtgcgggttagcgcttggagtccagtcccagcgggatccygggccgtgcctaatctgcggctaatgactcctgcggtccctcaccccgctgggccagcgtggcctgagtcctcgtggtgggaaagtgtggggagcgaggagagatgggatccggaacccaaggagtcctgtattccagatcggccccatgggccacgagccagagacgggaaccaaagatggaagggggcttagaaataaattcacagagacagggaccagaagcaggagaagggtcagagagtggcggagaggcggagcggaggcaataatgtaacgttgcatctcggtgagcggggcggaggcccaaggccggagggacagcggcggctctggaaaaggagcgcgacggagaatttgggacctggccggggtcaccggaactcagaacaaagggcacaaggaagcaggcgagggcctgtgagcaaaggcgcaaggaccaggcgccccttccggcgtcctggctccccagctgtgccacagagaaccagatgtgcagcccagttgtgcggccgctcgagtttgagctctgggattgttttttggtcccagagactggagggctggggtgcgcgggtgacaggacacgccctcccttcctgggccctggaggcgcgggctctcgggagggctgggctgctggaggctctaacagcccgtcagccccgctcccccgccccccccacacacatcgcagcgagtctctgtctctttgttctcgccgtgtctctgacactttatctcattatccgccggagtgaggcggagagcccgggaccccgcagcctaattacagccgcgcttgtcagagtagggggcggcggaagtatcagcgagaaggaaagggaggcggaccctagaaagcgccctctccctccctgtaccccgacgatcccagagacgggtgcatagctcgctcccgcccgcgccctccacagggcgggctctggagggggaggtgctctgcaggatcggctgcgaggagggagggggtggtggaggttatcgtgggagtggggagagatattaggactcggttcctacgtccctaagacccaaattccccagagacgggggctgtgagcctccccaccccagcagcacagcacacacctgagatggttgaggacaggagggaatcgcttgcatttctgtgtctgtgtcttgttctctttcagcatctgtccgatctttcctgtttcccccactccattcccttcctatccatcccacagccagaggaagtggatggcctccttgggcggccccacctttaccctaccccaggtaggcagagcaagcaagtctctcaagcctcactgccatgactgtggtagaataaataaactggcgtattctatcctgagccatgattaacatacacctggttcttccagcctccaaccgcaattccagtccaaccacaacctgaagaaaccactcagaacaagaggggctgggggagctttacggtgtgggcctgtcttcctccttcccccactacactgtggaggggacagaaccagggttctcaggacccgctcctggacagctctaagggtgtcagggaagtgctgcacatgccctcactggccttagcccctcctggtcccacctgtgaacattccacacatgcattttgctaagtgcctgtcccatggccatgcctcctcccacatcttatggggtcctatgccactgaggtccttccctcagatgccagaagccccaagaatgatggtgtcccttggtccaggtgcagacatctggaggagagagtcggagagcagaaaccacttggctcccagacaattcccctacaggctttgggcctggaattgaggagaaagtgagctaagttggggtggggtgagtccaaagaagcacgggctgggccaagctaagctgctctgggctgggctgatccctccccactcaggggcgggaccccaggaggagggagaggacagagccactgcagaggaccagactgggaaaacaacgatatggcaggagccagtcttggggcccgcttctaccggcagatcaaaagacatccgggggtgagtcctcagaacctcagaacctctaactcctaactctcctgctgccccaccctccaaatcccccaatgccttgccttgtgcccaggtccctcagcgctcctattcttcccctaaggttgccccagtctctctccgaaacgtccctgtgtcccacaaatctactaccttggacacgatcgctgtagggtgagggagaccatgccaggaaatatggttgtaggagattccagggagggagcaccagacccggggtggggttggggtgggcagaaaagcttgtaaagggtgactgggaactgcggggagagggctgaccccaaaagtgctctccctcttccccgcagatcatcccgatgatcggcttaatctgcctgggcatgggcagcgctgcgctttacttgctgcgactcgcccttcgcagccccgacgtctggtaaaggcacggcttgggatgctcacgggggcctgggtgaggcaagatggggtggaaataggcggccctagtggggatcccgtgccctgctgcatgcaccttcgactgtaccgaccggcatctcagggctggagcccactgctgacctgggagacccccgtatcccctccagcccacctggccgctcactcctcagcttggcccgccctgaaatgcggaacccgcgcctctcccggcctggttgccatgacgacgccgctcagccagcggtgggcttgggcttttgggtacctctaagtcctcaccagagcactggggttgtggccgggtgagctgctgggggtggcattggggaccagtgtggggcggagatttcacacccggccgcggagagggtccggaagtgaaaggcgcacccatggctttataattcccggcacatcaccagaaacccagccccttgggatctgtgtctgattcccacgactctgctcttagggttaacctagggtggcaggcagcaagtgggagtccctgggccccgttgtcagtttgtcacgcagccccatgctgacaatggtgacaggcttcttgtctcacttgtcagcacctgctaatatgaccgttcctttgtcagtatctgggaaatgggacccccagggcaggaggcaggggtactggggtggggccagagcctccgggtggagcttgggggtcaaattgggttacagagttctgggtcccagggaggagaccctaaccctcccccctcctgctccacagctgggacagaaagaacaacccggagccctggaaccgcctgagccccaatgaccaatacaaggtacctctcgatggctctagggttgccccccatcctcttatctcctggtcctggcacccacaactcccgtactagaagcaaagggaggcttggggtactcagcgcaaccccctttccctctcctcttagttccttgcagtttccactgactataagaagctgaagaaggaccggccagacttctaagccaggctgggctgccagtgccatgcaagccacagccagccagcccatccacttcttccactcctccccgcaggccccaaggcatcactccggccaccctgtcccgctactgcttacacaggccgggttcccacgcagaggggaggctgctccacccctactctcctcccttgctcccagcagcggaagcgcctctgacccttggcttgagtcccacgtgggggaggaggaggcaggcagcaccagcaggggtccaccaagagcccagaccagcccctctgccctcctacccgggcctcgaagggtgtggcacaggctacgtgttgagcgtggcctacgtgagccaacaagaagcaggggcctctgagtgccaagcgaygtggcgggctccacgttagcccaggctctgagagccagcccaggggcggygctgctcagcttgggctggtccagggcctgcccaggctggggcacctttgcctcctgaggcgcagcgcactcctcccctgcccaagcctactgcctcccgctgccgcccagtaccccctccagccccacacctgggcctccccctgccactcccctcccttgctcccctctgtccccagggatcaaacagaagcagccgtgggcaaaatacaatttcatttaacaaattgaatttgctgcgcctgctaatcacgtctggtgtcggctctgatcagagacagaaagaggaggctgcagccccgggggtccttgtggtagcggtggtgggagcggagcggtgtacacattgagggagacaaatcactgtttggcccaggggaaccccacccacagtaatggaaactcagggcaggttagcattttattagataaaaacaggaaggagggtgcctacccacccctgcctgctactggctctgaagggcactcctcaacttccccaagaaagaggacgcgtctctgacactgtgatcatgacaggggttcaaacagaaagtgcctgggccctccttctaagtcttgttaccaaaaaaaggaaaaagaaaagatcttctcagttacaaattctgggaagggagactatacctggctcttgccctaagtgagaggtcttccctcccgcaccaaaaaatagaaaggctttctatttcactggcccaggtagggggaaggagagtaactttgagtctgtgggcctcatttcccaggtgccttcaatgctcatcaaaaccaggcatggggaaggccctggcaaactgctccacmcgttgcctgaggttggccagacgctgacttgtttctgagtccttaagcaggaaggatttgaaatcctggagcttggctagagagagagggtgaggaaacaagtggtcagagctctagggaaggcagtgagatcagctgggggagggagcagacagtgagtgggaactggctggcccggggctccttcttgctcactcaccagtcttgctcttcacctctaagccaatgttgaccccttcatctataaagtccacaactctccggaagtcatcctcacggaactgtcgagaagttaaggctggggcccctggaacgaggcacaaggggagggatgagcatagcccaaggtcacctggcagtcatccagcatgggagycccttccctcctcaaaccccaggtctcaccaagccgcaggccgcccggtgtgatggcacttcggtctccaggacaggtgttcttgttggcagtgatggatacaagctctagcacccgctcagcccgagctccatccaggcccttgggccgcaggtccaccagcaccaggtggttgtcagtaccacctaaggygggtaagaaatggggagtggtgagtcctgggcctctgcctgaagctacagaggccctcacccatcacctgctggcttacctgataccagtgagtagcctcgctctagcagggcatctgccatggcccgagcattcttcagaacctgcagggagtactcccggaacatgggggtgcaggcctggagatgagacagtagcagctgtcaccctaggcctggacccaagccctgcactaccctctggccctgcaccctcagcatagctctgtgaccccagccttgactccttccatcctggcatttcccttccatcagccccagcatcagttagcaaggtgcagggtctaagcctccaggccattgcccccccacaccctacaaagacaggatccccaacctgctttagggccacagctactgcagcaatggcatgattgtgggggcccccctgmagggatgggaacacggcaaagttgattcggtcctcaaatgtgtaagggatctcccggccagtcttggggtccacagccttcacccctttccggtagaagatgagccctgacctgtgtgagaggtggatggtcagagtctaagctgaaaagaaggacaagggacagagaaggcagaggaagctggcggacctgggccccaagggcacagctcacgtgggcttggtacactggattccagtggtagagggaatcagcccctcaatcccatccacaaatcccctgccagggcatggccaccatgggcaagagaaggagaactctcacagactgggcaggagtcttaagggctgcaggtgggaatgaattcctctcaggtccaggccaacagtgccccaggaataggcctgaaggcagggaaaggcaaggcccgacctcagggagcctgacctggcccctcgaagagtcttgtgagtagtggtggtgacgatgtccgcgtgcttgaaaggcgagggaatcaccttggcagccaccaggccactgatgtgggccatgtctgccagcaggtgtgctttgacttcatcacacacctgggcaggtacagaggcaaggcctcagcctggggagggcccggagaggcctgcccaaggctgccctcctcccacacctcctcaccaccccctggggaggtgcccagtctccagccccccccaccaacctctctcatgcgggcgtagtcaatgaggcgagcataggcgctggtgccagctatgatgagccgtggccggaaaagtcgagcagtcagtgccagctggttgtagtcaatgaggccagttttgggctggacagacacacaaacagctaaagccctgagaaggaagcagggcagctcactctcctccttaaccctaaggacggcccggcgctccaggccctcagcttctccaggggaggaccaccaccagggccaagagcccctccccacaccctagagcactcacgttgagcttatagggcatagactcgaagaagatggacgtggctgatatccgcttgacgtcagacatgtagccgtgggtgagactgcgaagtgagaggaagtaagaaggcctgggtggaaggacccccggacttaaccactcccttcaactccacagttctctgtccccagaacaccagtcctaggacacaccgcctcactgctctgtccactctgtggtaggcactataactgggatcttatcttcctcatccactgtgacatgcaggacagggcaaggcctgttccatctgtatggtccacagtaggtattcaataaataactcctttcccacaccaatcctgccgccaagaccatcagccagcccatccatactcactggcccccatcgggcaggtccagccccatgatccggtcgtgaggttgcagaagggctgtgtagacggccaggttggctggggacccggagtagggctggacattgactccccactgtgcaggatccaggtcaaaggcttccaaggcccggcgctggcacagcagctcaatttcatccaccacctctgctcccccatagtatctgccgtgggagaggggtaatgagggcacagagaaaggactctcaaccatcagcaaaggactgggaagttcactcctcaatgaacactgggaaggtacaggtgggttcccccactgggagcaccatccctgacactgccctccagccctcacctcttgccaggataaccctccgagtacttgttgttcagacaggaccccagggcctccagcgcagctcggctgcagaagttctggggtggtggggggcaatgtcagaaggtattgagccccttcccctggactcccacagtccctccctgccagagccagagctgaaagcgggagtactccctgcagaaagctccattcactcagcaccaggcctggggcaaagccagaggcagcattctcagaaacccatctgccatgagcagtggcccctcaatgccacctacccactcaaacttgtgcttctaggctcctccttcctcataggaggaaggaagggatcagatgaaactgtagggaccctggaggctccctaaatgtcccaaccccataaactggacttgcactgcctttgcttgagggagataagaaaggaagataaagcccaaagaaaggtcctgagtgtgaaagggggttttggagaaatatcagttaagataactttgttacttcctgtacccatggtggcccaacccctgcccatctccccaggtcccacctctgaggcaatgagctccaggccacgacactgcctgtccttctccctctgcagcaactcccacatctcaggatcactgtccgacaggctctcctggcctgtccagcccctgtttgcttccccagtctgagtctgggctgcgttgctgtgctgagcccgaatggccatcctgaccagctgcccacatctctgcagaggctgaaggcaggaaaagtcagggtgaaatcacaacagtccagacaaatcgtctcccggccaccctcactcatgcttctaaggccacaccaagctgccagttgtccagccagcctgtttcagttctcactacccccacctccaccttcaaaagccagttctggagccaagcttgagatcaacgtccaaggggtggttctgatttgctccattcaccgcaccgcacctcagaaatctcccaccacctcactccatgaaccactctgcaaagcttgtcctccaaaagcctatgtctccccaactccagagagggcaactgagattccagaaccttcccacccacaggaacaagagggtcttcctgcagggcaccataaactgataccccagtcagcgggggaagaggcagagttggcaagggctgaggccacagattgtagagcaatgcaggtgggaggggagacctttagcagtccgtgaggaagagctgtgtgggagtggtgggggtggggatctgcccgagagtaagccaataccctttccccttacttagccccctacccgttccacctccttccagccctcactgccgccgggacccctgcctgatgcaagcagtgaagctcggttgcatcatctgcagggctcagagctggccggaaaggctcagcttgtgagaccaggccgaaaactccgctcatttgccagcaccgggtccgcggggcatccggggctgtcctctcccctaatgccacgtgaaatgggcggtcacgaggccctggggcgtctgatcgccagaatgaggacaggctcgcagttaactccacgcgcgcccaggggtcttggggattccccagttacacgtccgctccctgrggccccaatccacgtgcatggaaaagccaagagaaccccagagtttgtgactaggaactaaggtaggagaagagcttcctttccactgattacccagcgtttggagccccattcttacccgagccgcccaaaacaaagagaagtacagcatcgcaactcggaagtcgcaggaggtccagccaccaactctggtctagggcagcaagctgtcggaagaagaccgttcggagaacgcatgcgcgagaagagctcgctgaggcgccaaagctaacgggagggatctacgcatgcgtagtggtggcccctttgtggccttttgggaattgtagttcgcccactcaccgcttttttctttatgattcccgtctgtagccccagggttagaggcccttgcctggggggaaaaaaacaaaaaacaaaaacagaggtccagtgccgccccctctccttactatcttgaagcttttcagggttttctctctgcttgttgtcaagacaaacgtttatagggtgcctactgaatatctagctagcattattagactccaggagatctagacccccacacaagataaagagctatggaacactggaaagcaccgtggtttagaagggtcggagacctgaattcaagttccggctctgggactagtgcattagcttgtgtgggcttcagtttcctccctggtaaagccacaagaaaatactgtgtggtgaggattcaatgaggcttttcctgtgaacatgcgctgtgacagattgtcctcccctcttcctctgacccacagacctgcctcctacatggcatctcctctttctcctcagacatctgggagcagaggaaggcacccctcctgttgttcacttgtcccattttgttacctgtccacttcttgatgtcccaggagtcggtgggctctccttttttccccagggctatagatctttgagactggaagggatcttccttttagcctgacttcatccggaagaaacccttgggaatgggattcatcaacccctccaggagtaggttcccaaacctcagcatcagaatgggttagaaaatatgatataaatatgagtgtggggtctgtcttcagaggttctaattcaatggatctcaaagagtagacatttgcccacttatgctgtcacacaactaaacctctcctcagtgattctgataagccaagtttttttttttaattaaaaaaaaatttttggctgggcatggtggctcatgcctgtaatcccagcactttgggaggccaaggcaggagaatctcttgaggccaggagttctaaaccagcctggtcaacatagtgagaccctatctatacaaaaggaaaaattttaaattacctaggcatggtggtatgtgcatgcagtcccagctactgggaaggttgaggcaggagggtcacttgagcccgggagttcaaggtgagccatgatcaag

SEQ ID NO: 96063 - DNA, 15574 bp, Homo sapiens
aggtagcagaatcgcttgaaccctggaggcggaggttgcagtgagctgagatcgcgccactgtactccagcctgggcgatagagcgagactccaaatgaaaaaaaaaaaaaaaaaaaagaaaagaaaatgaatcacaaagtggtctttaggggttattactattcttattttatggggaggtgaggcttccgggggaaagtggtaagtaactgaggcccacctctcaaaggcatttcctccaggtatttctatcctacatcagcctttacatctccaagtagacgtcccctcctctgggcatctttcctgggctacccagtttctatcctggcacttaacaagtctgtcccactactagaacggatgttaactgaatgactgtagcactttaattcttctccatcttaaaccttttatactttactgcatctactggctctaagatgtcatcagttctgaggccctttcattaatctgtgcaccattaagaaaggaaaatgctgtcaattaatgatgacatgcctccaattgttacactctgagaaatgctaaaatatgaaaactgtgccttcaacacaatgaattatatgatgaaagcaattactgcttttaaaaacatcggaagggaagaagattttataaatatctatataataataataacaaagttttctaaacacttactctgtgtcaggcattgttctacagtacttttcatccatgagctcctatcaggggttggcaaacttttcctgtaaagggacttgggtaaatatttgaggctttgtgagccatactgtctctgtcacaatatacgcctcccattgtagtgtgacagcagccacagataccatgtaaaggaacgggtgtggctgtgttccaataaaactttatttatggacactgaagtttgaattttatatgacattcacatgtcataaaatgagattcttcttttgatttttttcccccaaccatttaaaatataaaaaccagtcttagtttgtggtttgtacagaaggagggagcgagctaggtttggttcacaggctctagtgtgccaatcactgtcttatataaccttcctatcagccctacaagatcgatattattattcccgctttaaagatgagaaaactgagtctcacagaggtaaagtaacttgcccaaatacacacagctggtgagtaagcaagctgggattctaatccaggcagtctaactctgtaacttggttttaacagcaatgctgttacctacatatgattgccttctaatcttcttttattcttcgttacaaaagttacacatttaagtttaaaaagttcaaatcattcagagtcataaggaagaaaatgagaggaactccaccttccaaagataaacactgttaagggtttggacacacagctcacacaatgctgactacggttagaatgttctgaacactgtgtgactttggacagattgcctaacctctctgggctcttgcctctcaaatgaggaggttagacaggatgacacagctctgtgggccctgccaggtctgagcatggagatctgtttgtaaagattgtgcaatggcagctagctctgtcccaactgcctgggtgtagagggtgaagtcagccccttgccagtccctcaaggtaggcctgagtggctacagagtctcttcagcagcggcactagggcctgagttgggagtcttagaaggctccaggctccctgctgggctgacaccagggaccactccgtccagcgagaagaactccaggaagctgggaggcagaggcttcagccagtgctgccagacatggggctggcagacgcggaggcctcaacagacccaggcccagctccctctctcaagtcagacaggcgctgggtttggatctgtgtctgatgattaccagctttataaccttaggcatgtgacctttggtatgtctcctctctgagcctcttgccttgcctataaaatggggacaacaagcacctcacaggatcactgatagattcatggaatgatacctgtaatgcacctggcccagaggtgaggcctaatgagtgtcagtgaccaccctcctctcttctgacacttttcaacagtaccctttgaaacaattctaccgtttcccaaattgtgaacctactatgtgccaggcactgcatcaaaggtagtaggctggggagtgcaatgttgagaaaaacacaccccttgccctcaagctgaccaacttagaacctggggagagtacgacaaagatctaggtgacttgtacacaatcagaatatacggacaatgtcctccagacgcaggagagggagaagttggagaaaccagaggagtcttcacctggaaagactatgggggagcccagaggggccactgtctggcagggggagggggaggaatgtgagcaaagatgtgggagaggacaagaacattctaggaacacaggcccacagaattttcctggagcacaagagagaaagcaaagagagtgggaagctgagccatatagatggccgaggcccagtggcagtgagttttggatttgctaagaaatggggagttatagaaggctattgaggggaggaacccccatacagcacaggggagacaggaaaaacgccgtgggttttgaaagagggaacatgaatgtggggccctgctccctctcttgagagcaccctctttgggtgtcatccacatcaggttcttatacactgttttacttggtcctaaatggatgttattcccagtttacaaatggggaaacagaggctcagaaacggtaagctgcttgcccaaggtcaccaagcagacagtgagcgggggcctctttctgactgtcatcagcgggagctcaactcttttcttttcctgtgatcccaagagagatccaaagtcgcctttgagagcaggattaggacagggattgtgagctagggccaaccctggctacactgagtctccccagagtccctggaggtgaatgttattattcttctctccatcatgggaaggagggggtggagctcagcaccatgggggcacttactcaaggccacacattaaaggtagaaaatccaggccagctttttggggagtgtggaaccctgaacccttctttccgctactcctcactgtctccaggtttattcctaagcaggactaggtagaattgggaacagcccaggtcagaaaggcccaattctctcccctgagtcaacatccactgatttatctgcttcactccctctggcagccaggcccacaaggccagtccctcactccttctgtggttacagagaccagattatgctgggctctctttggctccatcctcagtcagaagcagcatctccactgcctggattgggggcctaggtggctacacgtttaccacttgtcgccgggcaggtgacccactggcccgagcactgtgtgttagtgggccttaaagaggagctctgcctgagttgggcccctgtccactgatgtatctcataagcagatggcttgcagtgaccttctccctggttctgaggcaagtctctgaaaggcacaggggcatgatgatatataaagaaccattctgctgggaaggggaaaccctagagatacagtgaatcataaagagcaggggtgaggtagggcctgagttccctaaaccccccatctctcacttgggcctcaaaccatctacaaagtgggccagtgtagacgcactgtacagacgtgggtttggaggctcagtaggggtcgagactcacctctgaccatccagcagcaaaatgacagggttcaagtctactctctgcactctttccagcaagggaggagagagaaaagcaggagaggccagcagacacctggctctagggccagactgcgccactactactatgataacggcattaaaaagttttcttttcttttttttttttttgagacagagtcttgctctgtcaccaggctggagtgcagtggtgtgatcttggctcactgcaacctctgcctcccgggttcagcctcagcctctcgagtaactgggattacaggcgcccaccaccacacccaactaatttttgtatttttagtagagacagggtttcaccatgttggccaggatggtctcgatctcctgacctcatgatccgcccccccacggcctcccgaagtgctgggattacaggtgtgagccacagcgcccagctcttaaaaagttttctttttgaaaaatttcggtaggggaaggtataataaatgctcttggtgagaaaaaaaatgggacaaatcaagtcggtatgcagtgaaaagtcagcagctgtaacattctatgattcaacgcaaaaactatgttgagttcctcagctgaataagtagtataaacaatttctttttcttctatctctccatacagggagggcgttgcccttatctgaggacctctttgctgtcctcgaccaatgttcaaatgaaggtagaagacgcccttttaaaaaaaaaagcactccatgccctgaacttttctagaagaatccaggcagaacatttgcgcaggcgaaaacacacaagctaagcgaggcaaatgcagaagttgccactggtgatacagctcgcacagcgacgacgcagggtggccagcgaaatcccctcccccaggaggggaggaaaccgcagaatgttcctgactcggcacccgggcgggtggcgcaatgtttatgtttgtgtacctagcgcgtcgcgtcgctgcagcaggctccgctgtccagggggccgtcactgggactcagggcacggagatcgctgggcggggcgggggtcttcccaagtgttgcgatccaggtcctggcaatccgcccacaatggcccgggattggattttgctttcggcctataacggccgcgacgacagggagcgagggttgtggccggcttctgttccgggttggaggcccccagcccagcgcttagtgggcgctcactgtgtatactgcctatttgtataataaagaaagggatggagaagctcagtctggagccaaggtgacagaaacgtgtcgggcggcccctggggggcgccgtcgagtcgcgctgcgggtcgcccctcacccctccaaacgccaaaccctggaatccactgcggggccttgcgacccctcaccgggatttcagccccctgacctgcctcccttggctccaagtcttccgggggccacaagactaggaatagcattatttcccggtgggagtttgcttgctcacactttcatggcaaatgtagatattttaaagccaccttaaagaaaagtctgggaaacaggaaagcattgccctgaacctctccgccccaactcgctcgagtcggtcttggtagggacgacttttctatcggcagagttgttcatttttctctaaacttcatcttaggcgcctatttgctgcccccaccccagtagtgtggttctgggcaagtcagtcgcttcgcctggggaacctcagtttccccgcctgttagtgatgaggaaatgaggaaaaggggcacaagagtatgcaaaagcacaggaagcccctttcggttcaggtcggcggccgaggggcacggggaaggggactcggggagggagagagggaggagcggcgaggccaaggcaggtggcacgtcgcccgttctcccggccgctcgcatcccggaggtcagcctcagctggcagcgagccctcctcctccccgctgggcctggagcgcggcgcgggtccggtccctggggacgcgccaagagcaggccggacagcagggcgggggccgggccgcgagccagcgcgcggcgagcggacccagctccgaggctgatgacgtctccccctctggctcggcggcgcctggcctggcagggcgggtgacgtcaccgccccgtcacgtgatcaccattcaacaaacaccccccctccccctgcgcgcgggtctggcccgccccgtcccccagaggccgcatataaacgcgctccccgggccaggctcgctgcgaaggacatttgggctgtgtgtgcgacgcgggtcggaggggcagtcgggggaaccgcgaagaagccgaggagcccggagccccgcgtgacgctcctctctcagtccaaaagcggcttttggttcggcgcagagagacccgggggtctagcttttcctcgaaaagcgccgccctgcccttggccccgagaacagacaaagagcaccgcagggccgatcacgctgggggcgctgaggccggccatggtcatggaagtgggcaccctggacgctggaggcctgcgggcgctgctgggggagcgagcggcgcaatgcctgctgctggactgccgctccttcttcgctttcaacgccggccacatcgccggctctgtcaacgtgcgcttcagcaccatcgtgcggcgccgggccaagggcgccatgggcctggagcacatcgtgcccaacgccgagctccgcggccgcctgctggccggcgcctaccacgccgtggtgttgctggacgagcgcagcgccgccctggacggcgccaagcgcgacggcaccctggccctggcggccggcgcgctctgccgcgaggcgcgcgccgcgcaagtcttcttcctcaaaggtacgccctcggggaagctcggggcgggccgcacacccctgaggttttgcccggtacccctggctctcggctcccgggggatcgccccacctgcagcgcgtgggcgctggagtacatttatctctggaacttgtcattggctttgtttggctctggaaacaaagacttgcctgggcctttccgatgtaaacttccagcccttggtgggtgggggagttgtatgaaggtgccgtgtcccggtgtcactaatggggaaaaaaaatgtctttgtattcccaggaggatacgaagcgttttcggcttcctgcccggagctgtgcagcaaacagtcgacccccatggggctcagccttcccctgagtactagcgtccctgacagcgcggaatctgggtgcagttcctgcagtaccccactctacgatcaggttagtaggtgtccctgccacagggaagaagtaagaactggcaaaggcatggaagagtagtgccagggagaatatagaaagtgacctgcagcattatttataacggaggggacacagggatatgrtttattccacagttaagtggtctgacggagccgagtctccarttgtaggctctacggaaatgaacttgctggtcctgcccaggcaaatgggcttagttccctatttatttatcctccagcaacagaactgagttcactcggtatctgaaattgacttttccagcagaaagtttttgtgggtatggscactggccttggctttgagcaagcttgatgaatgttggatatttctggatttcagggtggcccggtggaaatcctgccctttctgtacctgggcagtgcgyatcacgcttcccgcaaggacatgctggatgccttgggcatmactgccttgatcaacgtctcagccaattgtcccaaccattttgagggtcactaccagtacaagagcatccctgtggaggacaaccacaaggcagacatcagctcctggttcaacgaggccattgacttcataggtaaatggaatggatgcctggggcttttctgcctttctcttctcattttagccactaagcccaacctctgtggcaagagcttgaagttttctgagccttcttccacacattcagtatcagtctggtgtgggcaacattcctgtaaaatatgaatttgattcgatgtcccactttacagatttgcaaagtggggctcacaaagttgaattgactggtctgagatctatctgctaagtggaaatccccagtctgagtttaaatcctgtgccatcctttgcacagtgcccacgttgcctccatgaacagtatccatgtgatggcatgtggtgatgttgaccatttctagacargacacacatgacctttctcagatacactgtacctgggcttggggtggttctcctgaactctcaagtaaccagccgctcctttggttttccagactccatcaagaatgctggaggaagggtgtttgtccactgccaggcaggcatttcccggtcagccaccatctgccttgcttaccttatgaggactaatcgagtcaagctggacgaggcctttgagtttgtgaagcagaggcgaagcatcatctctcccaacttcagcttcatgggccagctgctgcagtttgagtcccaggtgctggctccgcactgttcggcagaggctgggagccccgccatggctgtgctcgaccgaggcacctccaccaccaccgtgttcaacttccccgtctccatccctgtccactccacgaacagtgcgctgagctaccttcagagccccattacgacctctcccagctgctgaaaggccacgggaggtgaggctcttcacatcccattgggactccatgctccttgagaggagaaatgcaataactctgggaggggctcgagagggctggtccttatttatttaacttcacccgagttcctctgggtttctaagcagttatggtgatgacttagcgtcaagacatttgctgaactcagcacattcgggaccaatatatagtgggtacatcaagtccatctgacaaaatggggcagaagagaaaggactcagtgtgtgatccggtttctttttgctcgcccctgttttttgtagaatctcttcatgcttgacatacctaccagtattattcccgacgacacatatacatatgagaatataccttatttatttttgtgtaggtgtctgccttcacaaatgtcattgtctactcctagaagaaccaaatacctcaatttttktttttgagtactgtactatcctgtaaatatatcttaagcaggtttgttttcagcmctgatggaaaataccagtgttgggtttttttttagttgccaacagttgtatgtttgctgattatttatgacctgaaataatatatttcttcttctaagaagacattttgttacataaggatgacttttttatacaatggaataaattatggcatttctattgaaatttcaaygcttttatttctttggcaaccacacccaatccctctcccactagtgaactagggaagaatttcgacaagggcctgcagaatgtgttgagatctgatcccatgccctgtggtggcccgttggtcccatgaaatggctgggttgcaagggaggaagacaagtgagtatcatgaaacaccggacgctacagctgaactcttagtattggatcagtgtgtctrcccatgcccattttagcggctctgtaacctaccatgtcacccaggatgccaaggtgtccccagagccaaagctaggaggaaatagccacttgtctggattgccttcttcatttaataccctcctcaggttaatataaaaagtcgccttcccatctctgagctgtgctggagttatgaggagacaaaagtttttccaaacacatgacataaggcaggtgtgtgctacctgcccctagagaaactcagcaaggccttttgcaaatgagatgctgagacccagcatggctaagtggcagaaataggagaattggaatctacatctgtttcagactttcacttgcccgtctcatggcttttttttttttttttttttagacggagtctcactctgtcacccaggctggagtgtactggtgtgagctcggctcactgcaacctccgcctgccaggttcaagccattctcctgcctcagcttcctaagtagctgggattacgggtgcgcrtcaccatgcccggctaatttttgtatttttagtagagatgggggtttcaccatgttggccaggctggtctcgaactcctgacctatctttttgcttttaaaaaggcttttgtttttgtgaaaatttaaatacattggcaaaaaagaaaaaaaaagaaaaaaaatccaagcactataagcaaataccatgtaaagaaatcacccgcaacagcccatccccaacctgaccattgctaacattgtggaggacattcacgctggcatttctgcatatagacatggcatttttggtagttgcctccttcatgtcacctgctgctctgatttcatagttttgttgagataagcaattaaacctgacttgttctaggataatattctgaatttgtactcctttgccaagcaggcaaaaaacagaagagatgtaattgctaccaatccataatccagtctataatgttgcgttaagaaacagcgaagctcttggattactggccccttagcgccccaccccactctttgtttctggacaaagtgctatgggaagcagaaaaggaaatatcccattcgccttatccatgagcaccctgtgctatggttctggtcctgtcctgttgttcaaggtctttacgcagaatcagtgtccttgactttgcccctgtggctcactgtctgccacttgactcccagggtctgaaagatccctgtgttctaagttctaagaacttaccctgggctggcaagctcatttcctcagctgggtttccgattacaagtatgttcatgcctatcaaaacaaatcgtacccagtgtttttatcaaagcctagaaatttactattgtaaatatctctctccgtggaaatgtaccagcgacatcgagtctgtgacagatgccatggctgacttccccgtgggctagggccttcgctttctgcttggcaggcactggctgaaccaaaattaatctccagtgtgatccacgcagtggaaaaatacagcggctgcctaagggagcygccagtgaaaacaagtcactcacttctcccggctcaagccactctgcctcatgccagccctgagagccaggaatgatgacccctgatccccatgtaccggagtcactgtgttcagaccctccagaaaaatctcatatttggcctcagactgctttccttgggaaaaaattaatacctcgtgatgaaagatacttaaagtctattaatgtgtttcccaggaagagattgaaataagacttttaatactgataatgtggcaatgatggttgccagttttagagtgagcactgtgtgccaggtactgctaaggttaagtaacctttgacagcaatacccattttacagaggacaaaactgaggctcacttgtgagaaagacatgggctgatgaatgtaaagtgcctggcacacagtgggccgtggagaaatgtttccatccccttgtctctgtcctaatggcttctggcagttcttctggctcggttttcccaccccgtaaaatgaccaatttgcactggatctgagtactgttcttcccatctctctaattctgggatgtagaaaatgcatcaatgcatacattatgcttttctgtggtttccaggcacccattatttcattataatacctctaacactccccctcccccacctccaccgcatcctctccttggaattttgcaaatcgtagctaatttgctttggacttgcagcctctggcgtccctttccctccctcccctggcccgtcagaggatgacatcattgtgtgtacacctttaagattatataaatctgtgatcctacagtggcctccatccccatggtaacgcggaggagtttcccttttgtgaggaaagctgtcatgtcacttcctgctgctgacaaatcagtttaggagattaaaataaaggggggcggggtgcctctgagaagtgctggctgccgtggtttctggttgccatacacagaggcaaacaatgccgctgcggcccctccccgcgcccgccgggtggatccaggtcaacccgggctgtttttctctgcaggttgctttctggagagcaggtgggagggctgctcacctcgtttccagagctctgcggggtgagcctgtttgagaacagcctgtaggtgcagaccagcagccctgctcccctctgcccaccgaggaggtgtcttccaccccgtggagaacaaagggtgtgctctctgctagcgccacagtggacaaaactgctctgccaaggaagataagctcatagccaccttttccttgaatgtggcttttaaagctaggcaggaggcccacgcattcattcactcattcgttcattcattcattcattcatgtgttcaacaaatattgataagtatagtctcaggggatactttggtgcaagacaaaattcctacttataagtagctaaaattacttttgctattttcgctaaacagcaaaagtaattttactttgtcacttgccgtctcatggcactatatatgggtgggttatagaaataagataatcacaaaataagataaggatgaaggctatgaaggcaggataaactaagacctgaatgatataacccagttgcccatttgagaggtgaactggaaagagggctccaaggccaggagagcagcaaagacctgatgtttgagaggtatgtttgtggaccagtggatacagcgtgtgaattggagttggctagacctgcgttcaagtcctgactctgccacctgttagtggtgtgtaagctatcaaactctttttttttttttttttttgagatggacgcttgctctgccgctaggctggagtgcagtggcgcaatctcagctcactgcaacctccgactccctggttcaagcgattctcctgactcagcctcctgagtagctgggattacaggcacgcaccaccacgcccagctaatttttgtatttttagtagagacagggtttcaccaggttggccaggatggtctcgatctcctgaccttgtgatccacccgcctgggcctcctaaagtactaggattacaggcatgagccacggcgcccggcctgctatcaaactctttaacctctgttttcccaatctgtaatacggcccagtaatattctcttgtgactcagctgctccctattctgtccctcaagcatgagcgcccctccggagtggctctggagcgctccggaggggcgctcgtgcttgagcgcccacaaaagtgggctgcctcaccaaagtgacaccctgggcgcgcatcagacaacgctttactctaggccatcagagctttggagcagtggcctctgttctaagcccatctagccctgctccactaacctggggcaagctgcttcccctttcggggcctcgtaccctcatgtgtaagaagaacctgcggtgaacctcatctattctcctctcccacccatctgccagtgctaagtcccttccatacccaaacttgggagggtcctggaatccccagggttcctgaaggctggttcagggagacaaagtgggaaggaaatagacactttctgggaagaggcagtgagggatcctggaccttcagaaggtcggttggtgttatggagatgtgactggttcttgcagggatgggttcccctacaagggcctgtgggggcactgcatacttctgacccctgggccctccttccctcccagcctgcacagccctctgcagtggagcacactgcaaagatgggatttaaaagtttcaccaagattgacaccaatcattcactcatccaataaacatattttaagtacccatggtttgtaaaacactcagtagatgtgaaaatcataccaccaaaggaaattttgagattctgttccaaatacctgggacaaaactgataggtccaactagttagtgtctgtatgactttgagtggattatttctcctctcaaaccctcagttttgacatctctaaaaagggagttggaccctcgtgtggggtggggcggaggagtggcgagcacccccsccccgctctgctggcctctgcgcgcaaagcagcctctccttccgccggggccgccgggcctcatggaagccccggagggcggcggaggggggcctgcagcgcggggccccgaggggcaaccggcgcccgaagccagggtgcacttccgagtggcgaggttcatcatggaggcaggtgtcaagctagggatgaggtccattcccattgccactgcttgcaccatttaccataagttcttttgcaataccaacctggacgcttatgacccttacctgattgccgtgtcttccatttacttggccggcaaagcggaaaagcagcacctgcggactcatgacatcatcaatgtgtccaacaggtactttaacccgagcggtgagcccctggaattggaatcccgcttctgggagctccgggacagcattgtgcagtgtgagcttctcatgctgagagttctgcgcttccaggtctccttccagcttccacacaagtacctgctccactacctggtttccctcaaaaactctctgaaccgccacagctggcagcggaccccggttgccgtcactgcctgggccctgttgcgggacagctaccacgggggtctgtgcctccgtttccaggcccagcacatcgcggtggcggtgctctacctggccctgcaggtctacggagttgaggtgcccgccgaggttaaggctgagaagccgtggtggcaggtgtttggtgaagaccttaccaagccaatcattgataatattgtgtctgatctcattcagatttataccatggacacagagatcccctaaggtcctggcccaggcctgtccaaagagaagcccaggatggtcggctgcctggggacattgccaccacgtcgccatgacggctggtcctcagaggaccagctgggaggactggttgtgctgctggagaagggctggagaaggcgatggcatgctgccgctttgacagtccctagcagtcgcggtgcaggtgatgggagccgcgcctccagcggccaggtcgggagtgcactgcgtgcagctgatccaaggcagccatatctgcttttgtcctttgagaggactctgactacaatagaggcctgacatcaatgaaaggaaaatcatgaaatcgatgagactgaatccctagggattttttaaaagccagatctatagcgagaatgaatgtgcaacatggctgaaatctattttgtgtaataaaaggtgatgcaagtcaaaaaaataaaataaaataaaataaataaaaagggagttaaagtatttacttcatggccaggtgcggtggctcacacctgttaatcccagtacttggggaggctgaggcaggcagatcacctgagttcaggagatcgagaccagcccgaccaacatggtgaaaccctgtctccaccaaaaatacaaaattagccaggcatggtggcgcatgcctgtaatcccagctacttgggaggctgaggcaggagaatcacttaaacctgggaggcggaggttgcagtgagccgagattgcgccattacactccagcctcggcaacaagagtgaaactccatctccagaaaaaaaaaaaaaaaaaagtatttgcttcacttcacatggtagctgtcaagatgaaatgaaatagtatatataaaat

SEQ ID NO: 96064 - DNA, 63506 bp, Homo sapiens
  misc_feature (1)...(63506): n = A,T,C or G
atggtgcaattatagctcactgtaaccttgaacttgtgggttcaagcaatcctccctcttcagcctcctaagtagctaggactacaggagataacaccacatcaaaattgtttcttgtagagatggaggtctcactatgttgccgaggctgctctggaactcctggcctcaagtgatcctcctgctttagcctcccaaagcactgggattataggcgcgagtcactgcatctggccaacatatttattttaaattcatacaaaaagagcaacaagaaacccataacatgttaacataacatttatatgagaaatagctgttttttccaaaactaacaaaacatgtggttggaagagtaacattgtgttacattttgggagaacgccttgacctctggtttaatagaagacaaatgcattctcataatactactgcattcaatctgatgtgatatgttgttttagatgaactacaggaagaaaattcagccttacagagattcacagttagaaaagacctgctggggtggccaggcatggtggctcatgcctgtaatcccagcactttgggaagccaaggtgggtggatcacgaggttaggagtttgagaccagcctggccaagatggtaaaaccccacctccactacaaatacaaaaattagctgggagcagtggcagtcgcctgtaatcccagttacatgggaggctgaggcaggagaattgcttgaacccaggaaatggaggttgcaatgagccgagatcacgccactgcactctagcctgggtgacagagtaagactccatctgaaagaaagaaagaaagaaagaaagaaagaaagaaagaaagaaagaaagaaagaaagaaagaaagaaagaaaggaaagaaaggaaagaaaggaaagaaaagaaagaaaagaaagaaaagaaagaaaagaaagaaaagaaagaaaagaaagaaaagaaagaaagaaagaaaaagacctgcttggggagtctcagggactccccaagggtccttggaccacactgtccagagtctgatttgtttcctgaagactttagcaccttgagggcagacagtatctcttcatttgatgggtcactgaatggggacagttttcatttggtgtgtgataaaatgcttttgacagactggctgatagagggagctataggctaatgctagcccacatatataatactgagatactaacttttctcctttcacagatgaaaccaacagatttagacagaattggtgtctaaagagttacatccagccgggcgcggtggctcacgcctgtaatcccagcactttgggaggccgaggcgggcggatcacaaggtcaggaaatcgagaccatcctggctaacacggtgaaaccccgtctctactaaaaatacaaaaaattagccgggcgtggtggtggctgcctgtagtcccagctactcgggaggctgaggcaggagaatggcatgaacccgggaggcagaggttgcagtgagccgagatcacgccactgcactccagcctgggagacagagcgagactccatctcaaaaaacaacaacaacaacaacagagttacatccctggccgggtgcggtggctgacccctgtaatcccagcactttgggaagccgaggcaggtggatcacctgaggtcaggagttcgagaccagcctggccaacatggcaaaaccccatctctactaaaaaataaaaataaaaataaaaattagctgggcatgtagcacgtgcctgtaatcccagctactcagaaggctgaggcagaagaatcacttgaactcaggaggcggaggttgcagtgagctgggatcgtgccattgcactccagcttgggcaacaagagcaaaactctgtctcaaaaaaaaaggaaaaaaaaaaaaaagagttacatccttgtacttccagacattgcttctcaaagaggctgcccagaagataaagcaaaggttagacacaaaaagggatcaatttaagacaaaaatttccacttgtttaagaaatgggaaagaattcacaatagccaaaaagtgcaagcaacccaaatgtccatcgatggatgaatggataaacaaaacgtactgtatacacacatggaatattattcagcctttaaaaggaaggggacattctgacacttgcacaacatggatgagtcttgaggatattatgttaagtgaataagccagccacaaaaggacaaatgccgtatgattcctcttgaaggaatctagagtagtcaaactcacagagacagaaagtagaatggtgcttgccatgggctagggggtggaatatgggaggtggttgtttttttgtttgtttgttttttgagacagagtcttgctttatcaccaggctggagtgcagtggcgtgatcacagcttactgcagcctttacctcctgggctcaagcaatcctcccacctcaccctccgcagcagctggaactacaggcatgcaccatcatgcccagctaattttttgtttaaattttttgtagagatgggggtctcactactgcacctggccagaagtggttgttgaagggatatgaaaaagttctgggctgggtgcagtggctcacgcctgtaatcccagcactttgggatgccaaggcgggcaaatctcctgaggtcaggagtttgagaccagcctgggcaacatggtaaaaccccgtctccaactaaaaatacaaaaattagctgggtgtggtggtgcatgcttgtagtcccagctacttgggaggctgaggcaggagaatcgtttgaacccaggaggcgaaggttgcagtgagccaagaccacaccaacctggatgacagcgagaccctgtctctaaataaattaataaaaataaattaaaaggttaagatagtaacttttatgttacctgtattttaccatttttaaaaggaaagggcctgactgcggcagctcatacctgtaatcctagcattttgggaggccaaggcaggaggattccttgaggccggagttcgagaccagcctgggcaacatggtgaaaccccatctctacacacacatacacacacacacacacacacacatacacaagcacacacacgcacacacacaattaggccagcatagtggcatgcgcctgtagtcctagctactatggaggccgaggtgggaagatcccttgagcccaggagttcaaggcagtagtaagctatgattgtaccaccatatgccagcctgggtgacagagcacgactctgcctcaaaaaaaagaaagaaaggggctgggcatggtggctcactcctattatcccagcactttgggaggccgaggtgggcggatcacttgaggtcaggagtttgagaccagcctggccaacatggtgaaaccccatctctcctaaaaatacaaaaaaaaaaaaatagcctggtgtggtggagggcgctggtaaatcccagctactcaggaggctgcagcaggagaatcgcttgaaccagggaggtggaggttgcagcgagccattgtcatgctactgcactccagcctgggcaacagagtgagattccatcaaaaaaagaaaaaagaaagaaagaaagagagaggaaggaaggaaggaaggaaggaaggaaggaaggaaggaaggaaggagaaagtagaaatgaacttctttctctaattttgttctgacctcatcccttcttagctactcaattcagttgcacagttatttattgagcacattctatgtataaagtcctcccggaaacaaagatcagtgaaacagtgcctattctcaaggagttggccctctagtagagggttggtcaagatacatatacaacaaggccaaagagatgcgctaacaggatgaaatgggtcttggagaaggcggtgtttgggctagaacttaaggaccataggatttctgctggggctaagttttggggaagcattatgagcacaaaggagacaaactagttttctacattgctgatcaggttaaaggcttagaatcatgtccgaaaagttggtacagatgttgaagattattggtccagtttcccgtttaatacaggaatccattctacttgatgaaagaaatcaggagttaatgcaatgtggctactgcaaggaaaccatggtccctggtaaagcacattgcatttaaagacctgctttctatcttgctttcacctgtaagctttatcatcaagctcctcaacctctctgagaactggcttccttgtctattccaagcttggcgcatactataactaacatatgtgaaaattctcagcaagcgttctaagccctgtttatcagctcagcacggtggcttatgccagtaatcccggcactttgggaggctgaggtggaggatcccttcaggccaggagtttaagacccaccggggcaacatagcgaggctctgtctctacaaaacattttaaaaattagctggtgtggtggtgcacacctgtagtcccagctcctcaggaggctgaggcagaaggatggcttgagcccgggagttccaggcagcagtgagctatggagcaccactgcactccagcctgggtgacagagcaaggccctgtctcaaaaaacaaacaaacaaacaaaactgttttacctttctttttctttctttctttttttttttttttttgaggcagagtttcactctgtcgccaaggctggagtgcagtggtgcgatctcagctcattataacctctgcctcccagggattcaagcggttcttgttcctcagcctcctgagtggctgggactacaggtgcatacctggccaatttttgtatttttagtagagatgggatttcaccatgttgcccaggctagtcttgaactactgacctcaggtgatctgcccgcctcggcctcccaaagtgctgggattacaggtgtgagccaccatgcctggcctgtttttcttcttaccattctggctaatttctacttgtctttcaaggctcagcaaggacgagttgggtagaaagccttgcagggtcgtccacttactttcacactgcattgagtcgcctgtttgcaaggtcatctgctccccagaatgtgaactccctcaggggtgcctgattgacttctgtaactccagagcctggcacagcacacaagataaatagtggtgcgctagttaagagctctggccttgaaaatcagataatcaggggttgaatcctggccctgccacttactatgtgactttgggcaagatccttatcctcttccctgggcctcagtttcttcaactgcaaagtggggataataattacaattacctcataggctgaagtgaggagttcaacacgggctcatgcacttttttttttttcttttgagacagagtgttgttctgttgcccaggctggagtgcagtggcgcaatctcggctcactgcaacctccacctcccgagttcaattgattctcctgcctcagcctcctgagtagctgggaccacaggcgcgcaccaccacacccagctaatttttgtatttttagtagagacagggttacaccatgttggccaggctggtctcgaactcctgacctcaagtgatccgcctgcctcagcctgccaaagtgctgggattacaggcgtgagccaccgcacccggcctggggctcatgaacttaaagatcatggcccagtgccaggcacacgggaattcagaatagtaagggacaactattgttaagttctctatgtctgttgcataagtagatgaggctgtagataactacactctttgtctaaaagggccaagttctcatcagaacactttgctgagccccgggtgaccgaatccctagctctggggtgagcgacatrcctccaaggagctgcagccaggagacagccaggcgaaggcggggctctgcctctgggctccccgaggggcggaggccggcgcgcgggtcacgtgggggcgcgggaggcggggcttgcacacgctggtcasgckgtcagctattgacacttcctggtgggatccgagtgaggcgacggggtagrggttggcgctcaggcggcgaccatggcgtatcacggcctcactgtrcctctcattgtgatgagcgtgttctggggcttcgtcggcttcttggtgccttggttcatccctaagggtcctaaccgggggtaagtgcgtgaggcccgccttgggaggaacgggcggtgaggagctagcaggccggggcggggaaaggcacgacccccacacgggtcagagaacgttgcatgggcgccccccgcgctgcagagtcaggcccccgacccggcggaactccttgtgttccttttcgcagcagcttcagtgtcctccggcctgagcgagtggagggtgacctttggtggaccccccttggaaacgagtttcaggggaattttttctcatcatagtcctgtgtggggaggtgcagtcggaaatgagcaggccgaatctgggagaaactggggtttgtccctagtcgactgtccccctttagccctgccttccacccacatgaggcctcgtttgcctgaacttaaggatcaaataaataaaacagaaattggcttctctgcctcccatgctgtcgcggttgcgtacagaacaagctccttcgacaacattgagcccaggccttgcatctagtgggcgccaggaggcggttggggcctgatctaaagcgagattaattaccaaagagcaggaggtattgttgagaaacccctgcgtcatgccttttggagggcgctccggctcttgtatgtgagtgtaagaagtgcttagaatgattggctaagaaagattttgtttttccagacttctttgttggttagagctttgtctcttttggaattaaactttttaactgtagtataaaatagaggcttaatcttcaaaggagccttggaacaccctcttcctggttcctcttttgcttctcagtcatttttttctcagttcaagatgatgagaggtgaaacttcgactgaagtcagtttgtcagaaacaccatctcttgctttattcttgaacctaattggtggcttcatagtgcctggttttcatagtaccttgtatgcacaggaggcacccaataaatacctgttgagtgaatagttctattgtctttattaaaagaaaaagatttttggccaggtgccgtggctcacgcctgtaatcccagcactttgggaggccaaggcgggcggatcacgaggtcaggagatcgagaccatcctggctaacacggtgaaacccgtctctactaaaaayacaaaaaattagccgggcgtggtggcgggcgcctgtaatcccagctactcgggaggctgaggcaggagaatggcgtgaacccaggaggcagagcttgcagtgagccgagatcgcgccactgcactccagcctgggcgacagagcgagactccgtctcaaaaaaaaaaaaaaaaaagaaagaaaaagatttttactacttccctaatattttgtgacctgaaccccttttgctccctgggatacatttgctttattagtctaaaattatttttttttaaaagatacatggtagatgaatttttatcatttttaagtatcaagttcctcctccctggtaacaccagttatatggggtcatctctcctacctatagaggttgatggacagagtcagaattctggcattattaaagcaattgtatttaccaaagttaattagacttgtttttcctactggagttagcgaacaacaaagtgcttctttgttgtgtttatatcttcaactgtttcattaccctactgtctgcctttatggcctttgtactcaaagaagcatttattaatgtactaatagcactgacaattcctttcttaaagaccattctctccccttccttgggatgtcattgccattatccagggtaatgaaacccatcctgtttccacttagccctagagagtgtcatgattcaggtatttgaccagctagtgatatatagacatgtgtcacttaacaaaaggactatgtttgagaaatgtgttagttgggcttttgtgtgaacaaagagtttacttaaacagatggtacagcctactacacacctaggctatttggtagaacctgttgcctctaggtaggctacacacctgtacagcatgttactgtccttaaatactgtatagacaaatgtaacacaatggtatttgtgtatctaaacatagaaaaggtacagtaaaaatacatatcaaagatttaaaatggtccacctgtgtagggcacttaccatgaatggagcttgcaggactggaaattgctgtgagtgagtcagtgactggtgagtgaatgtgaagaaccaggacattgctgtataccatggtggactttagaaacactgtatacttaggctacatgaaatttctgaaaaaatatttttctttcttcaaaaataaattaaccttagcttcctgtaacttttttacttaaacttttgaattatttttaactttttgactcttgtactaacacttggcttaaaacacaagcaaggctgggcacggtggctcacacccataatatgcagcactttgggaagccggacaagaggattgcttgagaccagcctgggcaacacagcgagaccttatctctgaaaaaaattttttttaattagttgggtatggtggtgcacacctgtggtcctagctactggggaggctgagtgagggggatgggagtgtttgagaccaggagttccaggatgcagtaagctatgatcacaccactgtactccagcctgggcaacagtgagaccctgtctcttcaaaaatgaaacaagtccagtgtcagagtctggggaagaggctgcaggcaccatgtccattttcacagatggcaggaagaagcccctgaaacagcccaagaagcaggccaaggagatggatggggaagataaggttggttttttgttgtttttgtttgtttgtttgtttgtttgtttttgagacagagtctcactctgtcgccaggctggagtgcagtggcgtgatactggctcactgcaccctccgcctcctgggttcaagcaattctcctgcctcagcctcccgagtagctggggttacaggcgcgcaccaccatgcccagctaatttttgtatttttagtagagacgggatttcaccatgttggccaggatggtctcgatctcttgacctcatgatccgcccatctcagcctcccaaagtgctagaattacaggcatgagccaccacgcccggctggaagatacattttttaaacaaaaagaggagcagaagaaactggaggagctgaaagtgaaggccatggggaaggggcccctggtcataggtggaattaagaaatccggcaaaaaataagctgttccatgtgcctgaggtgatcgatggtgacccttgattccatttgtatttaaacatctggattccctgctataactttttttttttttttctttgagatggactctcactcttttgtccaggctggagtgcagtggtgccatcttggctcactgcaacctccacctgctggattcaagcaattctcctgcctcagccccctgagtagttgggattacaggtgcccaccaccatgcctggctaatttttgtattttcagtagagaaggggtttcaccatgttggacaggctggtcttgaactcctgacctcaggtgatccgtcygcctcggcctcccaaagtgctgagattacaggtgtgagctgccacacccggccccctgctataacatcttttgccacctatacttagaatgaagtgttgtcttggagcctgttgtacattgtacatgtaagagtaaacttttgaaaacaaatcaaaacacacacagacacattgtacagctatataattttttttttttaagagtcagagagtctcactgtcacccaggctggagtgcagtggctccatcatagctcactgcagccttgaactccaaggctcaagggatccgtccacctcagcctctgcactagctaggacataggcgtgcaccactacacccagctaattcgttgttgttgttttgagacagggtctctctttgttgcccaggctggtctccaactcttgacctcaagcagtcctcccaccttggcctcccaaagtgctagaattacaggcataagccacctcggacctaatctattttctttctttatatcctatcctataagtttttttccatttaaattttttttaactttttaaacttttttttgttaaaaactaaaacacaaacatattattctaggcccacacaggttcaggatcatcaagatgtcattaggtgataggaatgtttcagctccattataatcttaggggaccacctgtcatttatgcattcattcattgactgaaaggtcattatgtggcaattgtcaagtgcctgtattatctgggtccagttcacagcctctgctgcagtccttgcttttcctgctcttggttggattgagcagtgtctctcctaggaagagttgctataatacattttgagaaacactgcacctaggcagatgatccctgtgaccttgacgatttagttaacttttccatgttcccatttcctcattttaaaatggaaataggcttttctgtagggatttttttaaaaaggaaatactagtgcacaatttaattaacttttccatgttcccatttcctctttttaaaatggaaataggcttttctgtggggattttaaaaaaaggaaacattaaagccgaattagtactagttcccctttacctcttgaaaatactgcaaatcaaatttttcaggatacgtgaaggagctgaagtgcttcacactatggtgagttggggtttttttttgagacagtcttcctctgttgcccagtctggagtgtggtggcacaatctcggctcactgaaacctccacctcccaggttcaagcgcttctcgtgcctcaacctcccgagtatctcggactacaggcgcacgtcaccatgcttgactaatttttgtatttttagtagaggcagggtttcaccatgttggccaggctgttaccagacttttggcctcaagtgatcctctcgcctcggcctcccaatgtgttgggataacaggctcgagcagtgcccctagcttgtggtgaatttttaatacaggtgagcatttctgatttaaatgatcaaaaatatcttcaaaaaaataaaaatgggcctgacatggtggctcacaccggcactttgggaggctgaggtgggaggatcacttgaagccagaaaatagagaccaagcctgggcaataaagcaagacctggtctctacaaaaacaattttttaaaaattacctaggcatggtggtgtagacctgtggtcctagcttctcaggaggctgggtgggtggattgtttgagcccaggatgttgaggctgcagtgagctatgatcatgccactgcattctagcctaggcaacagagtgagaccccatcccttaaaaaaaaaattctcttttgccctttcttttccctgcctcattaggtcctataacctcctaattacccaactttcagcattctgatgtgcaggggtctcttggggaagataaattaacatcaaatacatctgtgtttctctcccttctttcctcctcacagggttcctttatttatctccttactgaagattttttttttttttgagacctagtcttgctctgtcacccaggctggagtgcaatggcatgatcttggctcactacagcctctgcctcccgggttcaagcaattctcctgcctcagccttccgagtagctgggattacaggcatgggccaccatgcccagctcatttttgtattttttagtagagatggggttttgccatgttggccaggctagtctcaaactcctgacctcaggcgatgcacccaccttggcctcccaaagtgctgggatgacaggagttgggcaccatgcccagccgaagattttttaaaatttatttcttaaaacagggtcttactctgttgcccaggctggagtgcagtggcacggtcagtcatagcccgctgcagcctcaacctgggctcacacaatccttctgcttcagcctccagcatagctgggacaacaggcatgcaccaccatgcccaaccaattaaaaaaaaaatgttgtagatactgggtctcgttttattgcctatgctggtcttgaactcctgacttcaagcagtcctcccacctcagccaaccaaagtgctaggattacagttgtgagcactgtgctcagccaggaaaaacttatgaatcttttcttttattaaaaaaaaaaatagcctacgatcacttggaaaaaactcttcagaatttatggatgacctaaataaagcccctggctctttatttttgcaactgaaaagggccagctaaaatcaggtctgtgcctggaatcagctttcctgattcctgaccattctagtttctcatgatttccctcttttctctaaaggaatccatagattctctaaagcttccattttctcacagtggcttcctaaccagtagatgtgggggaggagaaaaggaaagagcgcagagatgagtttgccagttcagtcaactccatttttctttttttgtggtttgttttaattttatttttattttttgattattttatttataaataatagagatgggctagccgggcatggtggctcatgcctgtaatcccggcactttggaaggctgaggtgggtggatcacttggtcgggagttcaagaccagcctggccaacatggtgaaacctcatctctactaaaaatacaaaaattagccaggtgtggtggtgtgcgcctgtaatcccagctactctggaggctgaggcaggagaattgcttgagcccaggaggcagaggttgcagtgagttgagattgcgccactgcactccagcctggacgacagagcgatactctgtctcaaaaattaaaaaaaaaaaaaaaatacagatgggatctcgctctgttggccaggttggtcttaaacacctggcctcagcctcccaaagtgctaagattacaggcttgagccaccatacctgtttttttgttttgttttgttttgttttaaagagtctccctgcgttgccaaggcctcgagtgcagtagcgtgctcatatctcactacagccttgatatcctgggctctagtgatcctcccgcctcagcctcctgagtagctgggactataggcatgctactgcatccagctaactccccttttttcatgaacaatttcaaacatgtagaaaagtaggaagagtagtacaataagtgccatatattacctcctagactcagtcattgtttaacgtattcatatttgctttgagtgtgtgtatatataattttgctggaccatttgaaagtaaattgcagttattgtggcatttcaccactcagcatgcagctcctaagaccaagcatattaggagctgatacgttaatgagggagcttttatgtgaaactattaatattaagcaggtaatacaaaggagcctcagctctttcagttctatgagatggtcttttggagaagagagaagacagggaagagattccacagtggagcacggactgggggaagatgagtaaaggcttggaattgagaatcctagatataatgtgttttgggggacagtgaaggcacctgccttcaggaatgaaggactgatgtttgcacgtagggggaggtgagaaggatgggtggagggagtcagttacaaatgaagcgggggacttgattctgtaggtcttcaaacatttttattgtgcaactgtcagaatttctttagcacaatcccccatacatatttatttatattttataagtgtaatgtataaattatgtatttcaaggaactgaccaactcttactacctgcactgctgccagcctgatccacttggattatgtaattcctctcaactgctttctctgctttctttttgccccgcttcccccagtctctttcatcccagcagagagatcccttagaattggaatcagattttgtcagtcctctcctcaaatccctccaaataactgcccttttcttwccttcttyctttatttttctttctttccttctttcttctttbtgtctgtctttctgtctttctttctctctctctcttttctttctttcttttttattttttttgagacggagtctcgctctgtcgcccaggctggagtgcagtggcgsgatctcggctcactgcaagctccgcctcccgggttcacgccattctcctgcctcagcctcccgagtagctgggactacaggcgcccgccaccacgcccggctaatttttttgtattttcagtagagacggggtttcaccgtgttagccaggatggtctcgatctcttgacctcgtgatctgcccgcctcggcctcccaaagtgccgggattgcaggcgtgagccactgcgcccggccataacttcccttttcactcagagtcaaagccttttaagagtgaaagtcctttcagaggccacatggtacctctttgacctcacctttccccaggctccttgctctgtgtcagccacacagaccccttcctctttgaactccaggtaccctctcaccccctgcctttgacattacttctgcctggaacactccgtcaccttgttcaggtctgcactgagacgccacctcctcagcaaggcttttcctgaccatcctctaaaattgcaaccacaatctccaacccctggtagaccccgtctccctttcctgtcttattttcctccatcagcacttactgaccatctggcatatataggtagataattgttgtttgttgtgtgttcatcttgtttgttgtctatctatgccagtagcacgtgagcttcatgaggcagtggttttttttgtttatttatttatttttttgagatggagtcttgctctgtcgcccatgctggagtgcaatagcgcaatctcggctcactgcaacgtctgcctcccaagttcaagtgattcttctgcctcagcctcctgagcagctgggattacaggckagcaccaccacgcccagctaatttttttgtatttttagtagagatggggtttcatcatattggtcaggctggtctcgaactcctgacctcttgatccgcctgcctcggcctcctaaagtgctgggatcacaggcgtgagccaccacgcccggccacaaggcagtggtttttatctgttttgtttcctgttctctcctcagaccctaatacatatactggacattcagtgagtgaaaatctgttgaacgagtaaatgaatgtgccaatatattaaccaaagaaaatacacacacagtggctcatgcctgtaatcccagcactttgggaagcataggtaggtggattacttgaggccaggagtttgagaacagcctggacaacatggcaaaaccccatctctactaaaaatacaaaaattagccgggcatggtggtgcatgcccataatctcagctacttgggctgaggcaggagaatcgcttgaacctgagaggcggagtttgcaatgagccaagattgtgccactgcactccagcctggatgacagagtgagactctgtctcaaaaaacaaaaaagacacacagaacttctaaaggatgagttaaaaataaagaaaaataagagttctgggccaggtgtggtggctcacaccagtaatcccaacactttgggaggctgaggcaggagtatcacttgaggccaggagttcaagtacaacctggtcaacatattgagaccccccccccccgaccccacctctccaaaaaaaattaaaaatattagccaggcctggttgtgtacaccagtagtcctagctgctcaggaagctgaggcagaaggatcagttgagccgaggagttggaggttacagggagctatgatcatgccactgcactctagcctgggcgacagagaccctgtctcttaaaaaaacaggagttataatatttggttcccaagttctaggaaatgctcttgctcttcttagggcgtggacatgcctcttggaaaccaaatgatggatgatggaggggggacatcaaaaggtcttaagtagagaatcctggtgattgtttatagaatgaaggagaaggagaaaagtttgaatctgccagcagttaagccaggagaactgggtgaattttgttgctgacagtgggaatgggaaggaggaaatacacatggggagagatgctttaaactataaatccacagtatttggtgactgtggaggtgcagagaaggcatggacaaaagatgatggatgtgagggtgggtcggttgggtgaaaatggcagagcttcttctgaggagtaggagattcagaaggggagcttttagaaaagagatgggaagagaacagcatgaactgaggtttagaaatgttgaaattctgctgatgagagatcaaagtgtaactttttcagacatgaatggagattgggagagctcatcgctggagagtcatatttttagaagtacagtgttaatttcattacagagaatactaccaaatagggtaattacttagttgtcaaaactaattgtcactgcggcctttcctgttcagtttcagataaatttggattggacagctacactgtggcatcagcacatatctctttaaatacaaatgtttaattrcataaacttttcccaggtgtaccctgggcacaccgcagtttgctggatatttgagcaaatacagatccaatttcttggtgtgcaatccatgccagtttgataatctggaaaggggacttaaaccattctgtgatgtttgcatagtttgctagttatttaatgacatttgcatttttttttttttttagagttatcattaccatgttggtgacctgttcagtttgctgctatctcttgtaagtaattttttcttaagtaattattcttggtatttgtagtgtgtgcgatttacacatttgttttattggagctcatccctcatgtaatatctagaaatagtgtcctaaaattgaaaatatcacacttttcatatgctcagtatatttatgtagagttgtacagatactctatccttctgggaatacaacttctgtttaattggcacaaatgttaaagcttataagtagctggaaattatgattatactactttatattttactatggtgaagtatttacttatttatttatcttttgagacaaggtcccgctctgtcgcccaggctgcagtgcagtggtgtgatctcagctcactgcaacctcggcctcctgggttcaagtgagtctcatgcctcagctacctaaatggctggggttacaggcacacgccgccatgcatggctaatttttgtatttttagtggagacgggtttgccatgttggccaggctggtctcaaactcctgacctcaagtgatccgcctgccttagcctcccaaagtgctgggattacaggcatgagccactgtgcccggtatactattgtgaagtatttagatctacttattttactgaaatatctcactaatggagctaataaagctattctttactgtgacttttgtttatctgatggacagaaattgagctagaattataaccaagtagactaaggataattttttaacaattcattgtaagctgtatcaaaatatatgtattgatcacataccataaaaataatcctaaggatttctttcaatttaggtttttgagacagggtcttgctctgtcacccaggctggaatggctcaatcatagctcactgcagcctcaaactcttaggctcaggcgatcctcctgcctctgcctcccaagtagttgggactatagtcatgcgccaccatgctcagctaacttttttatttttgtagagatggagtcttactgtgttacccaggctggtcttgaactcctggcctcagtgatccttccatcttaagcctcccaaagtgctaggattayaggcatgagtcactacacccagccaggatttctttctagagtttagaaccagtgattctctttttttgaagagaactttctagcttcctgagacttcagagacatggaaagtgttggtgttcacagaagtgctgtttagtgcccatgtaaggtaggaagcaacagttctgacccatcctatagatgaaagaccatgacttttttttccagaaacattttaataaaaattggccatttccaagaaacacccactgcatgcccgttaataaaagaggaccataacaaaatagaaaatttaccatatagctgtgatttaaaatagctgtgatttaaagagaaaatgtggacacaagcacatcagcaaagtccagtattaaagtcacattccggccaggatcggtggctcatgcctgtaatcccagcactttgggaggccgaggcgggtggatcaccaggtcaggatattgagaccagcctggccaacatggtgaaacccattctctattaaaaatacaaaaaaaaattagctgggcttggtggcgcacacctgtagtcccagctgctcgggaggctgaggcaggagaatcacttgaaccctggaggcagaggttgcagtgagccgagattgcaccactgcactccagcctgggcgacagagcgagactccgcctcaaaaaaaaaaaaaatacatacatacatacatacatacataaagtcacattccttcttatgggctatgattaggaatctgatcagatatcagagtaaaaatacaaatgctgaactatttaggtcaaagaacctctatagaagcatctgtcttcaaaggcattccaatttgagatcaattttagaataaggcataacacatatgttaacagaagacatacaaggtgatgaaagagggattctacaattccccacatactctgaacctaataaaacaaatccagatttttaaaaaattacttttctttaaacaattgccaagactgaaatcaaagagaaatagaaggcacaacaattttgctctggttgttatctgggtttggggaattttttcttttttttttttttcaaatacaaattaaacatgaaaaaactctatttcaaataaactaacagttcaagaaaagcctatcagttgcattccagacatttaaaacctatatcgcagtttaaatttcagtggtaaaaacagtaggttttagaattgttttgtgatcctatatcaaaagaaaaattctattcctttaattcagtttttaaacataccagtgagaatcaaaattgtcaaattttccaatgacaaattctccacaccagaaggtagtcatgactctcaaagaagaaacaatttgggtttttcctgccttcaaaatgttatcaagtcctgtatttctcacaggtttttgaaacacgtagaaaacaagaaatattccgatgaatgaaatataccaaatgtcagtaatatgcaagacacattcctttggggaaatggctgttaaaaaaaaaatccagtctgtatatgcaaagtaagcaaggaaattcagtctttttttttcttcttcttctttaaaaatctgttactcctaaaatatcattccacaaaattggaagtgaaagactaaaggtcaggggcaaggcgtggtggctcacgcctgtaatcccagcactttgggaggccgaggcgggcggatcacgaggtcaggagatcgagaccatcctggctaacacagtgaaaccccgtctctactaaaaatacaaaaaaaaatttagccgagcgtggtggtgggtgcctgtagtcccagctacttgggaggttgaggcaggagaatggcgtgaaccccggaggcggagcttgcagtgagccgagattgcaccactgcactccagtctgggcgacagagcgagactccgtctcaaaaaaaaaaaaaaaagttctaggccgggcatggtggctcacgcctgtaatcccaccactttgggaagctgaggcgggcagatcacttgagcccgggagttcaagaccagcctgagcaacatgttgaaaccctttctctacaaaaaattatccgattgtggtggcacatgcctgtcgtcccagctaccgggaaggtggaggtgtgaggatcacctgagcccggggaagtcaaggctacagtgagctgtcattgcggcagtgcattccagcctgggggtccaagtgataccctgtctcaaaaaaaaaaaagttgtgataaatgatgttgtttgactgtttaaacactaaggcccagctgatgaaacttaaaatttagtctttttttttttttttttttttggttagagtgttaaaagaagcttgttcaggtgataacttagcctccagagtggaacacaggttgcatgtggagggaattcttatcactgtgtttggctgtaaagagtatatgaagcctggtgtggtggctcacgcctgtaatcccagcactctgggaggccaaggcgggaagatcacctgaggttacaagttcaaggccaacctagccaacatggtgaaaccccatcaatactaaaaaaaatttttaaaattagctgcgcgtgatggtacgcacctgtagtcccagctacttgggaggctgaggcaggagaattgcttgaacccgggaggtggatgttgcagtgagccaagatcgctccactgcatccagcctaggcatcagagtgagactccatcttaaaaaaaaaaaaaaaaaaaagagtaaatgagggcaaatacatgtatcatcaagaactgattttagtacgatggttgaccatcagcctatcctactgaatcgcctatggaaatcagtaagggagcgccatatcaatccaggtgtcaaggattggtctgtcattgaaaaggcctttgtttttattgctttgaagatctctgcaatgtgagcagtaaggtcagtggtggtaccttataaaagggaaaatgggggccgggcgtgttggcttatgcctgtattcccagcactttgggaggctgaggcaggcggatcacaaggtcaggagttcgaaactcctggccaacacggtgaaaccccatctctactaataatacaaaattagccccatgtggtggcgggcacctataatcccagctactaaggaggctgaggcaggagaatcacttgaaactgggaggcagaggttgcagtgagccgagattgtgccattgcactccagcctggacaacaagtctccatctcaggagggaaaaaaaagggggtcgggggaatgagttcacagaggaatgacttgagatttaaacccaaaaagcaccaaaatattttgtgacttcctggttctccatagtctttgaaatgtgtttaattttcatgatatttaaaacaaaagaaaacaaaaacgtttccagtcagtctcatgtcttgtatttccacttttttttttttctttctggacacacagtcttgctctgtcacccaggctggagtgcattggcactaccatagttcactgcagcctcaaactcctgggctgaagcaatcttcctgcctcagcctcctgagtagctgggactacagacatacaccaccacacctggctaattttttaaatttttagtagatgaggtcctgctatgtttgttgcccaggctagtcttgaactcctgagctcaagcagtcttctcacctcagccttccaaagtgctaggattacaggcgtgagccaccacgcccagtcatatttccactttcaagtataaaatgaataattggatttgagcccttgcctcttgctgtctagacattagtccattttttcctttgttcccaaattctggtgacttctctactgacagtggatcagcactgttagtggtgtattaataaaggtggtacacagtgttccaacattaaatgcttctggaggccattttatggggaaatcagctggatagtattgactttatgaaatcatttttcttttgtttctttgaaatctgatcatacatcctatttagcatgatatctgagtgaaaaatgtggacggaattcaaaccccaaatattttacacaccttattccacaaaagagtgagattctattaaaaaaattgaaattcaaaggaaatttcactgtttggcactggtacattttcttgaaaatgccccttttcaagtaaggcacacccaaagagactttggctttcaaagtcatgttttgaaatgcattcatggacttttaaattgccttctgtttgttgcagttttttctggtgccagtttgttctagtttaaagtttgattccgtgaggctcaacttgtttgagctctgtataaattaggttctctgccagtagaatccagtttctgttaatagttcagcagaggaaaatctgaatgttatatctggttccctctttaaggcacaagatcacttttgtctcttaaacatacaatcttgttaagttactatactatatttctggtcttaggttaatttttaatgttgaattatattgttgtttactcagagtcaccaagctcacatgaaattagaaatgtaatgtattgtgaagacacagttgtttcttggaaaacatgctgtgtcttagcacctgactaactgtaaatcttactggcatcatgatataggaaaataaataytatctaagaatcacgagacctaggttcttttaggcaaaaggatacttggcacgattatgttgtagggtggttttgtgagttttaagtaagatgctrtgtgtgaaaacttagagtaaagcacaataaaaatcaaagtaatattatcagtgatttttttttttttttttgagatagagtctcactctgtcgaccaggctggagtgcagtggcgagatctcagctcactgcaacctccacctcccaggttcaagtgattctcctacctcagcctcctgagtaggtgggactacagatgtgcgccaccatgcctggctattttttgtattgttagtaaagacagggtgtcaccttgttggccaggctggtctcgaactcctgacctcaagtgatccacccaccttggcctcccaaagtgctgggattacaggtgtgagccaccgcccctggccaatcagtgatctttaaaataagttattttaattcaaaggactgtgttatttgtaagcacagtttccttacagggctggtatagtgaatattttacttagccttattagaattcattcattcaacatatatttatttagcattagtaggcactggatctggacactactaaaaatacagaattagccgggcgtaatggcacagtgtagcagtgaataaacaaagtagacaaccccctgtcctctttaataaggagaagcagataaaacaaatcaagagccagagaggcccgatcactcccctcattgcccttcattcacttcccaaacaggttcccccatccactcatttccacaaatacctactcagttatgacctcagaagattcccctttactcattctttagcccccgttgctgtccatcacacagggacctgcacagcccacagaaactccacctcacatgtctcggaatttgcaaatccagagctgagcctcacctccctcactggcctttctgggtcctggctctagagctagtttgagcacaggacataatcacttcccaggggcctgggtgcaccgctttggtttccaaccaagtaaccacacgtggtggctcacgcctgtaatcgcagcactttggctgattggtttcagggctgctatttactttaacatgtatttcctttttaaactttctggttttgagctttttttttttttcttttcccccgagacggagtttcactcttgttgtccaggctagagtgcaatggctggatctcagctcactgcaacctctgccacccagtttcaagtgattctcttgcctcagcctcccgagtaactgggattacaggcatgtgccaccacgcctggcttattttgtgtttttagtagggatgaggtttctccatgttggtcaggctagtctcgaactcctgccctcaggtgatccacctgccttggcctcccaaaggttttcagctttttaaacatactattttctctctataaaagtagaaaggttaggataatgaaccttcatttgcttaccacccaccttcaaaaatgatcaactcatggccaatcgtgttttatccccacacttttcctctccaccccagattattctgaaacaaatcccagacatatcagttcatctgtaaacatttcaatatgtgtctctaaattttaaaagtacaaccacaataccattatgcacaaaaaacttaattcctttatatcatcaaatatcctatcatatttaaatttccgtaattgtctcattattttacagcttgctggaatcaaggtccacataaagaccacacgtagcaattggtgaatgtctctcaaatttctctttataggcttcttctccatatctttctcttttttcttggaaattttaatagaaaaactgggttgtttgccctttaatgttgcmgtctggtctttgttaattgcatactcatggtggtaacacgttcttctgtattttctatgaattggtagccatatctagaggctgatcagatttagcttcaattttttgaccagtctccttcataagtggtgttgagtacttccaagaggggtacataatgtctgatttttctttgtattattggccatcatttatgatattctgtttctgtaatttcttattcactaattagctagactatatccaaaatagaagccaagtctggtggctcatgcctgtaatctcagcactttgggaagctgaggcaggagaattgcttgaggccaggagtatgagaccagcctgggcaacatggtgaaaccctgtgtctgaggaggaatcagccatagggaaattggagggagggctttctgcaaatgtaaaggcactgaggggtaaagagcttgggatagccggggacaggggtatcccacctgtagtcccagctacttgggaggctaaagcagaaggatcgcttgggctcaggagttttgagaccagcctgggcaacacagcaaggccctgtcccttttttctttcttttttttaagtagcttggaatgttctggcagggtaatgttgggcttaatagtgaggtggggagtggtaggttcagagtttatgtaaggcccaggccaggtgggattttatgctgtgcaggtccttgtgtgattgacagcagcagggggctgaaggataagtgagggggaatcttccgaggtcataactgaataggtatttgtggcaacaagtggatgggggaaactgggaagtgaatgaaggggctgtgaggggagtgattgggcctctctggctcttgatttgtttactatctgcttctcctcattaaagaggacatggaggttgtctgatttgttaattcattgctacacatctagtgcccagatccagtgtctgctgacactaaataaggagtttgggtttcatgttaagtgaataggagatgctttaagatttttaatgaaggagtggtgtgaatgggatgatcactctggctgctctgtggagaacagactgtttggcggggagaatggaagcaggaacacccgtcaggaagtgactgcatgcatgccagtgagagatcaccatggtttggtctgaggtgaagagaggcacacagatttgagagcaaatttggcaggtagaatttattggtcgtactgatggattagatgtaggaagaatcagagatggctcccagttctaggttgggccatttactaagatgatcctgacttgggacaggatgaatttgaagagagattcaactggtacatgctaattaggactgagatggccataagatgcccaagagttgtcaaacaggaacttagctaaagcagagagatttgaggccatgagaacacatagaattacctaaggcagtggttctttgctggggttgctgctggcatccagggatagaggccagggatgctgctgaacatcctgtactgcacaggacagcctcactttcccctagtgaagaattatgcagcccaaaatttcaatagtgctgaggttgagaaacccagcactaagggaaggggtaggagagaaaagtaaagaaaagatccgaccaaacctgaggaatgccaacattttgatgttgtgtagatgaggaagagtcagaaaagggcaaccttgagcctcctttggtgaataagggtggtgcctgggaaagcatggagggatcaggctggtgatcagcaagcttgcacttcatttgcctaaggacatgcagttgcacttctttagagtcagcttttcacaaggttgggtgaaaattgttaggaggcagcacaaggggagcaaagatgttactaaccccagtcgccaaagcctgaggtatctggcctgtaaacataagcagtcttctctgcttcagagagcctggtgagaagggatgggaagctgggtttcagttaagctagagggaaagtgctggaagaggaggtacgtgaacaagtagcagataattgagcaagagttacagagaacacagtggaaggatttggaagaaaggggaagatttggaagaaaagaaagggatgcaccattgttayatcaaatagtgagatgagtgcggagcagtctggggatggggtcataatagatggtcctgggaggtttcaaatgccggtaaaaattgagataaggaaagatatgagacctgttgaacttagtttttatattccgttattaggcgagaactgggacctgaaggctttccacaatagcttggcaggggagagggttttggcagttaggcatgactgcttctgaaggttgtaggcactaaaatggtacaggtcatgccttgtttttgtttttctgttttgttttgctttgttttcccaatatagacatccagttgttgctgcaccagcttttgaaaatcctttctccgtgaaattgctttggcattttcatctaaaattagtgactatatcttatgagtctggctctggattgcctcttctgttcattgatctctttgtctggccttatgataatatactgtcttgagtattgcagagttatgttaaaatcagaaagtgtgagtcctccatctttgtgcttcaagattgttttggttattctaaaatagccacatatattttaaaatcaactaggcagtttctacgaaaaaaaaaaaaacctgttgggattttaattgggattgtgttgaatatatcaatttgaagagaactgacatcttaatgatrttgagttttctaatctcactggtatctccatgtccagcctcatgggatctcttcatttatttaggttttcttttgtttctttcacaaatgttttgtaatttttggtgcagagatctcacatgtctcttggatttttggggttttcgttttttaatagagatggcattttgccatgttgcccaggatggtctcgatctcctgggctcaaacgatctgcctgccttggcctcccaaagtgctagcattacaggcatgagccactgcacctagtatgtctcttgttattttaatatatcaagtattttaatgtaatttttgatgctcttttaatgaagcagttaggaatttatcaattttattaatcttttcaaataatcaaaattttatcttggttactttcctgtatctttttgtccttctcattgacatctgcacgttattatttcttccttcttactttggatttaatttcgtcttttctagtgtaagcatttaatacaataaaattccccctaagcactgcttcagtgatatcccacaaattttgataaagtgtattttcattttactccatttgaaatattttctaatttcttttgtaatttcttagaccaattggttattcagaattgtggtgtttaatttctaaatatctggtgctgttccagatgtcttcttactgttaattgatttctcatttaattccatgtggtcagaagatatactctctaagatttcagtcttttgagattgggacttattttatgcgtgtggactatcttgacaaccatttgtgtgcagttgaaaagaatctatattctgaagttgttggttgtagtattctatatcaggtcaagatggttcaaattttctatgtccttattgtggtttttttttgtttgttttttatctactacttttaattatgaaaagagggatgctaaaaatcaccagctatgattgtggattttcctgtttctccctttctttcctcttgaattctgattgatttatccttaattcaagatataaccctttaggatcctagtttttggagggggtgaaggttttattaaactctactctgggccgggcacgatggctcacgcctgtaatcccagcactttgggaggctgaggcaggtggatcatgaggtcaggagatcgagaccatcctggctaacacggtgaaactccgtctctactaaaaatacaaaaaattagccaggcgtggtggtgggcgcctgtagtcccagcgactcgggaggctgaggcaggagaatggcgtgaacccgggaggcggaggtcgcaggcagtgagccgagatggcgacactgcactccagcctgggtgacagagtgagactccatctcaaacaaacaaacaaacaaacaaacactctactctggatgggccttgggccttgtccactgtttgctgtgccctgtgagatctgtaaacagaagctcaagtccgtgttgtttgttacatacatttaagctatagaaagcaacctatggtcaccttcctctctgagtacctgccttcatttgggttttgggggttttttttggcctgagaattgtttgaatttcttatggatacatttgagatgtttgtttgtaggggaagggaagggaaatctaggcagctggcccagcatattacttgctatatggaaaagtttatttttcttagtctgactttataattgtttcctttataatttggcagataagaggaattttagactttgagctggaaggtctggtgtagaaaataagtatggagagaaaaaaggaaaggtatttcaagtttagaattggcaaaaatagggtatattcctttggtagtgaaatagccataggttggcattaagttaatggaaaacatgtttatgactttttttatttttattgagatgaggtctcgccatgttgcccaggctggtcttgaactcctgagctcaagcattctgcccatctcggcctcccaaaatgctgggattacaagcatgagccaccgcagctggtcatgtttatgacttctaatctgaagcttggcctcctcttccaagctctcgtggctgtcagaattcagttctatgtgcttatagaactgagatggcagtttccttgctggctattagttgggaccactgtcagctcctagaggccaccttcattcctggccatatggcccctccattttcacagccgggaaaagagaatctcctttgtgtcaaatcatctcatcctatagcagtctggagtccaataaggagatagaaaccacagtcggttaagcaggggaagataaagaattatttttttcttttgcggattaggtagccacgtaaaccaaaataggttgagagagatttcagaattattattatggcaaaagagttactaaaagatacaaagaaactatatttggttccctaggactgagggagagtaaccaaagaacagacttggaagggattcagacctcactagacaaagtatggttgagcccaccagatagcaaaggagtttgttggtttggccagaccagggtttgcctggagtttctgggcaagcaattggcctcttctggagtacaggcagggggcgaggtcatcgggggcatggatgtagtgggagtccctgtccccatacgagcaggaggccttcaaggcatgtatgccgggcaggggctttgcttaacatgtggagagggttctgaagttattgccaggccaaggctacaagatcaaagaggtaccacrttctggcctcgagccatagtaggcttcaccagaggttctcacacccactccgcgacctccggcctacgcctgaaatgtccctccagcttcctctactgagaaagcttaacagcgtgctcactttacaggagaaataaagtaattcacttgtttatcacagagcacacattgaattgcacttcatttgcctaatgttcagagctgagaggcaataaattcgtgactgaaacacacactccaaatgtctttgtaagggagagtcctgttcctttttttttcttttcttttcttttttttttttttttgagacagagtcttgctctgtcaccaggctggagtgcagtggctcaatctyggctcactgcaacgctccgcctcctgggttcaagcaagtcttctgcctcagcctctctagtagctgggactacaggtgcgtgccacactgcccagctaatttttgttgttttaatagagatggggtttcactatgtttgccagcatggtcttgatctcttgacctcatgatctgcccaccttggcttcccaaagtgctgggattacaggcgtgagccaccgtgcccagccgagtccttttccttttaagaactcaactgggctgggcgcggtggctcacgcctgtaatcccagcactttgggaagccaaggtgggcagatcatgaggtcaagagatcaagaccatgccggcaaacatagtgaaaggccatcatataacagcaccaaacttgcagggcaggcggtcgcactagctagagagacaccaaacaggcgaagacgaccaacaaccaccacannnnnnnnnnnnnnnnnnnncgtggtttttgtttggtgttgtttgttgtgtttttttctttgtggttttgttgtttgtgttgttctggtcttttttgttctccttgtgcttggctcgtttgctctcgcctgtgatcccagcactttgggagtccaaggtggcgggatcacgaggtcaggagatcgagaccatcctggctaattcggtgaaaccccatctctactaaaaatacacaaaaaattaggctgggcgtggtggcgggcgcctgtagtcccagctacttgggaggctgaggcaggagaatggcatgaacccgggaggcagagcttgcagtgagcagagattgggccactgcactccagcctgggtgacagagcaagactctgtctcaaaaaaaaaaaaaaaaaaaaaaaactcaactgagggctgggtgggtgactcatgcgtgtaatcctagcactttgggaggcgaaggctggcagatcacttgaggccaggagttcgagaccagcctgggcaacatggtgaaacctcgtctctaataaaaatagaaaaatcagccaggcatggtggcatgtacctgtaatcccagctactcgggaggctgaggcacaaggatcgcttgaaccaggaaagcagaggttatggtgagccaagattgcaccactgcgctccagcctgggcaacagagcgagcctgtctcaaaaaatacaaattaaaaaaataaataaataaaataaaagaactcgcctgaagccatgcccagtggtggcacctcatgcctgcaatctcagctactcaggagactgagatgggaggattgctaaaggccaggagttcaagaccaccctgggcaacatagcaagattctcatctcaaagataaaaacaaaaattcccctgaacaggtcacattcactcaggatagccacttccctttttttttttttttttttttttgagacagagtctcgttctatcatccaggtggctggagtgcagtggtgcaatcttggctcactgcaacctctgcctcccatgttcaagtgattctcgtgcctcagcctccggagtagctgggattacaggcgtgcaccaccacgcccggctaatttttatttttagtagagacagagtttttccatgttggccaagctggtctcccaactcctgacctctggtgatccacccaccttggcctcccaaagtgctgggattacaggcgtgagccactgcgcctggcctctttttttttttttttttagatggagtcttgctctgttgcccaggctggagtgcagtggcacaatctgrgctcactgcaacctctgcctcccgggttcaggcgattctcctgcctcagcctcctgagtagctgggattacaggcacgtgccaccacgcctggccaatttttgtatttttagtagagacggggtttcaccatgttggtcacgctggtctcaaactcctgacctcgtgatctgcctgccttggcctcccaaagtgctggaattacaggcgcgagccaccgtgcctgtcctggatagccactttgttaaagccagctgtatcagataatataatctaaccatggagtgactattctgtcagattcactgagttttatacagagtgtgtatactgagtggtgggaacctcgggagaattgaaatctgcctgccatagagtgggtggtcgcgggagaggaggtggagatgagaatgactcagtgctacatgagaaactcctttgtgaagtaaataggttgtatttcattctgtggcttgaatacatttttagctgtcttacagagaaagagaagaaataaccagtgtttattgaacatctatttgtcagccactgcatagagcactttacttatattatctctttaaattgtaatactataaggcaaggattattatcaccattttacaacaggagacagtgggcttggggttgtaaggacatttgcctggattcagttcaccgatatttagtgttgctggaattaaaatccgactctgtctaataccgaatcccatgttttctaggagcatctaataatgttgctcctcttgaaagtatttttatcattcagttgagatgagaggtcgttttagtggcgctagggcaaatcactttcctgcatttctgctgtctcttaaggagctcaccgacagaggtcactgctgtcatggccctggctggagggacagtggatcagaagagaggtcctggccagacttccccattccagtagggaagctgagactgctccatctgcgtgtcaccgggaagtaacctgtgcctttgttccctgttcttatatctgaatgtggaacagaagaacaaagcagggcttgagagagctgagtatagtggtgagggcatagtttatgctgggagagttctagtaaccaagagctgagctcctaagaagtggccagggagggtttatagtatgaaggcacccatgcatatctctacaaaaacatattctactactctccttggcttatttctcacagctcatgagtccctttgggttggcccctcagccatctccttttcgcatcctcagaggttgacatggaacatggcactgctaaatgattgtggaataaatgaatccctaggctgcctgatttatcttttttttttttttttttttttttgaaacagggtcttgctctgttgcccaggctagagtgcagtggcatgatcatagctcacggcagccttgacctccggccagtgatcctcccacctcagcttcctgagtagctgggactataggcatgtgccatcaagcctggctaattgaaaaaaaatttttttttatagagacggggtctcgccatgttgctcaggctggtcttgaactcataggctcaagcaatccacctgcctcagcctcccaaagtgttggaattacagacatgagccactgcacctggcctgtttcatccttaatagcctatagaaacagcctagtataatgggactcaggagtcctggattccccgcttccagcttcccccttcactaatttgctgtggggtattagtaagttcactaggacttaatttcctcatctttaaaatgcagaacttagacttgatctcagatccattccggctctgcagttctctgaagacattattgcaccatagctgcctcaattgtttgaataatctcagattggttattaaggctggccctcaggttatgaagacatgcggtacagttcgggcaaacatgaaaggtacatttagttccttttcttgtacacatgaagtaatagattcattggaatatgatctcttcctccacccacttccatcaattcagagtggattttttttcccttccagttctctgcgtgtttgtcagctttaaagggaaattttaagtcaggaggtagtcagaggggcaggcacaaagctcagcgggttaggggggtaaattcctctgaaatttcaaataaaccagactagactgtttcctaggtaaatttttttttttttttttgagtcttgctgtgtcacccaggctggagtgcagtggcccgatctcagctcactgcaacctctgcctcccaggttcaagtgattctcctgcctcagcctcccgagtagctgctactacatccatgtgctactgtgcctggctgatttttatatttttagtagagatagtgtttccccatattggccaggctggtcttggactcctgacctcaggtgatccgcccgccttggcctctggagttttcttgaactgtggtttcttgttttttttttcttaagtgagatgtgtgcgtgtgtgtgtacatgcatatgtgtatgcatgtgtactttgataaccatatacagaagagtgaaattgaaccctttctgtcaccatatacaaaagtcaactcaggatgggttaaagatttaaacgaggccgggcatggtggctcacgcctttaatcccagcactttgggaggccaaggcgggcagatcacctgaggtcgggattttgagaccagcctgaccaatacgcagaaaccccatctctactaaaaatacaaaaaattagctgggcatggtggcgcatgcctgtaatcccagctactcaagagactgaggcaggagaatcgcttgaacctgggagatgaaggttgccatgagctgagatcgcgtgccattccactccaggctgggcaatgagtgaaactccatctcaaaaaaaaaaaaaagaaaagatttaaacataagacctgaaattataaaacagctagaagcaaacatagggacaactcttcagagcattggtctaggcaaaagttttatgactaagacctcaaaagcacaggcaacaggctgggtgtagtggctcacacctgtaatcccagcactttgggaggttgaggtgggaggatcagttgagcccaggaattcgagaccagcttaggcagcataatgagaccctgtctctacaaaaaatttaaaaaattagccaagcctggtggcacgtgcttgtggtccaagctactcaggcggctgaggtaggaggattgcttaagtccaggagcctgggagatcaaggctgcaatgagctgtgattgcgccactccagtccagcctgggcaacagagcaagacacttgtgttaaaaaaaagaaaaaaaggcacagtcaacaaaaactaaaatagacaaatgggactatattaaactaaaaagctctgcacagcaaaagaaacaatagaataaagagacaacttggccgggcgcggtggctcacgcctgtaatcccagcactttgggaggccgaggcgggtgaatcacgaggtcaggagatcgagaccatcctggctaacatggtgaaaccccgtctctactaaaaatacaaaaaattaaccaggcgtagtggtgggcgcctgtagtcccagctactccggaggctgaggcaggagaatggcgtgaacccggcaggcggagcttgcagtgagctgagattgcgccactgcactccagcctgggcgacagagccagactccatctcaaaaaaaaaaaaaaaaaaaagagacaacttgttgaatgggagaaaatatttgcaaactacccaactgacaggggactaagatccagaatatataaggacctcaaacaacttaacagttaaacaaataatcctattgagaaatggacaaaggacatgactagatatttctcaaaagaagacattacaaatggccagcagtgctcaatattattaatcactagggaaatgcaattcaaaactacaatgagatatcatctcactccagttagaatggctattactaaaaagcgaaaatatggccatgcatggtggctcatgcctataatcccagcactttgggaagccaaggcaggtggatcatctgagattaggagtttgagaccagcctggccaaccatgttcaacatggtggaaccccatctccactaagaattaaaaaattagctgggtgtggtggtaggttgtaatcccagctactcctgaggctgaggcaggagaatcacttcaacccgggaggtagaggttgcagtgagccaagatcgtgccactgcactccagcctgggccgtaaagggagactccatcttaaaaaaaaaaaaaaaaaaaagccaaaaaataacagatgccagcaaggatgcagagaaaaggaaacttttatacactgttagtgagaatgtaaattagtatagaaaatggtatggagtatagaaaccagtatagaaaatggtatggagatttttcaaaaaactaaaaatagaactgccatatgatccagcattcccgctactgggtatttatccagtggtagagaaatcagtatatataaaaggtatacctgcactctcgcatgttgatcgcagtgctgttcacagtagcagagacagagaatcaatctaagtgtctgtcaacagatgaacgcatgcagaaaatgtgttatatgtacactacggaatagtattcagccataaaaaaagaatgaaatcatgtcatttgcagcatcatgggaggaactagaggccattatcttaagtgaaataagccaagtgcagaaagacaaatatcacatgttctcacttatatgtgggagctaaaaaatttgatgtcaaagacatgaagagtagaatgatagatatgagagactgggaaggaaggaaagttgtgggaataaagagtagcacaatgggtacaaacrtgtggggtacccgtaaaatgggcacaaacattaaacagaggaaataagtttcttctatgtttgattgcaaaatagggtgactatactcagcaacagtactttgtgtatttcatactaacgggaagcgaggacttgaaatgataccaacacagagaaatggtaaatacgaagaaaaaacagtttctaaatactgacctgaccaagaaaggggtcttcattctttcttctggatattctttagtgaaggcaccaaaggcttgtgttgaacttaatcagtgctcagtggatggattctcattttctgaattctcaatttagatttagctaaattaatgccttctgaaatgttctcagttaaaatattccagaaggtcactttttgaagtgggaacagtaatctgatctgattcctggtctaggatctactactacctaattagcattgtgaccataggccaatcacttagactctctctgcctgtttcctagtacaagaattaaatgaaaggttatatgtgaaattgtgatattgtgaaatacaaatttagtctttgttcccatttcctggtatacaactcctaaaatccttagaatctccaaagtgacatgtgtctttgtatgctaatgagttgactgatgattggcagccccttggtagctccaggatgggatctaatcacgaaccaaggaaggattagagggttgggactttcagccccacagcccaaccataggggaagggggaggggctgaaccttaaactgatcaccaatggcccgtgatgtaatcaatcatgcctacacaatgaagcttccataaaaacccaaaaggattgggttctgagaggttcaggaaagctggaagctattcctggaggctggtgttcccaggaagagcatgagaactttgtgcccctttccatagctcaccctgtccatcccttcatcagtatcttgtgtagtatcttttgttagtttgtttgagacagtctcactctgtcatccaggctaaagtgcagtggtgcgaccttggctcactgcaacctctgcctcccaggttcaagtgattctcctgcctcaccctcccaagtagctgggactacagatgtgtgccaccatgcccagctgatttttgtatttttagtagagacgggtttcaccatgttggccaggctgatctcgaactcctgggctcaagtgatccacccgccttggcctcccagtgtcgagattacaggcgtgagccaccatgcccagattgtagtatcttttatagtaaaccagaaaacgtgtttccctgagctccgcgagctgctctagtagattaattgaacctaagaaaggttagagcctccccgatttatagccagttggtcagaagcacaggtagaacaacctggggcttgcgattggcatcagaagtgaggggcggtcttgtggaaccaagccctcaccctgtgagatctgatgctgatgctacctccaggcagataatgtcaggattgaattggaggacacccagctggagtccgctgcagaattgattgtgtgcttgttggtggggagaaatccccacacatttggctgtagaagtctcttctgtgttgattattgtggtgtgaaagcagaggaaaaggagtcaatgttttttccactctcagaaatagcatcagtatattttaaaagttccctgagtgattataatttgcagctggggaggagaaccactccgctacaacatcctacaaagtgctgggaagtggtgttttcattctgtgctatattcttggtaacaaaaggagataggggctagtttaaattctaatggatttttttagtatttctaggcattggccagttgtctcagtctcttacgaaagtgttttttcaggcagcttgtattgcctgccgggattggggaagtccttggttagtttggaattttccatgactcttagctctgcaccattagcgtcaactgcagtcacagagcttttcagtgtgtccgcctgtgctgttctcttcctttttttataatgtcagatggatgatgttgaacctcaactacaagtcttagtattgtgtttgtgtttaataccctacttctaaggatggatcagaaaatctcatctgaatgaactttttgtttattaagtgagtcagcttgaactatctgttttggcctgctttcctcaggtgtcatgtttcctgtcacaaaatcaccttttgtttctgtgggcacaagcttctgatatggtgctggctaattctccagcaatctctccattggtgatcagaatcagccttttgatcctctgattggaaaagctctaaaaatgacagtaaatgaaagaaaaaagatccacccrgataatggcctagttggggcttggctagttccccgcttatagggaaatttaaagtcctgaaagcgtgaaaggagactgctgtagtgatatatccacttacccttagaaagtgattccctgctgggcgtggtggctcacccctgtaatcccagcactttgggaggccgaggtgggcggatcacgtgagatcaggagtgcgagaccagccttgccaacatggtgaaaccccatctttactaaaaatacaaaaattagccgagtgtggtggcaggcgcctgtaatcccaactactcgggaggctgaggcgggagaatcgcttgaacccgggaggcagaggttgcagtgagccgagatcgtgccatcgcactccagcctgggtgacgagagtgagacttcgtctaaaaaaaaaaaaaaaaaagcgattcctggccggctgcagtggctcacgcctgtaatcccagcactttgggaggccaaggtgggcggatcacaaggtcaggagttcgacaccagcctggccaacatagtgaaacctcttctctactaaaaatacaaaaattagctggggatggtggcgcgtgcctgtaattccagctactcaggaggctgaagcaggagaattgcttgaacccaggaagtggaggttgtggtgagctgagatcgtgccactgcactccagcctggacaacagaacgagactccttctcaaaaaaaaaaaaaaaaaaaagaaaagaaaagaaagggattccctagatcccaatgtaccatgcagaaaggatagcagtatgttaccaaatttcactctcccagattggtagttggaggttggttgggcttgtttaccttaaccctgccctcctccccacaccactgcccaccaatgaaagaaattcaaattcatacacagttgacctttgaataacgtggaagttagaggttccgatcccctgcacagttgaaaatccatttataacttttgaatccccccagatttaattactaatagcctactgttgatcaggagctttaccaataacataaacagtcaattaacacataatttgtatacgtattatatcccgtgttcctataataaaggaaggtagagaaaagaaaatgttaagaaaatcataaggaagagaaaatatgtttactattatattaagtggaagtggatgagcataaaggtcttcatccttgttgtcttcacactgagtaggctgaggaggaggaagaagagggcttggtcctgctgtctcaggtgtggtagaggcagaagaggtggaggaggtggaaagggaggtggaggcaggacaggcaggcatatgagcaggcccaggcatccaagtcgacctgcatggttcaaacccatgttcaatggtcagctggattttgagtaggaactaaaggcagtgtgtattctgcttcattcccctgtctgtcttcctccttccctgaccaccctgtcgaaataatgccccgtcaagccactctctattccttctccttgcttgacttccttcataacagttatcacctgacattctattatgtaagctctgtgaggatagtgacatttcatttttcgccattgtatttctgaggcctagaacttagtaggtgctcattaaatatttctttagtaagtgaagaatggtttgaatactcagacatttgcatatttttttgttgtttgcttttgtctgagctaagtgattctcaaaactttatttggcatatgaattaccgtatcatatataagaccctttatacagaactttgtgagctatataagaaaattttaaagataaatctatgctatttttcttttctttttttagagacagggtctcactctgttgcccaggctggagtgcagtgatgtaactatagcactgcagccttgaactcccaggctcaagggatgctcccacctcagcctcctgggtagctgtggctacaagtgcaagtcagcaaacacagtgaatttttaaaatttttttatagagacgggttctcactgtgttgcccagactggtcatcaactcctggcttcgagtgatccttatcctcccaaagtgcgggattataggcatgagccaccgcacccaacctgtttttcacttttaaccctgaagtcggctgggcgmggtggctcacgtctgtaatcccagcactttgggaggccgaggcgggcacatcacgaggtcaggagatggagaccatcctggctaacacggtgaaaacccatctctactaaaaatacaaaaaatgagctgggcgtggtggcgggcgcctgtagtcccagctactcgggaggctgaggcaggagaatgggtgaactcgggaggcggagcttgcagcaagccgagattgcaccactgcagtctggactgggcgaaagagcgagactccatctcaaaaaaaaaaaaaccctgaagtaagatgtgacaccattttacttcctttatagtttagtctgtaatacagaggaatacctcattatttagattctgaagtaaactggggagaaggtaaatgcccattctgttaagttccacagtaggatgtgttacatattttggtggtgatggggattagaaaaggggaccttacatgttatagtctaataggaagatgataagctacaatcaaaccttgcctgtaccagtaaaaatgggtgtgtcatgtaggttgtgggtcttaacatttggagaatggataaaataagacacattttccctgaggttggaagttgtgatgatgataaattgagattaagtgaaaacgctttgaagcgaagatatcatgaattcaggaaatcttggatacttggaaagataatcaggtaatgagagaaaagtcagagacttactgtgacaaagcctcactgctttgtgatatgtctcaagatgaaggcaggctacgtcctgggaaacattttgttatcagacatgctgctgttaacacaatgtatatggaaagtttggtgtgaatgcagtagatttaagttttgctagtgtactttttccatgctaattgaaaatggtcatgttccaacatgatttcaccgcttcgttgtttctctcccatccttcttttagttggctgattgcaattctggcccaactcaaccctctctttggaccgcaattgaaaaatgaaaccatctggtatctgaagtatcattggccttgaggaagaagacatgctctacagtgctcagtctttgaggtgactatgcttgtgacctttcttatcagtatggtcaggcagtcagagtttgccttgactttttctcacattttatggccattttaacacgtggcaagggcaagctgctgaatgcaaacacgatctgaagagcagaaataaaattggaacttaagccttagcttacctaaatctcattaagattctttttagattctgctatcaccctgcctttttaaataaatacagtttaatttacaaaattaagcttgcatgcactctttcagacgcagatcaaaaaagtaactgtttatacttggcattgtgagatccagcaactttaaaaagtggctggcagatttaaaattgagcaggtttctttccagcagtagtcagccatccggacagaaccgttcctgtgatggtgttacactgctgggagaggaatgtcttgtcttcatccggttgcctgcgccactgttctggtggcgtctggcactggtgcaagacagagctgtgcttccccgagagtgtgctaagcattcactttggctgcttagttctagtctgggagcagacagagaaaacaaaattaaggtttttgaatgctttggatggagaaaggtgcctgcgtccgtttgttttgtgttgctataaaggaatacatgagactgggtaatttatatttggctcgcagttctgcaggctgtataaacatgacacccgyatctgtttggcttctggtgaggcctcaggaggtttttacttatggcagaaagcaaaaggggggcagccgtgtcatatggccagagagggagcaagagagagagaaggaggtgccaggctcctttaaacaagcagctcttgtgtgcactaacaactacttcactcgttactatggggaggtatattagcccattttcacgctgctgataaagacatacccaagactgggtaatttataaagaaagagaggtttaatggactcacagttcctcgtggctggggaggcctcacaataatggcggaggatgaaaggcagttcttacatggtagcagcaagagagaatcagaaccaagcaaaaggggtctccccttataaaaccatcagatctcgtgagacttattcactaccatgagaacagtatgggggaactgcccccatgattcagttatctcccaccaggtccctcccacaacacgtggaaattatggaagctacaattcaagatgagatttgggtggggacacagccaaaccatatcaggagggtaccaagccattcatgaggaatccacccccatgacccaaacacctcccaccaggccccacctccatcattggggatcacatttcaacatgagatttggaggggacatataatccaagccatatcagtgccttttgaaaatcagtctttggtcgtgcgcggtggctcacgcctgtaatcccagcactttgggaggctgaggcaggtggatcacgaggtcacgagatcgagaccacggtgaaacccatctctactaaaaatacaaaaaattagctgggcacagtggtgggcgcatgtagtcccagctactcgggaggctgaggcaggagaatggcttgaacccaggaggcagagcttgcagtgaggcgagatcgcgccactgcactccagcctgggcgacagagcaagactccgtctcagaaaaaggaaaatcagtcttaaggttgcagcttctatttgtcctgagggtcagagaggttagtagtggtatagtggaaagatttattcactggccgagagtcaggaaacctcttatttaatctgttcgttgttttcattattttgttaaatggaagttagctttaaatrccttgactagatttaggttcaagttttttggctctttaggtgttactgtaaactgtgtattgcctcccatctggagaaacaggatgtctggctctggstctcctatgtttagtaaggctgatgtgatcactgggttcaggtaatgacagcctggttccttcatttgtaaagtcctttttatcaagtgattttatccattgatgatcatagcctgaattaatcattttagttgaaatggcaaatggtgatttgctgctgctgctgttttttgtttttgtttttgtttttaattgagacagaatctcattcttgtcacctaggctggagtacagttgcacaatcacggctaactgcagtcttgacctcctgggattaagcaatcctcctgccccagcctcccaagtagctggaattacagtcatgagccaccataccctaacttttttgtttttgaaagagagtctctgtcacccagctggaatgcagtggcaccatcatggcttactgcagcctcacactcctggctcaagtgatcctcctgcctcagcctcctgagtagctgggactacaggcacacaccaccgtgcctggctaatttttaaattttgaatagagacaaggtcttactatgtggtccatgttttggctaatttttaaaattttatttattttttatagagagagagggtctctttctatggcccaggctggagtgcagtggtgtgatcatagctcactgctgccttgaattcctgggctcccgagatcgacctgtcttagcctccctaacagctgcaggcacgcagcaccacrtgtgacttttgttttgttttgtggaaatgaggtctcaccatcttgcctaagttggtctcaaactcctgggctcaagtgatcctcccactttggccttccagagtgttgtgattatggccatcagccaccgtgcctggccgcaaatgatgatttttccagttctatttttatttatttatttatttattttgagacagagtcttgctctatcacccagtctagagtgcagtggcacgatctcaactcactgcaacctctgcctcctgaattcaagtgattcttctgcctcaggctcccaagtagctgggactacaggtgtgtgctaccacacccagccaatttttggttacttttagtagagatgggttttcaccatgttggccaggctggtctcaaactcctgacctcaggtgatccacccgcctaggcctcccaaaatrctgggattataggcgtaagccaccattcccgtctgatttttcaattgtattattacctctgcatttgatgagctgaaatgcttctataaagataactttcctgccaggcacagtggctcatgcctgtaatcccactactttgggatgctgaggcaggcagatcacttgagcccaggagttcgagaccagcttgggcaatattgtgaaaccttgtctctacaaaaaatacaaaaattagccaggcaaggtggtgcacacctgtagttccagctattcaggaggttgaggtgggaggagaacttgagcctgggaggtggaagttgtagtgagccaagatcgcaccactgcactccagcctgggtgacaaagcaagactctgtctcaaaaaacaaacaaacaaaaaacttttcctcatcaacaggatgatctaatagacttgaaatatagatcatggggccgggcacggtggctcacccctctaatcccagcactttgggaggcaaggcgagtgggtcatgaggtcaggagatcgagaccatcatggctaacacggtgaaaccccttctctgctaacaatacaaaaaaaattagccaggcatggtggtgggcgcctgtagtcccagcgacttgggaagctgaggtaggagaatggcatgaacccaggaggtggagcttgcagtgagcggagattgcgccactgcattccagcctgggcgacagagcaagactccgtctcaaaaaaaaaaaaaaaaaaagaaagaaatacagatcatacaaaaatacgggaaaagcagaatacaggtttaattcttttaattttcatagtaagatgttggtggccaagttccagggtattcaatgagattttttttaaattttaaataattatattttttaccctttatatggttgtgttttgttgttgttgttttttgttgttgttgttttttgtctgtgagaacctgtttaggatggcttctatgtacttttggtgttagtttttggtagtttccttactttctggcaacatcaaaatgtccaggcccctcttctatattttctgtccgagacttagatttagctgttctttgaattggtttctgaattccccactaaaaggatgtctggtttactaacagttctcaggcccatttgactctggttctgttcagtggaaatggcatttaagaatcacgatcggagtgctaggtgcgtttgttgctgcctggggtaattaagcataattgcttctaagccttttcaatggaaagaaccaggaagtaatgtatttttcagatgaaaaataatcttaagtttacattagtattttctcttcaaatataacattacagagtttttattttattttatttttttcttttttctttttttttttttttgagacagaatctcgctctgacgccaggctggagtgcggtggcgtgatctgggctcactgcaacctctgcctcctgggttcaagcgattctcctgcctcagcctcccaagtagctgggattacaggtgtgcgccaccacgcctggctaatttttgtgtttttagtagagacggggtttcaccatgttggtcaggctggtctcgaactcttgacctcgtgatccacccacctcagcctcccaaagtgctaggattacaggtgtgagccactgtgcctggcattctttttttttttttttttttttaaagacagagtcctgctctgttgccaaggctggagtgcagtggcagtatcttggctcactgaaacctccacctcccaggttcaggtaattctgcctaaacctcctgagtagctgggactataggcacacaccaccacacccagctaatttttgtgtttttagtagagatagggtttcgccatgttggccaggctggtctcgaactcctgacctcaagtgatctgcctgtctcggcctaccaaagtgctcggattacaggtatgagccaccatgcctggcctgaaaattactgttccttaataacagtaacttttattattctacaatgtatataaaawactttttttttttttttttttttttttttggagacatggtctctgtcacccaggctggagtgcatcaccacaacctctgcctcctgggctcaagtgatcctcctacctcagccttctgattatctgggactgtagacacgtgacaccacgcctggctaattttttgtatttttggtagagactcagggtttcaccatgttgcccaggctggtctcaaactcctgagctcaagcgatccaactgccttggcctcctaaagtgctgggattacaggtgtgggcctccatgcccggcaaaatactttcaagataacaccagtataactaatagatatgagctcatcaagtgctgttttctgaggtcacttagaataacagctggtacagtggtatgtgcctataatcccagctgtttggtgcggtgaggcagaaggatctcttgagcccagagtttgagacatgcctcggcaatatatcaagacctcatctcaaataataatatttttttttttttcgagacagggtctcactgttggtcaggctagagtgcagtggtgtgatgttagctcactgcaacctccgcttcctggctcaagcaattctcccacctcagcatcctgagtagctaggactgcaggcatgtgccaccatgccttgcaaatttttaaattttgtatggagacagtgtttcgctttgttgcccaggatggtctcaaactcctgggctcaagtgatccacccactttggcctcccaaagtgatgggattacaggtgtgagccactatgtccggcctgtaattattgttattatttcccctggcagtttcgtcaccagtttgatacacaattagactaagttgtttgtgttcaatttattgtatttttttctgttttatttgctgctgttttttgaatatataaaacatctccaaagtcaaattatgaacaagatatattcagagaaatctatcctttcactgtttcatattttgtaaagattaagcaaatacatatattcattcatatgtatatacacacatacacactgctgttacagaacagatatcagctacatatactattctgtaccttgttttattcactgaacaatatatgctagagattgctgcatactggtgtatagagatgtttctcatctctttatagccattgataatccttttgggttatttctagtcttttgctattactgataaagccacagtgccatcctatgcatatgccattttctgtttttgctgatgatctttaatgtagcctccttgaaaatgcaatctctggtttaaagatatatatgatttttctagatactgttgcattgtcttccatagagattatactgttttgcattcccatcaacagtatatgagtggccgagcgtgttggctcatgcctgtaatcccagcactttgggaggctgaggcgggcggatcacgaggtcaggagatcgagaccatcctggctaacgcagtgaaaccccatctctactaaaaaaatacaaaaaaattagctgggcgtggtggcagacgcctgtagtcccagctactcgggaggctggggcaggataatggcatgaacctgggaggcggagcttgcagttagcagagattgtgccactgcgctccagcctgggtgacacagcgagactccgtctcaaaaaaaaaaaaaaaaaaaaaaaaaatagccgggcacggtggctcacgcctgtaatcccagcactttgggaggccgaggcgggtggatcacgagatcaggagatcgagaccatcctggctaacacggtgaaaccctgtctctactaaaaaaaaaaaaaaaaaaaatacaaaaaatgagcctgacatggtggcgggtgcctgtagtcccagttactccggaggctgaggcaggagaatggcgtgaacccaggaggcagagcttgcagtgagccgagatcgtgccactgcactccagcctgagtgacagaaagagactccgtctcaaaaaaaaaaaatagtgtatgagtttctgttttgccacaacctgaattttgccaatttaatttccccttaaatatatatattttatatatatgtttatacgtaygtgtgggtttttgtttttgtttttgttttaatagatgggggtctcactctgttacccaagctggtcttgatctcctggcctcaagcgatcctcccaccttggcttctcgaagtgctgggattacaggcatgagccaatgtgcctggcaataataccaattttttttaacctgcctttttcatcaagttctgttttctactctttatttcaactgtagtgagtgttaggtaaggctgttgattggggttcaaagctgagaacttcaggcctcagttggttctagttccagcattgcttttcacttaacttctctgagtttcatttccttccatgataatgagagaattgggccctttgacactaaataacactgggtgggtggatctgaagacattttatctgcttattcttttcactcttatgtctctgtcaaccggattgacagattcctcatgttttcactctggtccacagcacacactcgggctccttgaaacccttatactaaagttggttcttttaaaagcaaaatgccaggaagtaggagggcaagccgggcgatccctaattatgaacatcgtgtcatgcctattctgcatttaacagaattatagtggtatcgtaacctaagactttggagttaacacatcaagagatctaatctctgcctagcgttagaacagacagacttaagacaggctgacttcactttttggatggtaaagtcaaaggattgagttttgtttaaccttttgaattttgaacttttacctaatggtgagatgataaaggagtttagaaggtagatttgggtctgacctcacctgataaggaaaaatgtttggtttagtacatgattccttttaagaggccagatttggaaagtaggtgtaagccagacatggtattcaacagagaaaaatgaggaccagttatgaaagctttagaataattttatatagatgaaatggaatcaatccaaagaacacaccgttaaatacatagccgatcttttgctgctttaatcaaggtaactgtcatgatttctttcctgaattgaagaaccgaaccacagcctgatgagaggctgagttacagcacgttatgtttattggctgcaaataaacgtgtccagtactcctaagagcagtgctcactccatccttggctttgccagcctcgtctgcttcccttagattcctgagtgtgacttcctaagatgtatgtgggactctaatgtcaaggttgctgtttttgttgatgttcactttcctacagccttgtggggtgtgctgctaccatggaatctccttggaggggtggcttcggcttcagatccagcatcctggaagttacttggtttagcaaggcattgttgcctggtagatgatctgatatggttgaccacagtctgaaggcatagaaatgctgttttattataaagtccgggccaggaaagaaatagaggatattgataattaggcctctgccctgtgggagctgtttttctatgcattcctaaaatacttgagtgcttgtgaggtgtatagtactgaagtagggsaagactgggctccaaaggggtttgtgatctgttggggtgttgaattaagccatacttgggagaagttcaatagtgcaaggtgtcgtgtggttaaaaagtaaatcttttactccgagtactctggctgggtattctgctgccatttcaggttcagccatgtctccatttcagttcccaatatcatagttttccttgtcagggtcagaacctgtcgcgtcacttttttctcctcttcctcaaatccatttgctctcattatgtctcttgtgtccgcctttcctttccattcctccttcaggcaccctgatttctgccccaacttactacagctctgaattatggcaggtgctcctcatctggtctccctggctctaccgtcatctatctacagaataccaccctgtttatcttcctggtgtagcacttcctgaaatagatcagcttgcctcagaaactgtcagtagttctctggggcctgcagcaggattttttgttttgttttgttttgcttttctgttttgttttgtttaacctaaggtctctgattgtagagagtacatgccccttgaaatgcgatataaaatgttataagcacacaacttttgccgggtcaccagcggtcccatgagccacaacagataagaacggctaacctgcaggtcatgtccagctctgacttgactgtcaaggccttccctccccartctgccttccttctcactactttcccctccaggccctagtggtgtgggcccttgttcttgacctcattagctttacttggtttttcctgactctcactaccctattacattcattaatttagaaaacaacttagtaaatacactctcccgtgaaaattccttctgctttcttgcctcagttcacccattctctcttaattctttctgatgctttctctttcagtgcccagctggcaaatcctagcacttccttccttggctactttgtttcaaagtgatttcttttctttctgaacatatttagctctccagtttttgccattcatttggtacattgccttgaattgttaaatacatgcttaactccttgtatttaatctcctacmatatatagccttacatatcatagtaaagaaggaattattttgcaaatttatctaaaatttttaaacagataaaaattaagcctaatatatcgtttaagaagaatattcacttacttttccccgaacagatttcttggttctagacttaatatttttatgttatcttcattgtcagttttttgtttttttttttttttttgaaacagagtctcactctgttgcccaggctggagtacagtggcatgatcttggcttactgcaaactccgcctcctgggttcaagtgattctcgtgcctcagcctcccgagtagctgggattacaggaatgtgccaccatacccggctaatttttgtatttttagtagagacggggtttcaccatgtttgccaggctggtcttgaactcctgatctcaggtgatccgccccgcctcccagagtgctgagattacaggtgtgagccactgcacctggcccattggcaggtttttgtttgtttgtttgtttgagatggaatctygctctgtcacccagactggagtgcagtggcgcaatcttggctcattgcaacattgacctcccaggttcaagtgattctcctgcctcagcctcccgtatagctgggactacaggcatgcaccaccatgcttggctaatttttgatttatttatttatttatttatttatttatttatttatttatttgagacggagtcttgctctgtcgcccagactggagtgcagtggtgcgatctccgctcaccgcaatctctgcctcccgggttcatgccattctcctgcctcaggctcccaagtagctgggactacaggtgcccgccaccatacctggctaattttttgtatttttatttgagacggggtttcactgtgttagccaggatggtctcgatctcctgacctcatgatctgcccgcctcggcttcccaaagtgctgggattacaggcgtgagccaccgtgcccggcctaatttttgtattttttttttagtagagatggggtacatcatgttgtccaggctgttctcgaactcctgacctcaagtgatccacccaccatggcctcccaaagtactgggattacaggcatgagccaccgcatccgaccctttgtcagttttatctgatggtaaccttatgactctttttttttttttttttgagacgtgcaaaatgagaacatggaccctttgattaagttcttcagccccacccccagtcagctatttcttatcaaagatgataagaatacaggcttcctggccaggcgaggtggctcacgcctgtaatcccagcactttgggaggccaaggcgcgcggatcacgaggtcaggagattgagaccaccctggctaacacaatgaaactccgtctctactaaaaaatacaaaaaattagccaggtatagtggcgggcgcctgtagtcccagctactcgggaggctgaggcaggagaatagcgtgaacctgggaggcagggcttgcagtgagtggagatcgcgccactgcactccatccagcctgggcgagagagcgagactctgcctcaaaaaaaaaaaaaaaagcttccttaatttactccaaaatcagccgggtgcagtggctcacacctgtaatcccagcgctttgggaggctgaggtgggcagattgctcaagcccagaattttgagaccagcctgggtaacatggtgaaaccccatctcaacaacaacaacaaaaaatacaaaaatcagccaggtatggtggcacacgcctgtagtcctagctacttgggaggctgagatggaaggaacttgagcccaggaggtggtggttgcagtgagcggtgatggtgccactgcatttactccagcctggatgacagagcaagaccctgtctcaagaataaataaataaataaaaataaaaatttattccaaaatcaaaccgcatgcctttgccatgtaacataatgcacatttacttttattttattttatttatttatttatttatttatttatttatttatttatttatttatttattttgagatggggtcttgctctgtcacccaggctggagtccaatggtgtgatctcagctcactgcaacctccgcctcctgggttcaagccattctccttgccttagcctcccaggtagctgggactacaggcatgcaccactacagctggctaatttttttgtatttttagtagagatggggttttaccatgctggccaggctgatctcgaactcctgacctcaagtgatccacctgcctcggcctcccaaagtgctgggattacagacgtgagccactgtgcccggcctacatttattttaaactggtatcattgatcttgagtgaaaactatcccccatttgtatatggtttttcaaaagtgaaggcttatttttcccttttttgattgtttctttgtcacaaaatgcctgtactatgaagaagtctaatcagtgtgctcttcatggaaaattaacagacaaaccatatgtattcactacttcagtattctcagataaaatttattttattggctgggtgtgatggctcatgcctgtaatcccagaactttgggaagccaaggcaagaggaaacctgagcccaggagtttgagaccagcctgggcaatatagcaagaccccatttctatgaaaaatttaaaaattagctgggcatgatggcgtgggcctatagtcccagctacttgggaggctgaggcaggaagattgcttgagtccagaaggtcgaggctgcagtgagctgtgtttgtggccactacactccagggcaggtgagagagcgagactgtctgaaaaaaatattatttattgattagagacagggtcaggctctgtcacctaggctggggtgcagaatggcatgatcatagctcactgtaacctcaaactcctgagctctagtgatcctcccacctcagcttctggagtagctgggactactggtgtgtgtcatcgtgctgtagagagtctcgctatgttgcccaggctggcctcaggtgatcttcccgccttggcgtcccaaagtgctgggattacaggtgtgagccaccacgcctggcctaaatttataatctgcctggtactgatacttgtacaaagaggctgttctgctggcctaaggaagagaacagaaaattatccctagattaagtgaaagatattatgaggctttcacactactacaagaaacaagtagctctggtaattaccactccttggcctgatgttgttttcctagtacattgtaaatatagtctgtttagggcatgatggctcatgcctgtaatcccagcactttgggaggcgaggatgggcasaacgcttgagcccaggagttagagcccaacctgggcagcatggtgaaaccctgtctctacaaaaaaatataaaaattagccgaatgtgttggcgtgcacctgtagttccagctacttgggaggctgagatgggaggatcatttgggctcaggagattgagactgcagtgagccgagatcacgccactgcactccagcctggatggcagagcaagaccctgtgtccgaaaaaaacaaaaataaaacaaaacaaaaaaaaagatggtgttgaatttaagctgctagaaaaagaaaagtgtcatttgtcacctacactcgagatagccagaacggggagcaagctacagggcagcctccagtacaagaccaatgcaaggagcccgctccccaggagcctggccccagagcagagttcgccatgcctgcggaacctcccctccatgctataagagggaagggaaaaatacagactcttgaaactgcggtgaattcattagattccagcacaatcaatctcagtcagcttcattcttcctgctttctgtaacatagagtgttacttgtgctcctcatttcagcagtgtccttggttactggaccttttgccacagccctgcaaaayctggccaaacttgcaccaagttgattatcctgtgtttcatattttgttgagcatctgtgcattttaaagtgttggcttggttaactttctcgatgttaactttttgccttcctgaggaatgtatgaggaccagttaccagaatggttttgttttgcaggtcacgagaagagaatgccttctagatgcaaaatcacctccaaaccagaccacttttcttgacttgcctgttttggccattagctgccttaaacgttaacagcacatttgaatgccttattctacaatgcagcgtgttttcctttgccttttttgcactttggtgaattacgtgcctccataacctgaactgtgccgactccacaaaackattrtgtactcttctgagatagaagatgctgttcttctgagagatacgttactctctccttggaatctgtggatttgaagatggctcctgccttctcacgtgggaatcagtgaagtgtttagaaactgctgcaagacaaacaagackccagwggggtggtcagtaggagagcacgttcagagggaagagccatctcaacagaatcrcaccaaactatactttcrggatgaatttyttcttyctgccatcttttggaataaatattttcctcchttctatsbaaatctgggctcggtgtttgtaaagttcatttttataagcttttctatcgctacataatgcctttttaaaaaatgattttgtagtctaaacttaggttgagtatataaaccctgccatgtagcttgagatgcctgaaaagactggtaagtgcgtttcttaatcgttcagtaactatttgagtgcctactgcagccaaggcactggagggatcaaagatgtgtaaatttggagtccctgcaagttcacaagctatttggagagataaggttagtatacatagaactgtaatataaggttgtgttggagcattgtccttaaagatggtaccatggtgagcagttcaaggttacctgccagctgcagaacaaggcagcaaatgctcctgagatggaaccatcacagcctcagacataggactaaagaagtcaagagtgattaaaaagccaggggcaggagacagtaattttgtatttcagtagcaggcatctcgatacactaatttgagagctttattacttttaagaaattaaaaattaaaatgaacctaaattttcaccagctcatggctttttgacagccagccaagaatggatttcctgttttgcagtttctactttctattcctcccaaactgtctgaactcattactttgctattcttatgaccaaagtgagtttcaagttgaagtgactctcctgctctcgtttcttttcattctttacttttgttttgcgcagtctgttaggcaactccatgctttacgtttccagcaggagggccacattagctaatttcatggaatacatgaaacattgatgatttgaagttgaagggggctatggtgatataggctaaccccatcattttatggataaggaagctgagcccagacagggagaatttctcgcccagcttaatgcagttggtcagagctagacaggggagtaagatccatgttttctttctttttttcttgagacagagtctcactctgtcgcccaggctggagtgcagtggtgcgatctcagctcactgcaacctctgcctcccgggttcaagcaattctcctgcctcagcctcctgagtagctgagattacaggcacctgccaccgcgcccgactaatttttgtatttttagtagagacagggtttcaccatgttggtcaggctggtctcctgacctcgtgatccgcccaccttggtctccgaaagtgctgggattacaggtgtgagccaccgcgccctgccatcatactattgttgaaatgtgggaatgacgaaatcagctcaggttttatgagaggaaactcggtaaattccctttgctcaggaagtcacttcacccttgagccctagttgtttcatttattaaattcttgagaaggttcagtgccattaatacctaaacccaggcacatgttctctcgtcacctcacccttaatagcagaactgtttgttaacaacatgattaggcatcggagatggatgttggtgaatcatattttcctgaccgttgccacactccatccagtgtttgtcagggcccagactggaaggacctccatttagcccgttcagaggataccgaaaatgttcctgcgctccagagcccttccaggcgaacgtcatgtggcctcctgggacaatcactagattagcagaggtcctaggtttgccatcttactcccatcactcgctagctgtgtaacggggcaaatcatttaatttctgactctcagtgttttcatctgtaaaatagggataatgcataccttttctactatacgaagttgttaccaaatgagattttggcggggaaggtgatttgtgaattataataatacatcaagagtattttccaaataaatgaccaaatccccagggtacactgacagtacttttctattcagataggacccagagggacagccaagtgattttttttttctacgtagggttacactttgggttctttgtgttttgttttgtttgagacagagtttcgctcttgttgcccaggctggagtgcaatggcacgatctcagctcactgcagcctccacctcccaggttcaagcagttctgcctcagcctcccaagtagctgggattacagtaggctgcctccacgcctggctaattttttgtatttttggtagagacggggtttcaccatgttggtcagggtggtcttgaactcctgacctcaggtgatccgcccaccctcgacctcccaaagtgctgggattacaggcgtgagccactgtgcctggcctatggttacacttttgattagtcatttgtacttggaggtagaggtttacagaaaaataaaaggcacccttattaggcccccaggcctgagttcagagccagagcctaagtggctggaccacacccttcctgcccttccaggttctaccaactcttataccaggatagaagtatttctggcatgattttgaagatgaagtgtgaggattgattggtttcttttagcactgtttttgttgttttctttaaacatataatgatgtctagacgtgtgtcactaccccaacttaataatattttatctttcctttgatgttgcttcaaaagtagcaccttcttgtttagcctttttttttttttttaagcaacggtaggtgtttggtcatgctgaagtaaatttagaatttgagaaatgatttaaaattgttgccaagaatcatgaaaaatttggcaagagtcaattgctcctttattaacataaattatgtttaaaaatatatgtctacacattttagaacagtttcatactccatcctctatgcaaaaattctttttggtttgggagaatatatgtgtttaaaatggagagggaggccaggcgcgatggctcacacctataatcccagcactttgggaggccaaggcaggcagatcacctgaggttgggagttcaagaccagcctggccaacatggtgaaaccccatctctactaaaaatacaaaaattggccgggcacggtggctcatgcctgtaatcccagcactttgggaggccaaggagggcagatcatctgaggtcaggagtttgagaccagcctgagcaacatggagaaaccccgtctctactaaaaatacaaaattagccgggcgtggtggcacatgcctgtagacccagctactcaggaggctgaggcaggagaatcgcttgaacccaggaggcagaggttgcagtgagccgaaatggtgtcattgcactccagcctgagcaacaagagtgaaactctgtctcaaaaaaaaaaaaaaaaaaagcccactatggtggcgggtgcccgtaatcccagctactagggaggctgaggcaggagaatcactcaaacctggaaggcggaggctgcagtgagccaagactgcaccgctgcactccagtctgggcaacacagtgagactccatctcacaaacaacaacaacaaaatggagatggagactaaagcaaatgttatgtgttacttttcccctggcccttttatttcaactttctctcaagagttgagtggatgaaatcaattgcagaaaattcataattttcaaaggaaagcgcaacataaaacattgtaaataatacctatctcagtacagttgactagaaataacctaatgccgacgtaaggagctgtttaaatcatgttgctgcatccaaatgaagtaaaatcaattttgttttcaaaatacatgcctagaaaagagacagaaaagagaacaaaattactagcgttgcttgcctctagatggtaattacaagtcatcttatttttctttttccttttcagcattttttccaatgaaaatgtaatagtgtagtaaaaagaaacaatggaagttaatttaatagcaaaagataatggccagaatattatgttacaagaaaaaaaataaaacaggattttaaacagctatacatagaaaaaagcctggtaggaaacagaccaagatgtcaaaagtgattatttcttttacaatattgtgtcttccaacttttccataaacagcatgtattacttttataatcagaaaaaaaaaaagatatttttgagggcatcattgtcagaagtgttagtacttccttcaaatataatttagtgcacacacacactttttaaaaaagttattcagggtcaggggaaatgcagtcagctagatttattaaaacattgaagctattatgaatcaatgaaaatcagtgagctcacacagaaattgtgattgttttcattgtgcaggacagagcactgatcattccgtgtataaaactctaacctccttttgtataggtgctcacagtgacagcatggggaaatgaaaagggagcattgattttgattcttcccacatagaaaagtggaagcctagggtattaatgctctggggtcccacaccgcttagaaaaagccccactgttcttctatgcccagctgctccaagcaaagctttctttcaggctgtccctgcttcagttagactcccatctcaatgaaatgtattggccctcttttcccaaatcccgctgcccccaagccagctccaaaagaaggggatattccagtagctgaggatgctcagcagctaatactgccgcccccatgaatccaatcaagattccatttcagtttctgtcaggatgttgacatggtttccatggtttctttacaccgtccacagtgtggtactactgtgggttgccactccaaaacagaacaagcagagtagatattttgtcaaagtaagcctgtatttgaggaagggtgagttaagaagctaagtgtgactttgtccaagctgcagatgcttttcaacaacaggttgaaaaagtagttcagccagattcaaccaggttgcacaggtattttcagctcctgttttttgtcctgatgttagctgcttgagcaaaaagactcagcaacctgacctcctgcagcctagagtttagcagggaagagaattaaacagtaataatgaatggttatttatgctacaccagtgcttctcaaatggtaacgtccagattgcctggggattgtgttttaacagattctgattaaatcaagatgggagcaatgattctgtatttccaacaagctcccaggtgctgctggtgcttctggtgggtggaccccatggaagcaaggtgctgtgtcttagggaagtaccggttgctaggtaagaataagcactagaaacattaaactggtggtgggaggaaaggttattgtaggaaatgacctttaagggtaaaccccaaggatgagtaagagcttagcagagaggatcgggcacagtggctcacacctgtaatcccagcacttttggaaggccgagacgggaggatcacctgaggtcaggagtttgagaccagcttggccaatatggccaaaccccgtctctactaaaaatgcaaaaattagccagccatggtggtatgcacccgtaatcccagctactcgggaggctgaggtaggagaatcgcttgtatctgggagacagaggttgtagtgagccgagatcatgccattgcactctagcctggaggacagagtgagactccatctcaaaaaaatttttaaaaaattaaaaaagagtttagcagagaggagtgtctgcggtatttccagtagacctgtgaaattgttgcaggagtccaggagagataagtgtcctggagtgtggtaatggaaatgaattaggagaaggagctacaatggggccataattattagttaatacacataaacttccgttgagtgattagttatgtgggggcagtaagggacagggaggagctgagaattacaccaggttctgactgagtgatggagccctttactaggatggaggcacaggggatacaacaaacttgttatagcctgatgggttcttcttgcctgctgcccagaaatgccaatgcactgagaacagccgaagtgttgcagcagagaaataattttttttttttttttgagatggagactcgctctgtcgcccaggctggagtgcagtggtgcaagctccgctcactgcaagctctgcctcct

SEQ ID NO: 96065 - DNA, 17799 bp, Homo sapiens
  misc_feature (1)...(17799): n = A,T,C or G
agacaataactaatgttggcaaggatgtggtgaaatcagaactttcatacactgcagttaagaatgtaaaatagtggctgggcgcggtggctcacgcctgtaatcccagcactttgggaggccgaggcgggcggatcacaaggtcaggagatcgaggccatcttggctaacacggtgaaaccccgtctctactaaaaatacaaaaaattagccgggcgcggtggcgggtgcctgtagtcccagctactcgggaggctgaggcaggagaatggcgtgaacctgggaggcggagcttgcagtgagccgagattgcgccactgcaatccggcctgggctaaacagcgggactccgtctcaaaaaaaaaaaaaaaaaaaaaaaaaaaagaatgtaaaatagtgcagtcactgtgggtgcagcgcaccagcatggcacatgtatacatatgtaactaacctgtacattgtgcacatgtaccctaaaacttaaagtataataataataaattaaaaaaaaatagtgcagtcactttgaaaatcagcctggcagttcctcaaaatgttaaatatagagttagcatatgacccagcaatttcactcctaggtatatacccaagagaaataaaatcatacgtccatggccaggcgtggcagctcatgcctgtaatcccagcactttgggaggctgaagcaggtgaatcatgaggtcaggaattcaagaccagcctggccaatgtgatgaaaccccatctctactaaaaatacaaaaattagtcaggcgtggtggcgcacgcctgtaatcccagctacttgggaggatgaagcaggagaattgcttgaactcgggaggtggaggttgcggtgagccgagatcatgccactgcactccagcctgggtgacagagcaagactgcatctcaaaaaaaaaaaaaaattaaaatagtatgtccaaaaacttgcacatgaatgttcatagtagcattattcataatagccaaaaaatggaagcaacccaaacgtccaccagctgatgaatggaaaagcaaaatgtggtatatccatacaatggaatcttatccagtcataaaaaggaatgaagtacaaatagatgctgctacaacacagatgaaccttggaaacattatgctaaatgaaaagtgccaatcacaaaagaccacacattgtacaattctctagatatgaaatgtatagaatatgcaactctatagccaggcctggtggcaggcatctgtagtcccggctacgcagaaggctgaggcaggagaatggtgtgaacccgggaggcggagcttgcagtgagccaagattgcgccacygcactccagcctgggcaacagagcgagacttcgtctcaaaacaaaacaaaacaaaacaaaacaaaagaatatgcaactctatggagacataaagtagattagtggtttataggggatgggggagagaggaaggcagaatgacttacaggatttctttttgggatgatgaaaatgttctggaattagatagtggtgacggttgcacaactatggatatactaaaaaacattgaactgtatactttaaatggatgcattgtatggtatgtgaattgtatcttaaaagttctgtttccaaaaaaaaagtcagatggggctgtacttatctgaaggcttgactggggcttaagggtctgcttccaagtggctcactcacaagaatgttaacagaaagcctcagttcctccctcaccacatgggcatcttcatagggctgcttgaatgtcctttttgttttttgttttgttttgtttttcttttgtcttgtttttgaggcagtgagatcctgcaactctgttgcagttggagtgcagtggtacaatcatggttcactgcagctttcacctccagagcacaagcgatcctcccacctcagcctcccaaatagctagaccacaggtgtgtgccactatacccagctaattgtttttgtttttgtttgtttgtttgttttttgagacagggtcttgccatgttggtcagcctggtttcaaactcctggcctcaagcaatcctcctgcctcagcctcccaaagtgttgggattacaggggtgagctaccacacctggtcctgcttaaatgtctttgtgacatgtcagctggcttccacagagtgagtcatccaggaagaagagcaagaagtcaggcacaatgccttttatgacttagtctcagaagttacctcacttccatcacattttatttgttagaagcaagtcactaagtgtagctcatactcaaggtaggggaattaggctccaccatttgaaaggaggagtatcaaagaatttctgcacatcttcttaaaccaccacagcttctaatgttgttctgtgacctagaatgatttctgtagtgtccctgactccccatctctctctgtctcttttattctagtttaataagctattgaattgaataatgtgtttcttcccatctactgagatgtttagttttagacacaagttgtgtctcattctttattccctcatacttagggctgggtttcattgatggcaggtatgctaggggctgaactacctggaaatgttacaggcatggtcctatagccatagatttgtactccataaccctaggatctcctggaagaagactgccttctgggcttcctccccagatgccagactctgtctgtctcactgggtttcctctcctggtctgcagtgggggctgccccagccaaatgggtgcgtacgttcccagatgtggcagcagtctcctaacaacctccagccagagcaccatcaggatctgcaaagcagaggccactgtcttcctgggaagtctgccagccaatgtctgggcacagctgggacactagggcttggccatttctgcccaattgggactcttctacaggcagtctttgcaccagagctccctgttggctggctgagactttttcagagtggcacttcaacatgaggctcttctcaaccaaccctccttcccctctcttcccatagatgtcagatctgaaacacagtcggaaggctttccctgcccagtcctgcttcttccccctttatctttcataggcatttcctctgatgaatctcttggacttctaactctaggttggcagcagtttcctagaggacccagctgacaccctggccctggcccttttctgtggctgccagatcccagttccctggggcatgagttccctctccacccctcctgaccgctctattccctcttccttcctctctttcgcaggctgtgtccacagtctcaacctgtgcctggcacatagtagattcagtaactacttgtttttgaatggacacagaatactctggagctaggcactgccccccccattctcctggcatagagagccacagagaggcccctgggtaaggctgggagtgccagctccatgggccagaaggaaggcacccttcaggcgactggggaaggaaggcctgaggctaggaggctgtgggagagccaagagactcccagatcccagggaggccttcctcacatgccaggggaagtcgaagctggcttctctctggatctgctgggtgagcaagtcactccttttcttgggccttactccatacctctatgggactatgggatgagaagccccaccctgcctgtctccctagggagaggcaggggtagtgagcttcaggtgaagtcatgtctgggaaaacatgaatgggaaagggcagggcacacggggtttgggggtttgtgtatggggaaggatggtgagagacagggatagacgatcacacagggaagaaggagaggccctgcccctccttctctcatgaacccccacccctactccccactggcacccactatgcaccctgcctcacccagacaggtggagggccagagaaaagcctcagaccctcttccgtctgcaggacccaggccttcctgtctcgctggtttggcccctctgctccagggcctctgagggacaccctggtggaaggcaggactctgagcctgtcttgtggctgactgacttgtttttgggtggagtctggacagaaagctcagtgacaccctccctcgaggcctgggcaagccccagcctgatgttctttgagacccagactggaaaagacctcaaagttcaactccactgtacttctcactgtacagtgggggaaactgagtcccagaaagggacagggacaagcctggagtgacccaggcaggtagtgtcctggccactgttcccacagttgccatctagcccgagctctcagatatcacagatgctgtggccccaaaatcttgggacttgctttctcctgagtaaactgcttcctggccaggggtatcctgaggctttagtgatggtgttttgggtgccaggaactgtgctgggaatcttacccaacatcctgtggagtgactactgtgattatgcccatgatacagatgaggaaactaagactcagagaagttaagatttccaagcctagggtctgtgtggaaacctaagctggacctgtctgacctcgaaagcttggctcctcgtatcctacctcccagcctccccaggtgatgggcagggaagggctcagcaatgtggaaaagggggcagaggtgggtggcagttcctatgatgggaggaagtctcagcatgatgatttttcaaacatcacaactcttcacagaaggactcacctttgttcagctacatccttgcccttggggaccccaggtctacctcctctgccaccactcgctgtattccacaccccctttctcaacctctggcaagaaggcgcttggtccctggactagccctaccctctttcccttctcttcattgttcccagctatgatgctttgagccacaggcccaggctggttctgaagctacagagatggacctgcccaccctgcagcccccttccccctctgccacacagtgagctctccttccccagctctgcccctggctttacctcactggggctcatcccctggaagagactcagatggagcctggggcagggggaggctggagaagcagcaggctaatgggcagatggaagacagacaagtcactgtcctggccagccctgactcccatccagatccccaagcgctgcattcccatcctctaagccctccccagctggagcctgtcacctgaggttttcccaccctcactgagcctcagtttcttcatctgcactatgggtgtaagcaccctggcctcactagatggttggaagctgggctttgggatccaggaacaatacctgggtatagccccttcctgatggagagattcctgtctcatgaggcacacatgatgcctgctgtgtccccccaggtggccagggatggaggtggccacagacatacaccctgggccactctctgccactctagggaccatagttccttcaaatccagagcatcagccctgccctgtgtggctctcaaggcctgttcccgctgcgtctcccccagttatcagaccaggagggttgctgcaaggccaggcccatgcttggagtcctaggaagcggggagccctggggctctgtcccctgagtatgccgagagcctttctaagaaccaggacttggcaggggagcaccccaggtggcactccctttcccagaagccttgggaactcccagggtggtagcttcagagccccagcccttccttcacccagccctggcagaggcccatggccccctgccagcctgatggaggtggatgtggcagccaccrctgtggtaagggtgagaagggtgggttctaagggactcctccaagctcctgaacccttttccttcccttcaaggagatgtgaaagccccagcctggtccccatcccacagcttagggctttggctcccatagtcccaatctaggcagggctggcagcaggtgactggatggtgctgagaaggcaggcagaatgggggcgtgggccctggcaagtgcactcctcagccaatcagcgtcctgcccggctggtggattyggttacaagcccaagatcaccccatactccagcctctttcctcctcctcccgcagctccattcattggtcccgccgcaccgggcctgctgggctccgcttccgttccactgctcagctgccgcctggtggggccaccaagggcaggcatcccaggggctttgtctgactggactgggccagtgcagaatgggggttcaggcagggctgtttgggatgctgggcttcctgggggtggccctggggggctcccctgccctccgctggtacaggacctcctgccacttgaccaaggcsgtccctggcaacccactggggtacctgagcttcctggccaaggatgctcagggactggccctgatccatgcccgctgggatgcgcataggaggctgcagncatgtagctgggaggatgagccggagctcaccgcagcctacggtgctctctgtgctcatgagactgcctggggctccttcatccacacccccggacccgagctgcagagagcactggccactcttcagagtcagtggsaggcatgccgagcgcttgaggagagtccagcaggggccaggaagaagcgagcagcagggcagagtggagtccctggtggagggcaccagcgagagaagagaggatggaccatgcctggcacastgtggtgtggagttggagattctgctgggaactcctcggagctgggtgagccatgaggggtgtgtgggctggggggtccgatcggggaagcaaggtttcttcagccccagcccttactctcctaggctgtgtgtccctgggggagtgacttgaccatggtgaacctcaatttccttatctgtaaagtgggggcaatcacgaatctcatcatggggtgcttaaatgaggtcacggttggggaaagtcttattcaaacctgggagtcctcattaaatgccatccgagggactgggcaggctgggggaggatccagggtcaactgagccaaaaagccattacccaggaggaggctttgtgggcacggggtgcccagtggaatggatgctgagacgaaaggcctgggttcaaatcccaactcagcacatacaagctgagcaagtcacttcccctctctggacttatttcctcacctgtaaaatgaaggtgatacctccctttcagggctggctgtgaacctggatgtgggaagtgccaggcatgtgggaaatgcttagtaaagagtgctattttttagatggtaataaacatagatgaatttcttgcactatcagtacagatgtctgtgcgtttgtgtgcagggttgggggagggcttggcacctgagtcagagtaggttggcatcctggcgacacctccttgtgccagtgagaaaggttgcaccctgcctgtttgccattccatcatacacacattcataattttggagttttatttggggcgtgggcttgggaactctggaggcagactccaattcccctgaggaagacctttccatgtatttatgggtgggctacctggcatttagagttgcccaacagaggctgcagcttggcttctcttttccagctttgaaactctgagagtcccacagaagggagagtgactggtctgaggaccctcatggcgtttgtgtcagggctggggtgagaaccaggtctctgccctcttcctaccaggggggcatagctggtgcatgatgcctaggaccctgctgagttggtgccctctcccctcccctccctgcaggggtcttccagggacctgatctctgttgccgggaacatgaccgctgcccacagaacatctcacccttgcagtacaactatggcatccgaaactaccgattccacaccatctcccactgtgactgtgacaccaggttggtggcaggcagcgagggcccagagctcagggacagggcagagttacccagttcctgggtaactagacattgggattgcagaggatcttaaagctcagccagcttggaccccacagtgcaggtaggaaagctgaggccagaaagaagggatgcttggaccccaaaccacccagctggtagtggcacagtgggctgtgggaggagccagacagccctccatgccccagggtcctgggtatctgttctggggcaggtttcagcaatgcctacagaatcagcacgactccatctcggacatcgtgggcgtggccttcttcaacgtgctggagatcccctgctttgtgctggaggagcaggaggcgtgtgtggygtggtactggtggggcgggtaygtggccaccccctcatgtccctttccagacagagagggagcccaggctccaagcctggtgagggagagctatctgtctgtctgtcttccagggaatgatgtcccatcctgcatgtcctctcctgagggccygggatgcagaccctccttgggtgtcccccacaacccagcgggatgggggatgggactggcagagcattgatctccatggagacgaccctgggggcttctggaagggggattcccagtcaccaatttccaccaactgccaccacccaggtgtaggatgtayggcacagtgcccctcgctcgcctgcagcccaggaccttctacaatgcctcctggagctcccgggccacctccccaactcccagctcccggagcccagcccctcccaagcctcgacagaagcagyaccttcggaaggggccaccacatcagaaagggtccaagcgccccagsaaagccaacaccacagccctccaggaccctatggtctctcccaggcttgatgtggcccccacaggcctccagggcccacagggtggcctaaaacctcagggtgagctcagaacctaaccttgggggttcctgacatgagggggtgtccctgcttctgtttaggggtggccatgtgttgcctcttttcctgcaccagtttcctcctgggatttcccaacctctcccatgaaatcacactgcagcacaggattttcataatccacgaatttgaccacatcaggccccactgtgcacccaccaccactcctctttatctcagccaatgatgtcccaacacccagaggccctcaagccttggccctgcagaccctacccccagtcaaaactctagtttcacaaacttcacttggttcctcaaaagcgccaggctctctcctaccgtgaggcctttgcacatgctgttcctcctctccttgtcttctctcccaccctcagtttagcagcctatgcctcctggaagcctttcttgactaccgtcagtactctgggtgtcccccatagcagtactacygtgtttggcggcttgggggtagggaggcactgccacaagggcggcacactgagggcacaaagactcagaaggcatgaaatggagggartctgtgtgtgtgactgagcacacgtgctggtgtttctcccggatggcrcaggcattggtggggcctccctggtggattgggctcccatcaacaccacatccacccctcaggtgcccgctgggtctgccgcagcttccgccgccacctggaccagtgtgagcaccagattgggccccrggaaatcgagttccagctgctcaacagcgcccaagagcccctcttccactgcaactgcacgcgccggtgaggcccctttgaaccctcgcggggtgggctgcctgctgccaggcatgggaaggggcccctggctggcaaggccctgccccggcctgagcctgcctctgttctcagtctggcacgcttcctgaggctccacagcccacccgaggttaccaacatgctttgggagctgctgggcacaacctgcttcaagctggcccctccactggactgtgtggaaggcaaaaagtaagtgatgtcagagccaggagggatggggggttttctcaaagggtgggttgcctatacncactttgaatgcttgggccaaggggtaggggaagggatcsggagacctctgagctcctatccatagcctcatccctctaccccctgctgccccaggtccagctctgcagttggcctctatgggtcgcatcttggctttgtcatttgattcccacatgaccttggcaactggttcacctttccaagtttccatgtctttgtctgtaaaatggtcgtaggaaccaaggaaacggcaggatgcacataggtcatgccccgcctggcacacagcaaaatgtgtacttaactcactcctaatccacaatctcatttggtcttgaacttctggactcragcgatcctcccacctcggcytcctaaagtgctgggattacaggcgtgagccactgtgctctgctttcatctggattccgattctcaaagccagctccttcttaactttcccatttcatagatgaggctgaggcttctggctcaggtttccacagccagctagtggcagaacccaggcctccaggtaccagcccggtttattataccctttctccgtgaaacccacccctctctgccttgctggtgactgtggccccagccccctctctctctgggcctcagcccactgtctgcagagtaaggtgggatccttgtcagccctgatcatctgccccactcttctctccttacagctgttccagagaccctagggccatcagggtgtcagcccggcacttgcggaggcttcagcagaggcgacaccagctccaggataaaggcacagatgagaggcagccatggccttcagagcccctgagaggccccatgtcattctacaaccagtgcctgcagctaacccaggcagccaggagacccgacaggcagcagaagtcctggagccagtgacctcagtttcagctttcctgggcaccagcctggaccttgcccatggctatgccaagccttgrgaatctcagcctcccctccgtaggttagactgaagcatrgcagaggctgttgtggacaatcaagaggatgaatggggggatctcaaggcccaaatgctggaccacatctcctgctgttctgggtaaccttgagctatgtatgacacaactcttctatgcctggatgtggtgttcaggaagctcattctgatgccctgggctttggccttgccagggaacttcacatacagatgagaatggggaaagggtaacttattgcagcagccccaggcagtaccaggaggaggtacatgtatgtccgtgttgcaaaaataatacatgcctcaaaaacctgcctaggggagccctagtgcctgggtgctgtggcctgaggtagcaggtgggaagttagggatgtcacagaaatgtctgtgtctgaatccaggattggggtgggtgttggagagggctttcagctcccctcctcccaggggggcctctttttttaacggctgccrtgcccttcctggcccakccctaaacctaaattcaaatctcctccatgcctttgcgcaaaggacctccctcttgcactctaagccttagtttcctcctctaaaaaaagggggtctctaaacaggagctacctcatagggttgttgaggattaagtgaaccaatacatatacagtgcttagcacttaataagtaytcccccctgcgacacctagctgaactatggtttggtgtctgatcttgagaggttgatgtaaccttttaaaggcctcagttcgctcacctgtgaaatgggtctaagaatagcactgatctcacagggttgtgatgcagattaaaggagatggcatgtgtaatgtatacagctggtgcctggtaaatgtcggttctgtcattccctcacctctttagtccctgcctctgactaccaccatcccaagactactaacaagtaggaaagagccgagagtgaggctggagaatttaattcctaatggatgacctccaggattgggacatctgccagagctctcccatcatcccagatgggggcctgggtggggctttgctgattgtcacagttgaggtgccaggactgagttttgggggaccccagttgtccacccctggccaggacagagaggcaggtgcagatacagctggaggagcagcaggagagaggcaggtgggcttgcaaaagattgaggcagaatggtggtcaccttggcccatctgcctaccccaccctcagggccccaggcccccttcctccagcccccgatggccctggggactaggagacaggctgttgggcgccagggcctcccgatcaggtccccaggagccaccaccaccagggtctacagtctctaggcgcaaggcgggcaacaggcccaggcttcgaggcacagctggtgggaaggcccaggggccaggcaacccagagggcccctcttcactactgccccggctgctgccattactgctcctgtcaggagccactcgggacaggcggcggctctggggtgaggggctacggctggcaccacggcgttcacgggatgagggccgtagggcaagcccagggaacctggccagtcccgggctgcggctgcggtgtcgcttggacttgccaggactggggctgcgggacttgggtgcaaggagctccagtgtgctgtcatcctctccctctgagctggtgcctgagctgtctgtgctgctgctggccaactccgaggaaggcagcgagatctgggggaaatgctggtcactggggcgccctgctccccaacccagccactgaggcctgacctcccgaggtctgcctctctcgttggcagatcttgggaggtcaggttatttgtctgaactcaaggagcagaatgtagaggctgtggcatttgacaaaagtctttaggcacccccagcccagcagtctggcctacttacctggaagggttcagtgatgccgatgaggatgctgtggttgtgactatagtagcccaggatgaagtctccatggcccttgggcagtgattcctcactgaatgttacctggtaggcccaggggtataagcctaagttgggggtcagggaggccacctgagagcccccaaggtgagttctgaggtcccaaaggcaacaaggacttgccctgactctcccactccttttaagtacctggtaggtattcccatccacatcttcatgtttggcccagacataagccacatagtccttgcaatggcggaaacccacctgggggatcagtgttgtggaatcagtgttgtgaccctataatgtctgatcccagcagtctcccagtgtggcatcaagatctggacaagccagtgaccccaccatgctgttcagctgctcctccaggcccctttcttccctgagtcgctgaccaccactgcccctctcacccggtataagccgatccagtcccaggagctgcgggcgaacactgtttccatgcggtacctcaccaccgcctgctcgggccgcacccactcatctgccacctccagccgcaccagtggcatgtcgtccctgaaggcaaactgtccaggcaaggcaggggcagggggccacatcaggggagaccctctagtatcccacacacttaaggctcttgggtcttagcacaaattgcctgagacaaagggccactttacagactgggaaactgaggcagaacaggtctagtataaataccaagccctgtgctgcctcccagcccagggttccttctgcccacagcctccttagggagtgagtgagaacatagctttgaagctagcaaatcctggatttggctctggttctgccgttgacaggctgggtgagttcctcagcctctctgaatgccagggccctcatctgtaaactcagagactcttttttttttttttctttttctgagatggagtctcgctctgtcacccaggctggagtgcagtggtgcaatctcggctcactgcaacctccacctcccgggttcaagtgattctcctgtctcagcctccccagtagctgagaccacaggtaccgccatcacgcctggctaatttttgtatttttagtagaggcagcgtttcaccatgttggccaggctgttcttgaactcctgacctcaaatgatccacccacctcagcctcccaaagtgctgggattataggcatgagccaccgtgcccggccaaactcagagactcttattttactcttggagttgttcagcagattcagtgagacaccatttgcaaagcatcccataaatttcccagtataccagtaagtgctcaataaatgatttgtctctatgctagcaaggaagaccaataaaatcctatgatgcactgggtatttggggtaagctgaatattcctgagcaggcaagaagagctctgcgtgggaggatggagacctcagtccacttccaggctctactgctaactcgctatgttaccccagggcaggctctaaccatcccaaggttcagtttctccaactgagtctaagtactaagcggttactaactattaccttgtcatcagtccatgaaggaaagttataaccacgagtatcctttccccaaggtcaacccagacccaccaggggcgccacctgaatgggtggagctgctgaggtggcaggctgccaggatattgaccccacctctgtccctcagggaaggactgagttgttgccaacaccagatctttgtctgatcccctgtttacctagtttcaggtttccctccctcagcttccgagccaatctgttccagaagtaactggcacattctttccctgttcctgtgttcctaacagcaggggcgggcaagggtagacctttgaaaatgccctccaaggccttgcagcatcaaaacccctactgagccctattctgactgcattgccttggctaagagacttaagttctctgagcctcagtttccctcaccagtaaaacagagaggaaaactgggacatctcagggcctactgaggcattcaaaaggatgacatatgtaaagtgcactacacaggcctggcatgtagtaggtactcaatgggaattttttttttttttttgagacagagtctcgctctgtagcccaggctggagtgcagtggtgccatctcaactcactgcaacctccgcctcccgggttcaagcaattcctctacctcagcctcccgagtagctaggactacaggtgcgcaccaccacacccaggtaatttttgtatttttagtagagagagggtttcactgtgttggccaggctggtctcgaactcctgacctagtgatccgtctgcctcagcctcccaaagtgctgggattacaggcgtgagccactgcacctggttgggaaatgtttttaaagggacagagtcctggaggaggtgggaaggacaggatggggtgtcaaaaggagtgatttttcaggtgaggtccctaattgtgggttaaatcttcatgcccaacacttttgccagaggtcatggcaggccaagcgtggggatatttccattcccagctaaagatattggccaatgtcccactgactggccatgtgacaaagttaccaggaaaaacattttctggcctgctgggctccctcttatcagatcaagagacttgaagagcccagagttgggtttcagggctgaaaagatgggatctaccctgctctgccactgcagagcctgtgtatggtttggggcatgtgcctaccccatgaggagcctcagatcccgccacagaaaaaaagggagtgggccaaattggtctcacaggtctggttctgagattctaggatttcccattttgatgtcggcaaccaggaacctcaatcctaaatacaatataaattatagtaactacttaagagttcagctttgtattttttatatctttgctctccctccccatcactacacactctcataatgcttggcatatggtaagacagttaagtactcagtaaataatgaatgaatgaatatgaatgaatgttacatggagtttgattttgctggtcttattatatatgtgaatttttatatcttttctttgttatttttaagacactagtagtgaaaatgatgatgcatatgtgaatttttttttttttttgagacaaggtcttgctctgttgcctgggctggagtgcagtggtacgatcacagctcacagcagactagatcttccaagctccagtgatcttcccacctcagcctcataaatagctgggaatacaggtgtgcaccacctagctaaattttatttttatttttattttttccctgagacacagtcttgctcatgtcacccaggctggagtgcagtggcacgatactggctcactgcaacctctgcctcccaggttcaagtgattcttgtgcctcagcctcccaagcaactgggattacaggcatgcaccactgcgccaggctaatttttgtatttttagtagagatgggtttcgccatgttggccaggctggtctcaaactcctggcctcatgtgatccgcccacatcagcctcccaaagtgctgggattacaggcgtgagccactgcgctcggcctttttttgattttttttaaagacagtgtctcactgtgttgctcaggccggtcttaaactcctgagctgaagtgatccttccacctcagcctctcaaagtgttgagattacaggtgtgagccactgcgccagcctataaatgaattttaagataaattactctaaacctttctcagaagacaggagttagagattagcagaaaaggcacgggctctaaggctgggtgtggtggctcacaccttgtaatcccagcactttgggaggccgaggtgggcagatcaccggaggtcaggagttcgagaccagcctggccaacatggcaaaaccccatctctactaaatacaaaaattagccaggcgtggtggcgggcagctgtaatcccagttactcaggaggctgaggcaggagaatcacttgaacccaggaggtagaggttgcagtgagccgagaccacgccactgcactccagcctgggcaacagagtgagactgcattaaaaaaaaaaaaaaaaaaaaagggcgccgggcacagtggctcatgcctgtaatcttagcactttgggaggctgaggtgggtggatcacctgaggtcagcagttcaagaccagcctggccaacacggtgaaaccctgtctctactaaaatacaaaaattagccgggcatgacggcgggtgcctgtaatcccagctacttgggaggctgagacgggagaatcgcttggacccaggagatggtggttgcagtgagccaagattgtgccactgcactccagcctggggcggctgagcaagactccgtctcaaagaaaaaaaaaaaaaaaaaaaaagttggccaggcacggtagctcacgcctgtaatcccagcactttgggaggccgaggtgggtggatcaggaggtcaggagttcaagaccagcctggccaacatggtgaaaccctgtctccactaaaaatacaaaaattagcctggcgtggtggcgggtgatgtaatcccagctactcaggaggctgaggcaggagaatcacttgaacccgggaggcggagcttgcagtgagctaagatcgcgccactgcactccagcctgggtgacagaatgagactctgtctcaaaaaaaaaaaaaaaaaaaaaagaaaaggcatgggctctgaaaccagactcacttgggttcaaatcctaactgttcctcttactagttgggtgaccctgggcaggtgatgccatgtgtctgagcctcagcttcctcatctg

SEQ ID NO: 96066 - DNA, 23724 bp, Homo sapiens
  misc_feature (1)...(23724): n = A,T,C or G
tatcagtaggccaattttctacatggtgtaaagatggctgccagcagtaactagagccattggcctcttcatttacatctaatggaaggaagatcatcttttttggcagcctcctcaggagagaaaataagcttcctttcccaaaagccctgagcaaaaatttccttgtatcttgctagttcattcgtgatctaatcatgtgcctggggaaatgggaattgcttactggcttaaccaactgggacccattcctgaagctgagggtggggtccaccatattccagttcctgttaagaaggagatgggctgcaaccttaacaggatcctaaccctaaccctaaccctactgtgttgctggacattgtggcagcaacacagtaaccaaccaattctataaaacatgtataggcccagtcttggtggctcacgcctgtaatcccagcacttgggaggccaaggcatgtggatcacttgagtccaggagttcaagaccagcctggtcaacaaggcaaaaccctgtctctactaaaaatacaaaattagctgggcatggtggtgcatgtctgtaatcccagctactcgggaggctgaggcaggagaattgcttggaccagaggtggaggtttcagtgagctgagatcatgccactgcactccagcctggacgacagagtgagactccatctcaaaaaatagatatagctatataaaatatataacacgtatatgtaaatatacatgtatataaatatatatgcatattatatacaacatgtatataaatatatatgcatattatatacaacatgtatatataaatatatatgcctagacccccgcccccaccaaaaaatatctataaggaaacaaaccaataagtcagaacgattatttcttggtggatgaaattataggtaaatgttttccttctgtgttttgtgtaatgggcatggattacctaaacacaaacagtaaactttatttacgaaaataatgggacataccccactatttccttctactccaacccctaccccagcaagggcctcagagtaactgaagccagaggccccacggagtcgttcttgctgctgacagagccaaaccccagtaccccatgggccctggttgtttgctggacagatgccaccaaaccactctcattgcattagcctggatgctgtggcccctaaaggccacagcttgggctgctgagggttgaccaaccagccagtggaaccagtggtggagactgtgaccataacagtaccaggaaggaacactgtggcatcagcagcatgagaagcccaagatctcccaagacagatctctgcccataatccatgcctcttatgtggcagcatgtaatttaggccagcagtcttcctcargtggggccaaggttggggattagtctgtgatggggtcaggctcagacagggtctaggtcagcccttagttgagtagtctgtagcctagggctagatacagggctcagtccatgattgggcttagtctttagtctgtgaccaggagccaggctcagtctgtgaccagggtcatgtctctgtcaatgactaagttcagggctcagtctgtgaccagattcagggcacagtcttccgtttagggctcagtgtgtgaccagaattgcatgatccagggtcagaattcagtctgtggtcagagttcagtcaatgattaggctcaggactcagtctttgaccaagattagggctcagtcttctgccagagtcagggttaaaaggttagtctgactcttctgccagagtcagtctaaaaggttagtctgggctggggctagaattcagtctgtgactaaggctcagtcttagaraaggataagggcttgatctgggcccagaactaaggtctcaagttgggatcagcctaattcaggcttagatcagtatgtgactagagtcagggttcattctaaggtgatgtcagagctcagtcaagagctggagtagaggcttagtcaataccaagagtcgggttcaagttggaggatcaggaccatgaccagggcttaatctggctctatgctctgttctgagctccaataaagaagcttctggaggcataggagcccagagcaagtcagtctgcaagaaatgagagcccccaggcaagcttagcagggtctggtggctgcaggaagtttcccctggactgctgaggccgggtgtcctagagcctctaacctacatggctctgctgcttgagatcccctcgcaccagaataaaaatagccactcacttcagmgcagctgacagcgggtgctgggctgcctaggaggagggggagccgaagagaaggaggagagaggcctgagctcagccccagctgtgtgaccttgggaaagtcactcctcctcctccagcccatttcctgagtggcagaatggggagtgaggatgacatctgcctcagagggtgagaatgaagtgctggggacataacatgtgaagcttgttaccaacaagaaaccctggagtgaagccttgggagaagaaatgctcttttgtgccctgtatacttcctcctcagggaagccctcccagataaccccttctttcacattcccacaatatcctgtatcaccctctacacctttgcagatggtagccatagcatgacctccctcatggcgggcctgggtcagggtgaccagggagagaaaggaaggaggacagaccctcggtaccgttgccatcctcaggtgcccctggaaagtgaaccgaggaagaggaggaggaaaaagacaggaaagacttctctcccttccctgctcatgtttactccgaaccaaagggcaggagggtacatgtccaaatttctcatcctttcacagccagaaccttccttccccatccatgctttgtacctgctgttctctctgctttccagccagggcgtttctcttcttcgatttggcagcacggactctccttcaaagaaggggttcaacagtcagctcctctgtcgggaagaattatccactgcctctccaggagctccatgctctgtcctctctctactggctgtgtaatccctgggcctcggtttcttcctctgtccaatgggggcctcattaccaacctcacagggttactatggagagtaactgggatactccatctatcactggcatcctgccttcctatccctgacccacacagcctgaaggacagcactgagtttccaggagtgggctggatgagccctggaccctgcctcagtacgcccacccccctcccccaccaagagtgagggcaaggagggagccagaaagggcctccagagacagccgtctccaggggggcggttctccctgacagctgcccccagcctgccgccctgagccccagagcctgttatcaacctccttagtcatcayaccaggagctcaaatatagctccaactcactcccttttcagctggggtccgccccctacccccttctcctgacaagaccaggcttgggtctcagagccccttccttgtcctcccaggagagtaaccaccctcagcctgtttcagcatccaccacatgggcaggctgaagtcaatggtggtgatgatgatgatgataaatacagagcagccacctttatggagagcttgctgtgccaggctctatgctaaacatttcatatatattatcctgttgaatcttcaccagcaaacttaggaggtgtctgctgttttaatctcccttacacaaattgggaatcagagtgacctcctcaagtaagtcagtggcagggccagaaacaaagtcccctgcagggtctgagctcagggagcgggtggtgggaaatcctgggttgccctcctgaggcagaggagccctctgcagacacatttgcatgacatttgyctggcttccaaagggcactgatgcccctgtcccagccctagatggctgagccttaggactggtcccagaggcctggatctgcccatcattccctctaggattgcatgaaaagctgggtagtcttgggggctcccattttctttttcttttttcttttctttctttctttttttttttttttttgagacagggcctctctctgtcacccaggctggagtgcagtggtacgatcttggctcattgcaacctccacctccacctcccaggttcaaacaattctcctgtctcagcctcccaagtcgctgagactacaggcatgtaccaccacacccggctcatttttatatttttagtggagatggggtttcgccatgttgaccaggctggtctcgaactcctgacctcaggtgatctgcccacctcagcctcccaaagtgctgggattacccgcactttgccagtactcccccagcccgggggctcccattttcttatttgtaaaacaggagacagaggataagacaggatgagttcgaatcttcctttttctggtaacctgagcatcaccaccaggtctactctcacatcctccctgactgtcacctccaactccaacactacctctttcattgacacaacaccatcatcagtattggtatcatcatcacctctacctttgccatcaccatcacctccaccaccttcaccacaaccactgctagccccctacttccatcatcacagttacatacatcatcacatccatcaccacagtcgccttccccgtcaccactgtcaccatctccactatcgctgtccaaagacctttctaccccaacactctaatatggcctgagtctctgcccctgcaaattccagcagagatgctggcctgagaatacagactagacctactgacagtcaagcagaggtaggaagtgccttcaggagaggaaagtgaggcatctgccttcatgtaggagactgcacaggcccatgcagatgctccatgttggttaacagggagctctgcacacacaactctgaacactttctgcctaaagtgggtgggatcactcctctctaagccatgagaaacagatcccacagccatcccagcccaatctgaccctcatcacccattcactcttctaattcatttattcattcaacaaacactcccgtaggcctgttggggaccatgtcctgggctgggtcctggctgtagcaattctcaggcctgtttgtaactctcttgtcagtctgttaccccactgctgggcccttctccacccaagttcccttcccccagatagctcgaagggcttgtgctcatcctaggtcactaagttttctcactgaaacacaggagaccttctcagttcaccaggtgaccttgagcaagttcccctcccaaaccacacccagtgaatactggagagaagaaagctgacagaagccgggctgggttaggcctggctgtggggacatctgagggcagctaggtgtctgcagaagaggaggggctggtgctgaggcctgagatgggaaaagactgcagtggctggagcctgagtgtctggttctgggttgggaagaatagagcctgggactggcagtaggagtggagagggtggcaccaagacctgaaaatggggcaagggtgggggccggggcaagctctgagctggcagggagccaggaaggtcacaggatcagggcaagaactcagttgtctctgaggccctggagagggtgcagacctctgaaccacctgtcctaccttaaggcaggtgtgttaatgcccctccctggagcaaagggctgaccaggcctacggcagaaaggtgaaggtagacagacagcctccttcctgctgccagttgggacctgggccaggcagatgggtacactctcccctccccactccatggctgttccagcctcagcagccwgtttgaaggattcccagggggtagccaccttgcttcggcctcttccaggctgggaagtgggagcctgtgcctttaaattctcagcaggttgaaatggctgatgacatcactggttcccgggagcgrtagagctggagccggagccaagggagtccaggctgccgggggctgcagacatggagggccagagcagcaggggcagcaggaggccagggacccgggctggcctgggttccctgcccatgccccagggtgttgcccaaactggggcaccctccaaggtaagacccctgagacccagtgccccccgctttcctgatccctggttccacacaccccccccacatayactgcaggctccctggtgctcctgactgaggggctggtactttcctctgctcagcgagcaggggctaggtgaagagagcaccctgggggctgaggggcagtgacaggatgcccggagacagatgaagttagccatctccaggagcccttgggagagtcctggactgggtatcagaggacccagctgtgctccacctttgctgtgtgaccttggccaagttgcttttcctctctgagccaatgcaaaatgagggggcttgtcgctgaagactaaaactgtgacatctgggatggctaagttgttagtactggaggcggtgtgatagttggggggaagccggcacacagtgtgacacttggagccaaggagggtgcctaaaatgccacctcaaagaactgagtttgagaagggaggtggagatggagttttaggtactctgaactgagaaggatacgggacagaaacagaagtgcgtctccagaggcagggcctccctgcgccctgttaccctacctagggccatcctggggcaagtatagacattcttctgccctccttggtgaaggacactttatcctgtcttctggagacaggggacatcagagagaatagatggggaaggaggataggtctctacaggactccgtgactccccacccctcccacctgccggwcataaatgggatacctgcttgcctgtcctttcaggtaggggagaaagtggaggatgtaagagggcacaacctgggcacagagagatgtgacaccaggatcaacttagaatcctggacttgctctgaatgctagattcacacttggtgaggatggactattcaacggggctagatggaattctagcaaatgttgggctcataaatgcagacaatgggagatgaagattccccagaatataatgtggccaggaaccctagaccccatcccttcattttacagacagagaaactgaggcgctgggcagagaggtacttgcctaaggtcacacagagctgggctttgaatctacacagccagtctcagctcccagctcttgctcctgagtggagctctgggaatgggtaagagaacagagagggctgtaaccaagggatttggatgtttagggggcggtggggaactgagggtttctgggcattatgaaggaagrgagaggtatttaacaagctgcacctgtaggtctgtatcttgacaatagaaaaagaaaagaaacaggctgtccccagtgtgcccagacctgggatgtcaggtcagtagccgtggctgggggagcttcagggactgcagtgggagggttgcccagggaagctgccccgaatgggcagggtgtgggtgccagccaggaaggcaaggcaagtcctcaggtttaggttcacactctgcctcatttgagtcagggtctgagtttccccatctgtgaaagaggtttcagacttaaaggaggggttagggttttgtgtcctatctcctccaagacagaagttgacctgcagcagaatagattgaagtgagatagtaggaagaacttccttggaaagatgtgcctttcttagctagatgaactctgccagggtctatatggaagttggggcccaatgccctggttagggtcactctgaatctttgacttgtcctccacaaggtggactcaagttttcagctcccagcaaagaagaacgcagccctaggaccctcggaaccaaggttggctctggcacctgtagggccacgggcagctatgtcagcttcctcggaaggaccgaggctggctctggcatctccccgaccaatcctggctccactgtgtacccctgaagggcagaaaacagctactgcccaccgcagctccagcctggccccaacatctgtgggccagctggtgatgtctgcctcagctggaccaaagcctcccccagcgaccacaggctcagttctggctccgacgtccctggggctggtgatgcctgcctcagcagggccaagatctcccccagtcaccctggggcccaatctggccccaacctccagagaccagaagcaggagccacctgcctccgtgggacccaagccaacactggcagcctctggcctgagcctggccctggcttctgaggagcagcccccagaactcccctccaccccttccccggtgcccagtccagttctgtctccaactcaggaacaggccctggctccagcatccacggcatcaggcrcagcctctgtgggacagacatcagctagaaagagggatgccccagcccctagacctctccctgcttctgaggggcatctccagcctccagctcagacatctggtcctacaggctccccaccctgcatccaaacctccccagaccctcggctctccccctccttccgagcccggcctgaggccctccacagcagccctgaggatcctgttttgccacggccaccccagaccttgcccttggatgtgggccagggtccttcagagcctggcactcactcccctggacttctgtcccccaccttccggcctggggccccctcaggccagactgtgcccccacctctgcccaagccaccccgatcacccagccgttccccaagccactccccgaatcgctctccctgtgttcccccagcccctgacatggccctcccaaggcttggcacmcagagtacagggcctggcaggtgcctgagccccaaccttcaggcccaagaagccccagccccagtcaccacctcctcttctacatccaccctgtcatcctccccttggtcagctcagcctacctggaagagcgaccccggcttccggtgagggggccctctcccaagaaaggtggctggggcttagctctgaggttagccattcttccagggtggatggtgtgctctacctcagcttctctctctgaggaagagtctttggggagggggttgctgggcccactctgtgacgctcagaagatagcatcccctcctaaggaacttgccgcctctcagttgatctccccagggagagtgtggcagagggacaggattcggggcctcctgtgggtccttcttagggctttggcccacacctgcctccatttagttccccagggagtcctgtgaaaggaagcttgagggtgagggagtggtgccaggactacaccctcatatgcccctgccctcaggatcactgtggtcacatggaacgtgggcactgccatgcccccagacgatgtcacatccctcctccacctgggcggtggtgacgacagcgacggcgcagacatgatcgccatagggtgaggtggcagggcatgtggaccccctcctgagcccctcgggccttccgggccctccacccatggcaggggcttccagggcacctctccaatcccatggccaccctgcccccacccctccaggttgcaggaagtgaactccatgctcaacaagcgactcaaggacgccctcttcacggaccagtggagtgagctgttcatggatgcgmtagggcccttcaacttcgtgctggtaacgcacccctcaccccctggacagccagagaccctgctgaattcctgkytccagctgtaccctggctcactgtggggcccgctgggcctctgtggctgggtccgtgacatgggtgggtggaggagcagacctgaaggtgggcgcgagggcgggggagttgtgttctgtcccccagccacgtggcctcccgctgcaggtgagttcggtgaggatgcagggtgtcatcctgctgctgttcgccaagtactaccacctgcccttcctgcgagacgtgcagaccgactgcacgcgcactggcctgggcggctactgggtgagcctgtgagcaggcccagaagaggatgggacatgaagggggctttagattagtccccccgccccatgcacagcaaggtccccttcccatcctccaccctttaccctgcggcccagcccccccatgcaccacccaataccccatcctattcctctatacccccgcccttttctctccccactgtgtcccagcgttgttcctcatttctgtaggacccacccaccttccacccacatctcctctctaacccccgctcccagtgcctcacctcctggcctaagccccgcccatgagccatccgaccctgcctccctagggtaacaagggtggcgtgagcgtgcgcctggcggccttcgggcacatgctctgcttcctgaactgccacttgcctgcgcatatggacaaggcggagcagcgcaaagacaacttccagaccatcctcagcctccagcagttccaagggccgggcgcacagggcatcctggatcatgagtatgggctggggtggggccaaatagagcttgggtggggctagtgatgggggtttttgtaccaccttgggtggggcttatggagagaggcagggcctatggggtttagtgcccacccaaactagttgtaggaacacgaaagcagagagcagttggatggggaggggcggagcttgtagggtggagctttgctgaggggccccgccttgctgaaggtcagaacctaatttcctgtagaccggtccctctgcttttcctctgccctttggtgggctggaggctctggcaccactcacccactcactacatcccctcgggttggatgggctggaaggatctgggctgagcccttatcctccatggacctgttgacaccccccactgccccccacatctctcccatcccccaccccaaacagcctcgtgttctggttcggggacctgaacttccgcattgagagctatgacctgcactttgtcaagtttgccatcgacagtgaccagctccatcagctctgggagaaggaccaggtggggtccttgtccccagaagcacacagagcatgtcccaggacacgcctgtaccttagactatggtccctgtcctcacctgccccaccccctccctgggcacagcagagcccaagctgttgtccaatctgctctcctggaccccccacagctcaacatggccaagaacacctggcccattctgaagggctttcaggaggggcccctcaacttcgctcccaccttcaagtttgatgtgggtaccaacaaatacgataccaggtgagctcagtccgaggagggactgaggggaagtgggctgaggtcttctcgaacagggagactttgggaagaggggcaggaggcaaggtggagggttacatcttgatccccagcccctgaaacttggggtacccctgctcactgcagtgccaagaaacggaagccagcttggacagaccgtatcctatggaaggtcaaggctccaggtgggggtcccagcccctcaggacggaagagccaccgactccaggtgacgcagcacagctaccgcagccacatggaatacacagtcagcgaccacaagcctgtggctgcccagttcctcctgcaggtgagttctggcctcatcctccccgcatgaaatccccaggcccaactcggcataccactgcccctcaccattaccctttgtataaccccttgtacctgccctcagcagcatccatttgttgtaacagtggaaatggggttgcaatctacattttcagatgaggaagctgaggctcagacacatggcatcacctgcccagggtcacccaactagtaagaggaacagttaggatttgaacccaagtgagtctggtttcagagcccatgccttttcttttttttttttttttttttttgagacagagtctcattctgtcacccaggctggagtgcagtggcgcgatcttagctcactgcaagctccgcctcccgggttcaagtgattctcctgcctcagcctcctgagtagctgggattacatcacccgccaccacgccaggctaatttttgtatttttagtggagacagggtttcaccatgttggccaggctggtcttgaactcctgacctcctgatccacccacctcggcctcccaaagtgctgggattacaggcgtgagctaccgtgcctggccaactttttttttttttttttttttctttgagacggagtcttgctcagccgccccaggctggagtgcagtggcacaatcttggctcactgcaaccaccatctcctgggtccaagcgattctcccgtctcagcctcccaagtagctgggattacaggcacccgccgtcatgcccggctaatttttgtattttagtagagacagggtttcaccrtgttggccaggctggtcttgaactgctgacctcaggtgatccacccacctcagcctcccaaagtgctaagattacaggcatgagccactgtgcccggcgccctttttttttttttttttttttaatgcagtctcactctgttgcccaggctggagtgcagtggcgtggtctcggctcactgcaacctctacctcctgggttcaagtgattctcctgcctcagcctcctgagtaactgggattacagctgcccgccaccacgcctggctaatttttgtatttagtagagatggggttttgccatgttggccaggctggtctcgaactcctgacctccggtgatctgcccacctcggcctcccaaagtgctgggattacaaggtgtgagccaccacacccagccttagagcccgtgccttttctgctaatctctaactcctgtcttctgagaaaggtttagagtaatttatcttaaaattcatttataggctggcgcagtggctcacacctgtaatctcaacactttgagaggctgaggtggaaggatcacttcagctcaggagtttaagaccggcctgagcaacacagtgagacactgtctttaaaaaaaatcaaaaaaaggccgagcgcagtggctcacgcctgtaatcccagcactttgggaggctgatgtgggcggatcacatgaggccaggagtttgagaccagcctggccaacatggcgaaacccatctctactaaaaatacaaaaattagcctggcgcagtggtgcatgcctgtaatcccagttgcttgggaggctgaggcacaagaatcacttgaacctgggaggcagaggttgcagtgagccagtatcgtgccactgcactccagcctgggtgacatgagcaagactgtgtctcagggaaaaaataaaaataaaaataaaatttagctaggtggtgcacacctgtattcccagctatttatgaggctgaggtgggaagatcactggagcttggaagatctagtctgctgtgagctgtgatcgtaccactgcactccagcccaggcaacagagcaagaccttgtctcaaaaaaaaaaaaaaattcacatatgcatcatcattttcactactagtgtcttaaaaataacaaagaaaagatataaaaattcacatatataataagaccagcaaaatcaaactccatgtaacattcattcatattcattcattcrttatttactgagtacttaactgtcttaccatatgccaagcattatgagagtgtgtagtgatggggagggagagcaaagatataaaaaatacaaagctgaactcttaagtagttactataatttatattgtatttaggattgaggttcctggttgccgacatcaaaaygggaaatcctagaatctcagaaccagacctgtgagaccaatttggcccactccctttttttctgtggcgggatctgaggctcctcatggggtaggcacatgccccaaaccatacacaggctctgcagtggcagagcagggtagatcccatcttttcagccctgaaacccaactctgggctcttcaagtctcttgatctgataagagggagcccagcaggccagaaaatgtttttcctggtaactttgtcacatggccagtcagtgggacattggccaatatctttagctgggaatggaaatatccccacgcttggcctgccatgacctctggcaaaagtgttgggcatgaagatttaacccacaattagggacctcacctgaaaaatcactccttttgacaccccatcctgtccttcccacctcctccaggactctgtccctttaaaaacatttcccaaccaggtgcagtggctcacgcctgtaatcccagcactttgggaggctgaggcagacggatcactaggtcaggagttcgagaccagcctggccaacacagtgaaaccctctctctactaaaaatacaaaaattacctgggtgtggtggtgcgcacctgtagtcctagctactcgggaggctgaggtagaggaattgcttgaacccgggaggcggaggttgcagtgagttgagatggcaccactgcactccagcctgggctacagagcgagactctgtctcaaaaaaaaaaaaaaaattcccattgagtacctactacatgccaggcctgtgtagtgcactttacatatgtcatccttttgaatgcctcagtaggccctgagatgtcccagttttcctctctgttttactggtgagggaaactgaggctcagagaacttaagtctcttagccaaggcaatgcagtcagaatagggctcagtaggggttttgatgctgcaaggccttggagggcattttcaaaggtctacccttgcccgcccctgctgttaggaacacaggaacagggaaagaatgtgccagttacttctggaacagattggctcggaagctgagggagggaaacctgaaactaggtaaacaggggatcagacaaagatctggtgttggcaacaactcagtccttccctgagggacagaggtggggtcaatatcctggcagcctgccacctcagcagctccacccattcaggtggcgcccctggtgggtctgggttgaccttggggaaaggatactcgtggttataactttccttcatggactgatgacaaggtaatagttagtaaccgcttagtacttagactcagttggagaaactgaaccttgggatggttagagcctgccctggggtaacatagcgagttagcagtagagcctggaagtggactgaggtctccatcctcccacgcagagctcttcttgcctgctcaggaatattcagcttaccccaaatacccagtgcatcataggattttattggtcttccttgctagcatagagacaaatcatttattgagcacttactggtatactgggaaatttatgggatgctttgcaaatggtgtctcactgaatctgctgaacaactccaagagtaaaataagagtctctgagtttggccgggcacggtggctcatgcctataatcccagcactttgggaggctgaggtgggtggatcatttgaggtcaggagttcaagaacagcctggccaacatggtgaaacgctgcctctactaaaaatacaaaaattagccaggcgtgatggcggtacctgtggtctcagctactggggaggctgagacaggagaatcacttgaacccgggaggtggaggttgcagtgagccgagattgcaccactgcactccagcctgggtgacagagcgagactccatctcagaaaaagaaaaaaaaaaaaaagagtctctgagtttacagatgagggccctggcattcagagaggctgaggaactcacccagcctgtcaacggcagaaccagagccaaatccaggatttgctagcttcaaagctatgttctcactcactccctaaggaggctgtgggcagaaggaaccctgggctgggaggcagcacagggsttggtwtttatactagacctgttctgcytcagtttcccagtctgtaaagtggccctttgtctcaggcaatttgtgctaagacccaagagccttaagtgtgtgggatactagagggtmtcccctgatgtggccccctgcccctgccttgcctggacagtttgccttcagggacgacatgccactggtgcggctggaggtggcagatgagtgggtgcrgcccgagcaggcggtggtgaggtaccgcatggaaacagtgttcgcccgcagctcctgggactggatcggcttataccgggtgagaggggcagtggtggtcagcgactcagggaagaaagggscctggaggagcagctgaacagcatggtggggtcactggcttgtccagatcttgatgccacactgggagactgctgggatcagmcattayagggtcacaacactgattccacaacactgatcccccaggtgggtttccgccattgcaaggactatgtggcttatgtctgggccaaacatgaagatgtggatgggaatacmtaccaggtacttaaaaggagtgggagagtcagggcaagtccttgttgcctttgggacctcagaactcaccttgggggctctcaggtggcctccctgacccccaacttaggcttatacccctgggcctaccaggtaacattcagtgaggaatcactgcccaagggccatggagacttcatcctgggctactatagtcacaaccacagcatcctcatyggcatcactgaacccttccaggtaagtaggccagactgctgggctgggggtgcctaaagacttttgtcaaatgccacagcctctacattctgytccttgagttcagacaaataacctgacctcccaagatctgccaacgagagaggcagacctcgggaggtcaggcctcagtggctgggttggggagcagggcgccccagtgaccagcatttcccccagatctcgctgccttcctcggagttggccagcagcagcacagacagctcaggcaccagctcagagggagaggatgacagcacactggagctccttgcacccaagtcccgcagccccagtcctggcaagtccaagcgacaccgcagccgcagcccgggactggccaggttccctgggcttgccctacggccctcatcccgtgaacgccgtggtgccagccgtagcccctcaccccagagccgccgcctgtcccgagtggctcctgacaggagcagtaatggcagcagccggggcagtagtgaagaggggccctctgggttgcctggcccctgggccttcccaccagctgtgcctcgaagcctgggcctgttgcccgccttgcgcctagagactgtagaccctggtggtggtggctcctggggacctgatcgggaggccctggcgcccaacagcctgtctcctagtccccagggccatcgggggctggaggaagggggcctggggccctgagggtggggtaggcagatgggccaaggtgaccaccattctgcctcaatcttttgcaagcccacctgcctctctcctgctgctcctccagctgtatctgcacctgcctctctgtcctggccaggggtggacaactggggtcccccaaaactcagtcctggcacctcaactgtgacaatcagcaaagccccacccaggcccccatctgggatgatgggagagctctggcagatgtcccaatcctggaggtcatccattaggaattaaattctccagcctcactctcggctctttcctacttgttagtagtcttgggatggtggtagtcagaggcagggactaaagaggtgagggaatgacagaaccgacatttaccaggcaccagctgtatacattacacatgccatctcctttaatctgcatcacaaccctgtgagatcagtgctattcttagacccatttcacaggtgagcgaactgaggcctttaaaaggttacatcaacctctcaagatcagacaccaaaccatagttcagctaggtgtcgcaggggggagtacttattaagtgctaagcactgtatatgtattggttcacttaatcctcaacaaccctatgaggtagctcctgtttagagaccccctttttttagaggaggaaactaaggcttagagtgcaagagggaggtcctttgcgcaaaggcatggaggagatttgaatttaggtttagggctgggccaggaagggcacggcagccgttaaaaaaagaggcccccctgggaggaggggagctgaaagccctctccaacacccaccccaatcctggattcagacacagacatttctgtgacatccctaacttcccacctgctacctcaggccacagcacccaggcactagggctcccctaggcaggtttttgaggcatgtattatttttgcaacacggacatacatgtacctcctcctggtactgcctggggctgctgcaataagttaccctttccccattctcatctgtatgtgaagttccctggcaaggccaaagcccagggcatcagaatgagcttcctgaacaccacatccaggcatagaagagttgtgtcatacatagctcaaggttacccagaacagcaggagatgtggtccagcatttgggccttgagatccccccattcatcctcttgattgtccacaacagcctctgccatgcttcagtctaacctacggaggggaggctgagattcccaaggcttggcatagccatgggcaaggtccaggctggtgcccaggaaagctgaaactgaggtcactggctccaggacttctgctgcctgtcgggtctcctggctgcctgggttagctgcaggcactggttgtagaatgacatggggcctctcaggggctctgaaggccatggctgcctctcatctgtgcctttatcctggagctggtgtcgcctctgctgaagcctccgcaagtgccgggctgacaccctgatggccctagggtctctggaacagctgtaaggagagaagagtggggcagatgatcagggctgacaaggatcccaccttactctgcagacagtgggctgaggcccagagagagagggggctggggccacagtcaccagcaaggcagagaggggtgggtttcacggagaaagggtataataaaccgggctggtacctggaggcctgggttctgccactagctggctgtggaaacctgagccagaagcctcagcctcatctatgaaatgggaaagttaagaaggagctggctttgagaatcggaatccagatgaaagcagagcacagtggctcacgcctgtaatcccagcactttaggaggccgaggtgggaggatcgcttgagtccagaagttcaagaccaaatgagattgtggattaggagtgagttaagtacacattttgctgtgtgccaggcggggcatgacctatgtgcatcctgccgtttccttggttcctacgaccattttacagacaaagacatggaaacttggaaaggtgaaccagttgccaaggtcatgtgggaatcaaatgacaaagccaagatgcgacccatagaggccaactgcagagctggacctggggcagcagggggtagagggatgaggctatggataggagctcagaggtctcccgatcccttcccctaccccttggcccaagcattcaaagtgggtataggcaacccaccctttgagaaaaccccccatccctcctggctctgacatcacttactttttgccttccacacagtccagtggaggggccagcttgaagcaggttgtgcccagcagctcccaaagcatgttggtaacctcgggtgggctgtggagcctcaggaagcgtgccagactgagaacagaggcaggctcaggccggggcagggccttgccagccaggggccccttcccatgcctggcagcaggcagcccaccccgcgagggttcaaaggggcctcaccggcgcgtgcagttgcagtggaagaggggctcttgggcgctgttgagcagctggaactcgatttccyggggcccaatctggtgctcacactggtccaggtggcggcggaagctgcggcagacccagcgggcacctgaggggtggatgtggtgttgatgggagcccaatccaccagggaggccccaccaatgcctgygccatccgggagaaacaccagcacgtgtgctcagtcacacacacagattccctccatttcatgccttctgagtctttgtgccctcagtgtgccgcccttgtggcagtgcctccctacccccaagccgccaaacacggtagtactgctatgggggacacccagagtactgacggtagtcaagaaaggcttccaggaggcataggctgctaaactgagggtgggagagaagacaaggagaggaggaacagcatgtgcaaaggcctcacggtaggagagagcctggcgcttttgaggaaccaagtgaagtttgtgaaactagagttttgactgggggtagggtctgcagggccaaggcttgagggcctctgggtgttgggacatcattggctgagataaagaggagtggtggtgggtgcacagtggggcctgatgtggtcaaattcgtggattatgaaaatcctgtgctgcagtgtgatttcatgggagaggttgggaaatcccaggaggaaactggtgcaggaaaagaggcaacacatggccacccctaaacagaagcagggacaccccctcatgtcaggaacccccaaggttaggttctgagctcaccctgaggttttaggccaccctgtgggccctggaggcctgtgggggccacatcaagcctgggagagaccatagggtcctggagggctgtggtgttggctttgctggggcgcttggaccctttctgatgtggtggccccttccgaaggtgctgcttctgtcgaggcttgggaggggctgggctccgggagctgggagttggggaggtggcccgggagctccaggaggcattgtagaaggtcctgggctgcaggcgagcgaggggcactgtgccgtacatcctacacctgggtggtggcagttggtggaaattggtgactgggaatcccccttccagaagcccccagggtcgtctccatggagatcaatgctctgccagtcccatcccccatcccgctgggttgtgggggacacccaaggagggtctgcatcccgggccctcaggagaggacatgcaggatgggacatcattccctggaagacagacagacagatagctctccctcaccaggcttggagcctgggctccctctctgtctggaaagggacatgagggggtggccacrtacccgccccaccagtaccacrccacacacgcctcctgctcctccagcacaaagcaggggatctccagcacgttgaagaaggccacgcccacgatgtccgagatggagtcgtgctgattctgtaggcattgctgaaacctgccccagaacagatacccaggaccctggggcatggagggctgtctggctcctcccacagcccactgtgccactaccagctgggtggtttggggtccaagcatcccttctttctggcctcagctttcctacctgcactgtggggtccaagctggctgagctttaagatcctctgcaatcccaatgtctagttacccaggaactgggtaactctgccctgtccctgagctctgggccctcgctgcctgccaccaacctggtgtcacagtcacagtgggagatggtgtggaatcggtagtttcggatgccatagttgtactgcaagggtgagatgttctgtgggcagcggtcatgttcccggcaacagagatcaggtccctggaagacccctgcagggaggggaggggagagggcaccaactcagcagggtcctaggcatcatgcaccagctatgcccccctggtaggaagagggcagagacctggttctcaccccagccctgacacaaacgccatgagggtcctcagaccagtcactctcccttctgtgggactctcagagtttcaaagctggaaaagagaagccaagctgcagcctctgttgggcaactctaaatgccaggtagcccacccataaatacatggaaaggtcttcctcaggggaattggagtctgcctccagagttcccaagcccacgccccaaataaaactccaaaattatgaatgtgtgtatgatggaatggcaaacaggcagggtgcaacctttctcactggcacaaggaggtgtcgccaggatgccaacctactctgactcaggtgccaagccctcccccaaccctgcacacaaacgcacagacatctgtactgatagtgcaagaaattcatctatgtttattaccatctaaaaaatagcactctttactaagcatttcccacatgcctggcacttcccacatccaggttcacagccagccctgaaagggaggtatcaccttcattttacaggtgaggaaataagtccagagaggggaagtgacttgctcagcttgtatgtgctgagttgggatttgaacccaggcctttcgtctcagcatccattccactgggcaccccgtgcccacaaagcctcctcctgggtaatggctttttggctcagttgaccctggatcctcccccagcctgcccagtccctcggatggcatttaatgaggactcccaggtttgaataagactttccccaaccgtgacctcatttaagcaccccatgatgagattcgtgattgcccccactttacagataaggaaattgaggttcaccatggtcaagtcactcccccagggacacacagcctaggagagtaagggctggggctgaagaaaccttgcttccccgatcggaccccccagcccacacacccctcatggctcacccagctccgaggagttcccagcagaatctccaactccacaccacastgtgccaggcatggtccatcctctcttctctcgctggtgccctccaccagggactccactctgccctgctgctcgcttcttcctggcccctgctggactctcctcaagcgctcggcatgcctsccactgactctgaagagtggccagtgctctctgcagctcgggtccgggggtgtggatgaaggagccccaggcagtctcatgagcacagagagcaccgtaggctgcggtgagctccggctcatcctcccagctacatgnctgcagcctcctatgcgcatcccagcgggcatggatcagggccagtccctgagcatccttggccaggaagctcaggtaccccagtgggttgccagggacsgccttggtcaagtggcaggaggtcctgtaccagcggagggcaggggagccccccagggccacccccaggaagcccagcatcccaaacagccctgcctgaacccccattctgcactggcccagtccagtcagacaaagcccctgggatgcctgcccttggtggccccaccaggcggcagctgagcagtggaacggaagcggagcccagcaggcccggtgcggcgggaccaatgaatggagctgcgggaggaggaggaaagaggctggagtatggggtgatcttgggcttgtaaccraatccaccagccgggcaggacgctgattggctgaggagtgcacttgccagggcccacgcccccattctgcctgccttctcagcaccatccagtcacctgctgccagccctgcctagattgggactatgggagccaaagccctaagctgtgggatgggga

SEQ ID NO: 96067 - DNA, 129482 bp, Homo sapiens
  misc_feature (1)...(129482): n = A,T,C or G
agaacaagaccctgtctcaaaaacagaaacaaaggcctggtgcggtggctcatgcctgtaatcccagcactttgggaggctgaggcaggtggatcatatgaagtcaggagttcgagaccagcctggccaacatggtgaaaccctgtctctactaaaaatacaaaaattagccgggcatggtggcacgtgcctgcagtctgtctgagctactcgggaggctgaggcaggagaatcgcttgaacccaggaggcggaggttgcaggttgcacgtgagccgagatcgtgctgctatactccagcctgggtgtcagagcaagactccatctggaaaacaacaacaacaacaaaaaacaacttgatgctcagatgaaaagcaaaagaagcctagatcctagacagagaagattttaaaggttaatatgatctggccactggcctcagaggcaccagctcaggaacagaaatgtgctctcaagaggcattcactataactgtccactcccaccagggaccctctgcacaaaatcccagattttctcaggataagaagcttcactaggagcttttggagccaaggcaatcacacacatactaataagaactgccatttaccaagagcttgctgtattggaatgctaaatctacattcatgatttaagcctcaccaataactttcagggagaagtattatttccattttacagataagcaaagcaaggcttggagaattttagtatcttgcttcagcaccggctggtgatatggtggaggctggatagagtgtgggcctccgtgggtcatagtcttcctcttttcagcacacctgctacctttcaaaagggttgttattgtcctggatcctgaacacatacatgcaggatatgctcgacatcatttgcttgataatttcctttagaaaaaattattggggccaggcatggtggttcatgcctgaaatcacagcactttgggaggcagaggcaggcggatcacttgaggtcaggagttcgagaccagtctggccaacatggtgaaatatcatctccactaactactaaaaatacaaaacttagctgggtgtgatgtggcacgcttgtaatcccagctactcggaaggctgaggcaggagaatcgcttgaatctgggaggtggaagttgctgtgagccgagacggtgccgttgtactccagcctgggcgacactgcaagactccgtctcaaaaaaaaaaaaaaaaaacggttcttgggctgagtgcggtggctcatgcctgtaatcttagccctttgggaggctaaagcaggaggaccacttgaggcgactagcctggccgacagagtgagaccctgtgtgtataaaaaataaaaaaatttagccaggtatgtttggtggcacatgcctgtagtcccaggtacttgggagactgaggtgggaggattgcttgagcccaggagttcgaggctgaagtcagccatgatgatggcactgccttccagcctgggtgacagagtgagaccctctcttttaaagaataaataaggagttattaatctagggactacaggcccttacaggattcataaattggtttcaggtgatcataaacccactgaaatcagaggcaaattttgatgtgtatttgcacatatgaatttttctggaggaaggagtccagagtttccatcagattgtcaaagaggtttgggactcagaaactggttaagaactactgcagtcagatccaaagacagatttgcccactggaaaatatttcaaatgcccaataacactgactcagggaactgatacatttctgggaaataaaagcagtcaaatgctacctagaaagcagggtcaaaactgctctgtgtaaagccattgcaaagaggacacttgaggaggctcaccgagttccatctctgtttcagcagaattgtttgacattttgcatctgtttgttccagatagctttagaagattgtattttcgaggaatgtgatacatgatgaaaggaagggaagatgatatatcttaagttcaatatgatagcgtctgatgatttttaagtgggcaaatgctttttgttatttttaatcaactttttttttttttttaaagacatggggtctcattctgtgatctagactggaatgcagtggcacaatcatagctcactgcagccttgcgctactgggctcaagccatcctcccaccttggcctcctgagtagctgggactacagacatgcaccacctcacccagataatttttaaattttttgtagagatgggggtctcgttatgttgcccaggcttttatcaaaaaaaaaatttttttttttgagatagagtcttgctcttatcgcccaggctggagggcagcagtgcaatctcagctcactgcaacctccgcctcccgggttcaagagattctcctgcctcagcctcccgagtagctgggattacaggcgcctgccactacacccaggttatttttgtatttttagtagagatggggtttcaccatgttggccaggatggtctcaaactcctgacctcaggtgatccacccgccttggtctcccaaaatgctgggattacaggcgtgagccactgtgcccggacttttatcaacttttaatggagtaagttgtatggatagagtatacaagcagctccataagtacatttttattgaaaatggtgctggaaaatgccattcacgttcatgcctttgtgcagctgttccttctatctataatgcccttcctcaccactttgcccagcaaacttgaacgttggctttaagctctagattaagatcatctgtgactcgagatgtctccatttctcttcttatgtagaattgttctgtcatctatgttctagcctgctatacacatccccatcactgtatcattgtcagttgctcatgtctgtttcatccagttaactgaccctctggaatgctgaagctgtaatagatttattttgtattccttgttcctagccacatagcaggtggccaatgtttgccgaatgagtaaaacatgagcttccaggtaggaaggtcccctttgtgcagctgtggtgaaagatactattgggtatatctagcaatttcaaatggtcccagtttatgacggtttgacttacgattttttgatgttatggtaggaaagcgacacacattcagtagaaaccacacttcaaatttcgaattttgattcaaaattctttataataactttatcgtaaaataggctttgtgttagatgattttgcccccccgtatggtaatgaaagtgttctgtgcacatttaaggtaggctgggctaagctataatggctggtagcttaggtgtagtaaatgcattttccggtggtttttttttttttttttttttttttttttaagacacagtctcgctctattgcccaggctgaagtgcagtggcacaatctcgcctcactgcaacctctgcctcccgagtttaagtgatttttgtgcctcagcctcccgagtagctgggactacaggtgcacaccaccacacccagttaacttttgtatttttagttgacagggtttcaccatgttagccaggctggtctcgaactcctgctcgcaggtaatccccccacctcagcctcctaaagtgctgggattacaggcatgaaccaccatgcccggcctccgcaaatgcatttttgacatattttcaacatattatgggtttatcagaatgtaaccccattgtacatcaaggagcatctgtacttgttaatgaatgaacaaaatgcctttcagaaaccyccagaagcaacctcctgactcaaagattaaggaaacagtcaagccaacgaagaaccagccgtcggggcggggagaaaaacaacaaaattaagcaatgaaaggtttccaggtcaggaacacctggggataagaacaggagcctgcacccaggtaagcagagagtgatgtctggttttgtttagagaggagactctttgaataggggggaaatactaacgggattggcagaagaatggggattacttgggagcattagagactggatggattaattcagacccaggcattcactctctgtgacaatcatctacaaatggaaacagctggattgtggctctactgctattgcttaaacattgcttatattcttgggtctttcttgaggataactgaaagagccgcaaggtgccatagaaatgacctaggaccatccttttatttgacagatgtgatgccttgaatcctgcccaggagagactctgctttcactagggtcatccgaggcaggcaggcaggcaggcaggcgggcaggcaggcaggtatgtctaggcgctctaggtagaaggctctgttccgaagactgtgaccttaggacaggcacaaggctgcaggggatggtagcaatggcccagagcctactttccttgggacacacacacacacacacacacacacagtattaaaagaatttgttcaagttgattgatgaagaatcaaataaaaataaaaaagaacttgtacatgaaaatgggtagtggggtctgggagcggtggcttaggcctgaaatcccagcactttgggaggctgaagcgggcagatcacctgagctcagaagtttgagaccagcctggccaaaacagcgaaaccccatctctaccaaaaatacaaaaattagctgggtgtggtggctaacgcctgtaatcccagctatacaggaggctgagacacgagaatcacttgaacctgggaggtggaggttgcagtgagccaagaccgtgccactgcactccagcctgggtgacagagtgagaccctgtctcaaaaaacaacaacaacaacaacaaggtagtgggtaaaaaacaagtttgataaacctagttttccctctttctaataataccagtttatttctataacatgctaacagagaggagtttgtttgctggagaaagcgcataatgagctttttctgtgtgtgtgtgtgtgtgtgtgtgtgtgtgtgttttgagacagtgtctagctctgtcacccaggctgtagtgcagtggcctgatcatagctcactgcagccatgaactctggggctcaagtgatcctcccacctcagcctcccagtacctgggactacaggcgcgcaccaccatgcccagctaatttttgtattttttgtagagatggagtctccctatgtttcccaggctggcctcaaagtcctgggctcaagtgatccgcccgcctcggcctcccaaagtgctgggattacaggctacagccaccgtacccagccatgagcttttggttctaacctgcaaccccgggagaaggggaaatttagcagaagacatgggaacacaaaccacaatgccactttcttgtttggtaaaattgtatgcagaatggataataacaaacatccgcctctcaactttatccctccctctcatctcgttttccttgtccgtatatggcacttctgcgattctggcaactttgttatgggtcagtggagcacacccgttgcacagaacacacctaagggctttgtctctttgagaagtccctcccttgaacttgcacgatcgaaagctcttaactgaaaaaaactggtattgcacgcctgtgtgcaaggagcttggtgtggacacagcccacggtttcatgcaaaccactcttcagtcactcaggagcccagagcctcgcagagacaggggtcaagacagagggcgaccgcgcgctgggtcccggggccagctctgctctcccttcccgggctcggggccagaccctcccacccaccgaccacaggaagggtgaagaccccaacccgcgggatccgggccccgcgcgcccgaggcaggcgtgcgggcgacgtagcagcgcaccccgccccgccccagcgtacgtggcgggggcgcgcacgcacgcaggcgcgggggcgcgcagggccgggccggcacggcggcgggcgcgcgcgcggctcggagaggcggcggcagcggcggaagcggcgagggcggcgggcgtccggctctgaggtggtggaggcggcggaggcggcggcggaggcggcggcggctcgggactgggctcggctggaagcagcgagggtcagagcgccgcagcaagcgccgatctcccggctcgaccatccgcctgccgcccggacgcctgggccgcggagtttgtgtcccggctcggaccccggcgcccagcccggagccgtaaccttgaggcggcggcggcggggccgggccgggccgggctggggggcggtggcgctggatccgcggctgcccgatcgttggcgggagatgtcgaaccccgggacacgcaggaacggctccagcatcaagatccgtctgacaggtacggccggcgggaggcccacccgcgccccggcgccccctcgcccgccccggaattccccgcagggcgcccttggaagcggccctcccccacgccggccgttgtcccaggacctcgtcaccccaatcggcgtgcgcccctcgcttctccctcctggccccgccccctcgccgttgcccggccccgccccctggccgctcgcgccccctcggtctcgcgttccctccagtcgccccgcaatccatcacacaggttccgtcgagcccgacgggctgtacccaacaaagtggccgattaaaaacnnnnnnnnnnnnnnnnnnnnatttccattcatgaccacgccccttgcatctccttccctggccccgcccctcgcttctcttttcctggccccgccccttgcatctccttccaggccctttcccctcacctctccccggctcggccccttgcctctcgcttcccttcctctccctagcacctgacccctcgcttctccccccaggccccgcccccttgcctttcacctccatccctgtggtcctttctcttccccacctttcctccccaaacctgaccccgcccatctctctggccccaccccctcgctcctctctgctcccgcctcctaactttctgtccccgccccctcgcttctccctgcgtccagctccctcgcttctctctggtcccgcctcctcacttctttcctagcctgggccctcacttcttcctggtcccgcctcctcacttctttcctagcatcggccctcacttcttcctggtcccgcccccttgcttctctcctttttttctcctccgcctgcttttaccccctccctccttctcctcgcttcccatcctctccgcccacctgccccctcgcttttccctcctggccttgctcctgttcccctggtcccatccctcacttctcaccactttcccatcatctctcttgctttcctgttttccctcccacctgctccctcccctcatcctcctggtctttcccaccacttccaagctattttgctacctccccttccacttgcccccttgcttctcccctcctgcccccacccaccctcttctcactcccccatcctctttcgtttctccctcacccccccacaccgtcctcctcccttcttcccctagccccgcccctcactttcaagccccgccctcattcctgcctagccccgccccctcgctgctgtctggcgaggcctccaccctttctttccttcagcctgaaattcctcaatcctatcttgtagctgctcccagtcctgctctcttcacttccccctggtccagccctcttcagtctcagtctgggccacttcctgtctcttaggccagaccgctagctacttttaactctgcttcttcaatttttaccttttctgcattttgtttcaccatcacccccacactcagcaacccagagcgccgtgaggctctgatccctactcccacactcactggaggctttggaagctgcccacacgcaggctccttgattcattttgtcttcaatgaaaagtccgtgtttcctgggtggctctgtagtgccaccttcaagggtgagcgcaacgctctgccgcgggcctgcgacttggtggcgcggatgtgatgccaacctgtttccccccgggctccagaggttctggaccaggctgcatcctcgtcttccctttctcactctcattggtactactctctttccagtttcaattcatccctaaagcaggatggccgtgttgcaaatgcggctctgctccgggactttccaaactcgaatatttccagctctggaaggaaactaaaaagttcattctaatccccgtcagggattttcccctggatttttctgttcagtggctcagtcgggtgagaactccaaagtcctggtttggtcaggtcctttcaaagagagaatgagcgttttgaacactttatggcagatgcgcagccataaagtcatcggtaaaatccatgcaaacaataggtaatttttttaaactaaaatttactttgagagcccatagttgttgcatggcccaacttttgtcttaagagaaggttttgtttttttgtataaagatatcaaataatgatttggacccaaacccagaccctggttttgtaacgtargaggtagtttcctctgggatctttgcttctggggaaatacatttctttatgccagggctgataggaaacgcttctcactttgtagatacaatgtagatacatttttatttatgtggtaagataaaagtaacatttttgagattgtaatacttgtaaagcttttaacttggttctgatttacagctcagtctgtaattgacatcagattggtttcagttatcttgttaaaagcgaaagcaactgattttgtgttagaaatatgatgaatgttttagaaggaataggttttaattgaaatgtttatgtctggtgtatgtatattaatcaatcctatttgccaagcctgagccttgaaagggaggacttggtttctcctcctaccaaattatttttggatttaggaatttagattatcgaagcaagaatgctttgaggaatttttggatgacatttgatagggaaggatcaggtgatgagtgttgtttctgaaacaccttttccctttccctttccctttcagtagatgttatgaatggtttgagaggatttgtgagtgtgatcatccttacaataggattgcggtttagcggtaatggtacacatgcaatgccagtacgtggaaccttagtttacctcgaaaggtttgaactagaagtttgttgacggtggaataggttttagtctcatctttctggttaagggaagtttgaattctcacttctgggatgttgagaagcaatctttcaaaatttgaatacttttgttacaggtttcagagtttatttccatgtttgttatttggaaaaaaaaaaaagactgttaaaaatgagggatatttcaaccagtcaatgaatagacacagagcgaaattcagtgcaaagatagtgaagatggcctggcgccgtggctcacgyctgaatcccagcactttgggaggctgaggcagatcacgaggtcaggaggttgagaccatcctggctaacacggtgaaaccccgtctctactagaaatacaaaaaattagctgggcgcggtggctcacacctgtaatctcagcactttgggaggctgaggtggggcggatcacgaggtcaggagattgagaccatcctgactaacacagtgaaacctcgtctctagtagaaatacaaaaaattagctgggtgtggtggcgggcgcctgtagtcccagctactgggtaggctgaggcaggagaatggcttgaacctgggaggtggagcttgcagtgaaccgagattgtgccactgcacttcagcctgggcaacagagtgagactctgtctcaaaaaaaaaaaaaaaaaaaaaaaggatactgaagatactacatttagaactttggggtccacgattctatttgggggtgaatagggcattagatttacagttaggagacctagattctagacagatttctcattaactacatgttacggaacaagttatttaacctttttgggtctcagtttctttatatatcaaatgagatttcagctccattataatactctttgatcctccttctcacaggatatatcaatttagctacctacttatttcaaattactgttgggcacttgggcttagtggtattcttaatcctgatattcagaaaattgtgttggagtgtagcacatgtgtttgatttatgccaagcattaattttgtgtattgattacatttatgactttatttcttcatgtgggattgtttttgaaaactgttgggtaatatgttgaactgctttggcaacctggtctaaacagtagaagaatatttgagcctttgtatttaaaataataacattttaacgaatgtttttgtggtattttagtaggaaaatagtttttaaatggtttcagtaggtttaggggcataatatatccagaatcaagtgatcttttgttaaagagcattatcttgtagtcattggagttcactggcaaatcaaacactttagaaacattttgattgaaaaatcaagcaggatttgcaaaaactttgttcttatctggtacacaaatgaatcccagacacattgtttaggccactttgggtaaaagaatggaattcagggttctacaatgctcttcaagaaaattaaattttattgtaatgtcaaccaattagttgaaatacaagtgcctaaacttttttgtgcttttatgcattgaaatactctcagatatcctggtgtttttatatcttttggagcatgactgcatattgtgaagtaagaaaaactctaattccaaacagagaggaacaaagagactttccttgatagcatgtggaaatatgaggttgtttttaaaattgtagctcgtgggatgtaagggtgacttgtgttttggcattcagatggtgcaactgtgagtgaaatagttgtggtaatagctgttgatgatgttggttgatgaattacaggtgtctcaattgattcaaaatagttaagtctctcaagaaagattaagaaaattgttaagactgttgactttgtcaatttgtaccagctaagaacctcacttatgtgaggcaggcaaaacttttgtttcaaaaaccatataacacagttgctgtgataagatggaataagtggtcagtttttagctccctttgcatttacattttccttagggtctgcctcaagtttaggaagatacagttaaggcagttctttgagatgaattattggaaggtgtaggatgggttagaacaaatgctgttgcaaaacttgaattgcaattatactttaagaagaatcacattctgccaaatagaggtttttgtcattgattttgtgatttgatcacatttgtgttgccttttagaacaactttcttttttcaaatccatttttttttccttttaatcttcttggcccacccaactgactttagacatgaaatctttcatatgctttatttctatctccatttttacagtagttgtgatttatcaaactaggatttttaacttcaagtccatctgtcagagtttaaaacctctagtcttgcagttacaaaagtcctttctgaatgttgggtttttctttctcttccacacattttcattttctcggttcagtcacaatgtcaggttctagtgtggaaaattgggtgaaagaaaggttttggaggctgtgttatttatgaaatatttcctcatggattaagaaagaaaaaaagacaaaacgacaaatagtgtttcaatatcacctcagtgatccagttaactagactggctgttttgtacaacatcgtgggcactggttaacagttaaaatagctgaattgtgcgttttattcagtggttcaaaaaagcctcaaatggatgaaataacttgatatcttcgccatgctctgatttgctgggtaagacagctaacttttaggatgcttatttggatcaattttttataatttcaaaaccattttagaggctaatttttttttaaacaaggaatatacaatttttttttttgtcactgaacaagttttaaattactgktttgttattttgtaagtgaatttgtaagtgaaagcctccaacttaaattagcttcttgtccagggaactcattctgactgactaaagtccctaaggcctttctagttaaaggaaagccatggagctatgtttaaaaaacaaaagcacatagctatggggcttgggcatatcttctttttaaaatgtcactattactgttttgtctccagatgcaatttaatccatttagatatttaaaccaagtggaatgttgtttccacatttctggactaatgggggaaaaaacaccctcatattgttttaaaacaaggcttaaataatgtataatcagcgcgtctggtgacgcgccccactctgtaattccagctgtgttcacctccactgcagctgaaaggaattctaattggctgaggaatgtcggcaacatcgtttatcactgagcaggaacctatcctcctggctgctgggtgatgcatttcagatgttttaagctccggagcccaacttgcagcttgcttwcaggagtctggaggagcatgtcacgaagctgcagattgtagatggcagcctgcgttctttgtatgttgggcatccgctgagttctctaaagggcatgatgctttcctgtggttccaacactggactggggatcagaaggtctgaatttgatttctaattcacacaagtaccacaatgaagaaaggggagggggtgcataggattatgatcttttcatgattcagttttcctatctttaatgccagagatctgtctttttagagcacaaaaggacctgctagagatggattaaatattttaatgagtagttatgaattatttatagagtagcacagtattaatacagtcatagattcctgttatgtcttattcctaaatagccaggtaaataataaagctaataacgtactttgacattgaagaaaatctatagaaccggttaataaacatggaaaaataatacaatgaattgataaattatgtattcagaaattccttagagaaatagtgttagaagccaaaaccagtattatctttatttttattttatgtttttcccaggccaggtaatgtgccatcggacagtatcatgtttattttttgttttgtttggagatggggtctcactctgttacccagactggggtgcagtggcaccataacagctcactgcagcctcgacttcttgggctccagtgatcctcccacctcagcctcccgagtagctgagaccacaggcatgtgccaccacggctggctaatcattgtagttttggtagagatggggtttcgccctgttgcccggctggtcttgaattcctgagctcaagcaatccacctgcctcagcctcccaaagtacgtggattacaggcatgagccactgcacctagccagcatcatctttaaatgatgaaattgtggaaacattcccattaaaatcaggaacaatgcagggatgtacactgtcaaaatagttattattaataactagagaaagacatcagaaagcaggaaacaaaattgctgttatttatagacgttatgatatatctttaaaagcccaaaagatcagctgaaaaacacttataaacaataaaaaactttagctggatggaaaatttctccatggcaaaaaataggataaaatcaacatgcaaagacaaactaggaacaacaatctgtaatggatacgaaaatgaaagtctggttttcctaatatataaagagccttcaaaatcaattaggaaaaggccagtacctaataggcaaagaatatggacaattcacagaaaagaaaatggaaatggatttgaaacatgtgaaaagacaaccctattttctctcttcttctttccttttcttctttagagatggggtcttgctctgtcgcccaggctaggctagagtacactggcgtgatcatagctcactgcagcctggaactcctgggctcaagcgatcatcagcttcctgagtagctgggactgcaagtatatgccgctgtgccctgttctctcttatgcccattttctttctctaaaaatttatttttaattgataatcagccctattcatactaaacaaactacaaattaaaagtaagaatgaaacaatttttcatctagaagagtggcagatcaaagagattgaaaatcttctgtgatgagacaagggtgtggaaaaacaggtcttttactctagtggttgagaatataaattgatagagtaggtaccaagagcagtttggcactgtctatcagatcataaatgtttatgctctttgatctagcaattctgcatgtaggacttttttcttatgggtgttttcacacatttatgtaaagtcyggtgtgtaaaatcattgcagcattgtttgaaattataaaagactgaaatcaatgtgaatgtgtatcagcagggactagttaagtaaattatcgtgtattcccaatgatgtgtagctgtaacataataagatagtgttttatattctgatatggaacattctccaagatatattattgagtggggggaaaaagcatgattcaaaacagaggctagtgtgtgtactatttgaataataaaacaagaaataaaaataaagggggaaatctatagataggtctgtatagaatacgactgaaagattttgactgttgatttcctttgaagagattctcctgttctcctcttcagaggaaagagagaggagagagggagagaggagagaaaagagagaagagagggtgacttttcattatatgccttttgtaatatttaatctcctcccttttctcacccccttgagcatgtattgcttttcaacaattaaaaagattaaaaagctcttaaatagataagaatttcttagagcaactagtaagtacactaactgccaattgttttgaaatgtagacattctgaaaaatcaaaatgattgtgccgaatgtaytttaaaaggctaaaatattatagcatttcaaagtacatactcatatttataaggacttcctcactaggaagattcctgggttctacagaataaaattcttggctacttgtcttatagctctgaacagacttattttcccagagagtatgtttattatgtaatagckagttgcctgaccccccaaaaagcttgttctatcatattaaaataaggcaaaatgattactttcagattaagaaatttggactctagatcttgtttatatagtgagttctttaaaaaactgaggtcttggttctgaataatagtggtttacataatttatttagaatgtcatttggggttatctctgacctatttttataaaataatctcatctttaaaataggagtaaaatgctcatttgcataagccagtaataataatttagtatttttccaagtatttatagtcaatgtgtttgccatgaacttttttaagggattgtttttaattttagaagtgctttaaaaagcaatattggcatctggctctgtakaagtagaaaacatggtaacttcaatgtgatatatttgcttttttcccctcttaggtctttggggtaaaaaaaatccaaagtttactcaattttatttctacatatattacctacaaattatagaggtgagacctgcttgctgcctgttcatacctgtcagtgatactaatacctcccgtctgtacagtgtttcatagtttccaaagggttctcgcatggttcctcacttgagcctggtgaggaaatacctgtaaacatgggtagaagttttagtcccttgtaaaactctggtataatatcaaaaccaggaaattgttcacagattctaaggattggggaaaagagaaaaataaacaaattgctcaggagtagaatttgcaaaaaaaaacgaaacaaaaccaaaaaactctggaaataaggcacgtttagccttacagagcgagaccctgtctcaaaaaaaaaaaaaaaaaaagtgggtggagaagcacttttcctgatctagatcaagaaatagaatattgctggtgcttggaatgtccctacaatcctgaaaatagctcattctcactttctacctccctcagccgcacccccctggcaaagataaccacagtcctgacttgtaacagcctgtttttgaactttgtattaatggaatcttactgcatgcaactggtttcttttgttcaatgttatttttgtgagatttatccgtattgttatgtgtggttgtacatcagtcattctctttgctgttcaatatcccattatgggcatataccataatttatccctttatctgttgatgggcagagtcctttctagttttggcttttaagactagtgctgtttggaattttcaggtatatgtcttttggtgagtatttgcatacacttctgttgggtgtatactcaggagtagagtcactggactgtggaataggcatatgttcaactgtaatgaaacttgccaaatgcttttccgaagtggttataccaatttacattttccaccagtggcgtatgagagttccaggtgctcctttgccaatctgcgtgttttctttttcattttaaccctttccttgagtgtggattggtgtcacatattgtggttctactttcttttttctctaatctataccttaaatggcagccttagagaccttttttttttcttttttaattttgaagtaatgatagattcacaggagatgggagagaaatgtaccgggaggtcctgtgtacccttcactcagcctcccccaattttagtgttttgtataactgtggcatgtcaaaaccaggaacttgttcatgggttctaacgatagggaaaaagtaagggcaaaataatgcaagcaaaaagacccrggaaactaactgtttacattggtgcaatccagagcttagtcagatttcactagctccgcgtgcactgcgtgtgggtggggtgtgtgtgtgtgtagcagtctatgcagtttgatcccatgtacaaattcatatcaccaccattgcaatcaagatgaccagctgcaccaccaccccagcctccttggagctatccctttctagccgcatccacccatccccagtccctgggaccctggcaaccactaaactgtcacccccaaatcttttaagagcataaatcagatcatgtcatttccttccttaaagccctccagcagctccctactcagaataaaatcaaactccctctgtgatcctgccatattcctctctggcagcctctgtgccaggttctgccttattctccaccccagtcctcaaatgtggcgagtttaatcctgcttaagggcttttgcatgaattattcctctgtgtgtgtgtgtgtgtgtgtgtgtgtccgtgtgtctgtgtgatgttataatactcttcctcttgacttctcaatggcttcttcctgtcattcaggccttcagcctaaataaatatcatcacctcagggataccctccctgaccatcccttcatagtccctccctcactcacgatcaggcagcctattctgctgtcttcatagcactcaccacttcatggtatttttgtttggttattctcccatcatccatctaccaatgtccaatcaatttttattttctgtctctgctcttggtagtcaagttccgtgaagctagggtccttgctgtctgtttacttctgtatccccttcaacactgcttggcacctgctggtgctcacaaatacctggtgaatgagagaattaatgccctccttgtttattgggtctcctggtcgcctctgagttgggcgtcggaggacacctctcctggaggcagcattgcgttcatagccacttcttgttgatatgagcagggattagagatcaagcaattacaggttgttgtcagccaggcttggggtttctttgactatgtgataccctaaaaggcaagtctactctatcttgggcttctgggccattccaggggcttgaaccaaagcccgaaattttaattctggaatttggcccagctttgtagcttttggtttccaggtcttttccttagcctctccctcagggctggcggggataactggttgggctggagagacatcattcatttgccccttgcccaagctttgcggttgcatcttgaataacgtttcccattttcaggctgtgaatactggacctgagtgcttgggagagacctggggaagccttcttttgctcaccctaccccacagccttatctcctgctaagtcttccctccctttctttcttcatcctatctcttggttcccctagattgcattttgtagcagaaagggcctcttttcctccctcttcactgcattttctttgagacaggatcttgttctgtcgcccaggctggagtacaatggcacagtcatagcccactgcagcctcaaactcctgggctcaagtcatccccacctcagcatgagccaccatgcccagctaatttttaaactttttgtagagacagggtctcactatattgcccaggcttgtccagaactcctggcttcaagcgatcctcccatcttggtctcccaaagtactaggattacaggcaagaaccacccacctacccatttccttgattctttcctaccaagtcccttagtgttccttgtagtcttggtggttgcatcagaccacagtctgattgtttctttccctgataataaagatagttaaattctcaggccgggtgaggagggtattcattgatttttcaccctgcctcctttcttcagctaatttccacatttttaattctgtcttttatgtacaatatcgcacttcctaatgttgttgttgtttaaaagcaggataccttcagatgtaagtagcagaaaacctaggttaaattagctcaatagagagaattttagtgacttcactgaaaagcccaagtcattccaatggcaaagcaaggacctggtttctctctatatctcagtgttttgacctcagcactattcatgaccatctcttccccttgtgctcaaaagctccatggctgtttgcttgcagctttaaatccagcagaaaagttaaaagtctgcttcttcaacagctcagtcctggggtagaaggcctggagttgaatcctcttgtctcattggcctaatttgggtcaagtgttcattgctgaaccaaccgctgtggctgggatgatgggatgtgctcgttggacaattaggttccatctttgaatctaatcagggggttagtcccacccacaatacagacttgggttgtttgggggaacaggaatatggatgccaggtgggcaatcaataaataactagatgataccgattgttttcttttaaaatttataatgttagcttcattatgctgagtaaaaggaaggtacagctaccatttaatgcacttctgaaaaagaagtataccttctttgtggtagtatgaagcaaaagatttggtaaaagtgccaagaatttttgaccaagggttaggagtggtacctttatatgtgaacttagccccataaattttgttgtcaatttgtattgcagaatgttcctggattgttgtataatgttatttgggactttttgtttttctttttggagacggagtttcacttttgtcacccaggctggagtgcagtggtgtgatcttagctcactgcaatctctgccttctgggttcaagtgattctcctgcctcagcctcccaagtagctggaactacaggcatgtgccactgcgcctggctaattttttgtatttttagtagagataggtttcaccatgttggccaggctggccttgaactcttgacctcagctgattggcccgcctcagcctcccaaagtgctgggattacaggtgtgagccactatgcccagcctatttgggagtatttttaaacaaaattcaggtacagattataggaatacattcttaaattatttctctagagataacagagcagttttaagagagagaaatacatgctgattatctgtaaattgaattcaggatgtgtagaaagaaaaataatttagtttttatgcaataatatgatttttataggatagttgattatcagccctaccctataataaattctttgaattaatgtctgttcttgatatctggggctctgtattttcacttctatattcttaaaaagaaaaaaagtttttgtaagatgcttcgctgaagttcgaacctgtgttccaggaatggttgaatcccacagaccgccaagctcttccgtttgtggaatcagcaaggtggaatgatgaagggctcggctggagccagcctgtgcctttacacaaatgacatcatttcttagtttccttagctataaaaatgggggaaggctgggtacagtggctcacacccgtaatcccaatatttggggaggttgaggtggaaggatcacttgagcccaggagtttgagaccagctggggcaacacagcaagaccctatctatacaaaaatagaaaaaaattagctgggcatagtggtgcacacctgtagtcccagctacttgggagctgaggtgggagaattgtttgagctcaagaggttgaggctacaatgagctgtgattgtgccactgcactctagcctgggtgacagggtgagaccatcttaaaataataacataacgtaaaaatggggaaataactggaatcacttcagtgttgttgtgggtagtaaatgaaataatccacatgcactgtctggtacataatgtgttcaatatgtgttagctaatagtaacatggtcttatttcaatgaatctaagatgaccgcttgcaagtcataccattgttttatgtactacgtaaaaagaaacacaggtaattatattgcaaaatgtgattcatttgaagatttcaaaacatatgaaaaaatgtgtcttgaaatcaatgatatatggttttagggctgcctctgacttggaagtcctgggaattgtttgcatactcataaatatacaccatctgtcttggtttaaacataatagagtatgatctaaagtttcttttcaattttgtttttgttctaaacttaacattgaatttggcctcgtgttgcaacactagaaatttaataatcactcatttattctgtaggcttaaataatggattatataacacctaagattggcttggcaacttcggttatttacttttcttcagtgatttagaaaaaatatgagacatgtttttggacatcgttgctattgcttgaataaacctgtttgggaggtaaaggcaggttaaatggtagtgccggtaacctcttagagtagcacgaactattggcagaaagcctgcttaggtaaacacctttgatacacccagcacattcagtttagaaagtacaatattgatatttgaaagcaatgcgtggtagttgattttccactaaaatttaaatgtggacagggtattatagagcttgaatgatagtcacaggctatttaaggaccaacttgtagagtaaaaagttgctatgtaatacgcttagcataaatttagaagtaaaacctgcaaggatagcatatagccttgtgagaatgccatttcccttaggagcctggtatttagaatgttatgaatgggatatttattataagcctgttttttttgtaaaggcttgctttttgatattaatattgaaatgaattacggaagccgttttggggacttgacctgtttactgactgcgtcattcatggcttaacctcatcagccaaatgtcagcaggattctgcttttaagacaaccacatgagaacagatgagccattcggtcatcttgtcataagccccagaggctatctcctggcacatctggcatgtgatgtatttaagtattatttgagggtgttgagtataattttgtaaaagactgtaccctggtacattccatatcttaatgcattctgaaacagcgatattatttttttttggaaaccccagagggtttatttactgtattttgcatagggttcatctgaacagtacaaaaagtacctttttattttagaaaaggagttttggtttagaaaatggaacctgaattgaaataaaagtaaaattattctcaaaaggagacagtttatcgatttaagtacatttcgtatcgcctatgtagtagcgttgtttatatttagaatagacgcaagccagtccacgatctctcagcaagacttgacaaaaggatatgattttgtcacagttactcccagtgtttcatttcaagcagtatgagtcaaggatttggtgtttctcatactagaataaattggactttattcaggaaaaaamcccaacttgttaatttgaagtgcatgtctcaaagcctaaacattattttagttagtatttctaagtagataatacatacatatggtataaaagggtgattgtgaaaaatatgcctcctttcccctctgtcccttgttaaccagcttgcctccagagaaagagctgttcttttttttaattttattttaaattttttttagagatggggtcttgctatgttgaccaggctggttttgaactcctggcctcaagtgatcctcccatctcggccttccaaactgctaggattacagccgtgagccaccaggcccggccgagcttttcttaccatggtattcttgtgttcttccagagatttttttaaaatgcctcttccttttctcactccctccctctttttcttttaacacagatgggagcattgtgtgtgcattgttgtatacttgctttttgcacatacggatcagggatttctctgtttccttacctcctgatctgcctgcgtggcaggaacattcactatgcaatgactatccctgtgctcgtcaacgttcccgtgtgaccttgcagttaggtgggaccatgtaactacttctggctagcaaactgtgagaagtragttgtcccacttcggggctgaagcactaggaacctccagctctgccacagaagctgtgtgtcatgtggtggagcctctatcagcctagatccctgagtgattacgtgaagccgaagctggcccttcccccctggcccctgctcagacccaacctatgctgaacacgtagttgagcaagaaataaacttctgttatgttaatttgtttctacatcacacagctcctcttgatatagctgatttctttttaatagctgtgaaattcataacactttgaatgaacccagttcagatgatcaaatgcttaagaacaaaaaagcatctaattaaagaataataactttaaatatacaaatatcagatcaatgcatcttatcccaatgtgttgccacgcaaatatctgtatacataatttctaattaaactttttaatttttttaaatttatttttctgagatggcgtctcgctctgtcgcccaggctggagtgcaatggcgcaatctcagctcactgcaacctccatctcctgggttcaagcaattctcctgcctcaacctcygagtagctgggactacaggcacatgccaccatgcccggctgatctttacatttttaatagagacagggtttcaccatgttggccaggctggtctcgaacatctgacctcgtgatccgcctgcctcagccaaccaaagtgctgggattacaggcgtgaaccactgcacccagcccagcccataattaaaaaaaaaaaaaaaggaatatatgcttattgaaaagtataaagaagaaataagtactttattatttgaaatgaggcttgattctttaatattaaggcttataatttttgcattagaatttgatattaattttctcgtcattctaaaggaagataaataccaacgccatacatgctcgctgttctcattgaatactacagtcaatagagaggagtattgaaaaagactgtctctaccagaaacttaacagccatagggaaatggtacattcgctagaaacagttaagtaacaatacaaagcgcccctgagtctagttgctggggaggccaaatgtgaactggctctagaaagatctgggtgggctgagagaccatgtggtaatagcataagcgaagacagagtggacatgagtctggctgctttgcaggtcagacggacagaagaggtgccaggcaggtagagggaagagaggacacttggcttctgtagaagtcgtgagttgtcggggagattggatcaggaaatgagatgataaattgtaattttataggcctgctgggtagaaagtagggacttttcctttcatgccctgaggatagcatgggatccagggactggagtagcatggtaactaagggccaggtgctggaggcaagtggcctgggttccagtcctggctttgccaccttctagccgtggaaagtgccagcagggtgcacgggtaagtgtataggtaatgtgagctgtgatgatgactgctgttgtgctacttgggaaggaacctggtgacacagagcgacacctaatgagggaatagattaggccccattcacaaagtgtgttactgtgtttacacaaatgctggatgatagtctttctaggatgtttcataagcactcctttattgggcccaaagtttagactaagtgctttacaaaggttctttaaaacaaaaacaaaaacagaaacatttattggctgggcacagtggctcatgcctgtaatcccagcactgtgggaggccaaggtgggaggatggcttgaacccaggagctcaagaccagctggggcaacatagtgagaacctcccatcttttaaaaaaacaaaaacaaaaaattagccaggcatggtggtgcatgcttgtagttccagctacttgggaggctgaggcaggaggatctcttgaacccaggagtttgaggctgcagtgagccatgatggtgcttctgaactccagcctggacaacagagtaagaccctgtctcgaatgaatgaatgaatgaatgaatgadtgaatgaaaatttttattgaataactactatgctctaggttgtctggcaagtggagtactggatataataaacagggtagagaccagaggaagtaaatactgtttatccattctgtacatggttactaagttaatgtcaggtttctatttggcccttgaaaaaccactccaagtaggtgagaagtgtctgtaagtaagttaaatttttgtatgatgacggatgtcttgataaagcgcagtggcattcagagggaagtttagttggccctgccctggatgtccttgctttagtatcttgctgctttattgtaacatgctttcttaaaaccttcttagaagtactagttggatcccaactgtggctcctccagtcaatggtaagttagtatttgtgtagtgacttttttttttttcctttttgacactggacctacttccatttacagtcagatactgcttaaaacctttttgtgggcaaagtaggtcaaacctaaagtgcacagaagggaactgttcaggtagagaggcagattctgtagaagcgcctgtcccgttttcccttccctgccgttggatcacttttgctagagctgtgcagccttcatgcccaaagcttggagtctctccaaaagtattctagaatgagattctgccaagtgctagcattaaagcttcagtattgggactttggagtgccccttctgccctttggcctttttaaatggaaactgggcgaggctggtaagctataccttactattctaaggtgaccaccacktggagtgtgggtttaagactgctgcyaacctggatttccagtacagctctgctgcttgctagtggggtgactttggacaataataataaagctatttgtcaattattgaagctctttactatttgccaggcagcaatgaggccaagcacttttcatgagttgtatttcctcctcttgataaactcacaagataggtcgtattcttgtccctatttttgagacggtgagatgcaatggagtcagccaacccagttccaccacataccagtagccttggccaaatcatgtgcttcatctttaagcctcagacaagacctaccccatcaggttgttgttgcaaggaacaagtgaagtaacctggcacccagctgttgcccagcacatgttaggggctgacttgcctaaggctgcactgagagtattttgcaagtggactaaagttgaactgctttgggaagatatttggcttcttactttgtaagttggagtaaagattgtttctaaatctagttcttttcctttttgtctctagattaaactcttactatatcattcagttaggagctctcatgtttagccaacgttctcagaaagtgatcagttcaagggctgtggcatggaggggaagtgatgcaagctttattatgatacagatgagtaaccatataaaatggaaaataatatttgttctccccacattcccatcccctcttaccaacctaatatttatctatctatctattttgaaatatttgaggcagagtctctctctgtcacccaggctagagtgcagcggtgcaatcatagctcactrtagcctcaacctcctgggctcaagcagatcctcccacgttggcctcctgagtagctgggactacaggtgtgcactaccatgcccggctaattgtttaattttttatagagacagggtctcacaatgttgcccaggctggtctcgaactcctggtctctagtgatcctctcagcctcccaaagtgctggaattacaggcgtaagccaccacgccctggccataatatttatttttttattgccatttataacttggcttacactgctactggctatttactaaaaatcagagcaaactttgccttattattatgtattgcatatatatttttgaaaggtcactcttgcagttttactaaaaaaaaaaataaataaaagtttcagtgaattccggaagtttgggaattctcggtttacgctagccctgtcctgtgtttctgtttggctctgtcctcaggccttgccaccattttctctcggtgaaagaacttggcttcacattctgttcagtttcatgaacctgcctgtcactttgaggcagcgtttgggattctgcttcattagcctttgaactcatgaaccaagttgagaggatttgctactatagacaattatttgatcttcgagatattttgaacagttcccaagtgcaacaccagtggttgtccaaaagacacagagaagtgatgtgaaattttaattaygtaaaaaaaaaaaaaaaaaaaaaaaagaaagaaagaaaaaagccctgtggcatggttgatgtcagtgctatggagtgagccttttagtagtgcggtcaaggacactacttttttttttttttttttttgacacggaatctcgctctgtcacccaggctggagtgcaatggtgccatcttgactcactgcaacatctgcctcccaggttcaagcaattcttctgcctcagcctcccaagtagctgggattacaggcgcccgccaccacacctggctaattttgtattttttagtagagatgaggtttcatcatgttggccaggctggtcttgaactcctgaccttgggtgatccacctgccttggcctcccaaagtgctgagattacaggtgtgagccactgcgcccggcctttttttttcttcttcttcttcttttttttttttgagacagagtctcactctattgcccaggctggagtgcggtggcccgatctcggcttactgcaacctctgcctcccgggttcaagcgattctcctgcctcagcctcctgagtaactgggatcacaggcatgcgccaccatgcccagataattttgtatttttagtagagatggggtttcaccatgttgcccaggctggcctcgaactcttgacctcagatgatccaccagcctcagcctcccaaagtgctgggattacaggcgtgagccacctgcccggcctaacatttcaaaatgctaaaaacaggttcttgtagtcttttccttgggtccagcatcgtttgttgctgactatrtcaagcagctaccaagatggcgcagtgaaggtgatgcgcagtggagactgttcccctcgccgctccctggttcctgcagagagtcctgttggcagctcgttggaacaatggttttcccctggagtttgaggagcttgtcttgggtgtggtgcatccctacaccatgtgtacagtttccagactgctatgattttatctctcagcaatgcgccaagaggttttagtgaaaatttaaaaaccgccaaatcgcctatcaaaccgagtttgaaaagagacctcttgggaaaggacaagctaactattctaagtggtctacgatccaaagcatttcctgggctgagtgtttatcaaagctgagctttacttccaaactaagcttgggaaggatctggkagtgtttcccagctgactgggggcggggagaagaggaggatgcgagtgttaaagaacagagaaaatatcactctcttttcttttacacagttatctgctgaaatctgtctatagatatggcttgcaaactaggtgttgttttggaggagagagaggataggtctgctaagtgttaatttagaaattatatacaatatcttaattttattttgggaatggaacattgggtaagattagcttttaaatggatcagctttactcttcaaggttagaaaaatgcatagaaaatagcattatttccctgttaattgtcattaatctcaactcacactattttttttttttttttttgctttgactcttaccatctcagaattcaaggtctaaattgacatatttgggaagagcagggtgttggggaaacagaactggtaagtagatggttttcctctcccatctgactcagtgttagagaactctgttggagacagtgttaatttcaatatcttgatgcccgattttatcgttacagacatcctgttatacagaatagcttatttgctctcttaatagaaatcttgtaaagaaaatccatcttccttatttcactgtttctttccctaaaagtttttgtataccacccctttatcaagaattaagatgttggggaaaaaaaaaaaacaaatctttttgggctaaataatgccagcttcacttccctcaatgatgacacatttatctgtattttaaagttgtttttttttttttctccctttcccactacactgctctgcatgtgggttccctagctgagaagctgccattgatggtgaaagactttaatctaaatttagattctcttcagaggtttcgtggaatacttccttaaattaagccacagactgcaaaagctgctgctgagtggggcttccaggtttgttttttttttttttcagctctagaaataaagaagacagggcaggaaggactggctctcactctcggcttctttgggagattctgccattgtagacagaatcagtagcagcttctgtcatgaatttaaaactcaggagagaggatttggtggtaatctgatggaagtggaaaacaatcacgactctgagggagtgtgggtgaaacaagttgctttgtttaggttgtgttggagactgtaggtagtaatagacaatgataggacatctttttgtctgatgcctgtaagtgtacctggagactttgaagccatacttgttagttcattcctgcattactaaaaagaaatacctgagactgagtaatttacaaagaaaagaggtttgattggctcacggtcctgcaggctgtacacaaagcatggtgttggcatctgcttagcttctggggaggcctcaggaagtttccaatcatagcggaagacagagagcaggcatcacatggtgagggaaggggtgaggtgccaggctccttaaacaaccagatctcatgggaactaccagggcaagaactgactcattaccatggggatggcaccaacccattcatgaggggtctgtgcccatgacccaatatctcccagtaagccccatctccagcactggaggtcacatttcagtatgagatttggagaggacacatatccaaaccgtatcaccatgagttaaaccaatacatcaaatttttagggacagttggaagatcttcagagtcaagacaaaagagttgaaaatggggtgttggactataaccatgagtattttatacaatctctctttctccttgaatcatagaaatggtgtttgaaagctcctttcaatatagagaacccccttacctgtcagtgcccaaaggcccccaactggggagatctgaagtgagaggaggaagctgcccaggttttcctgtccctggagagccatgggtcctgaggattggagcttatcattgagcaggctgttgtcacatacacagccttccagcttctattatgatgcattgtactgtttatataatcttgtatttgggaaatgcctaattatattttttaaaattactccaatatctgtcactgttagataaacacttctagaatctcattcccagtgttttctttctcctggcatgggtcaacaaccttcctgtgagcatattttcattatataatggcccctttatttacatatttactctttctaaaaggttaatttctttgtggggagggaaggtgatatatacacagtgtaatatttaaactgtacaagatggcttatttggaaaggaaatctcttcacgcctkgcctttgccttcaagttctcttccccagaggcaatccactggtaacaattccttgtatattttagcaaagatacgctagataaaaatactygtacatatattctttctctacctccccatccccctttaagaagaagcacactatacactgttctttactttgcttttttcctcaatatatcctggagatcaggaattcaagaccaggctgggcaaaatagcgagaccctgtctctaaaaaaaaaaaaaaaaaaaaaaaaaaaaaaaaaaaaattggcatgttagcttctcaggaggctgagatgggacgatcgcttgagcccaaaaggttgaggctgcagtgagctgtcattgcatcacgtactgcagcctgggtacagggcaagaccctgtctaaaaataacaatgcagaaataaataggaactatcttagagatcctcccatatcagtataatatagagctgtctttaaaaaaaagttgaggtaaaattcttgcaacataaaatttacgtgtataattaagtggctcttagtacattcccagtgttgtacaaccatcaccactatctaactctagaacattttcatcacccccaaaagaaacccaatactcatttagcagtcactttctgttcccccaaccctaggctttacaactactaatctgcttctgtccctatgaatttgcctgttctacatgtttcatgaaaatgaaatcatatgtatgtggccttttgtgttggtttctttcacttggcataacgttttcaaggttcaatcctgtcgtaacttgtatcaatacttcattcctttttcttgctaagtaatatttgattgcatggatagaccacattcttttaattgattgacatttggattgtttctgcttcttggctattgggaatcatgctgctatgaacatttgtgggcaagtttttgtgtgaacatatgcatatgtttttattcttggatatgtacctaagaatggaaatgctgggtcatatggaattctgtatttaaattttgagggactgccaaaccgttttccagtcactgcatcattttaccatcccatcagtggtgttcaagggtttcagtttctccacatcctagtttacacttgttattttccatcatcgttttgttttttgctgtttagttattattacaggcatcctaaagggtaggaagtagtatcttattgtggttttgatttgcatttccctaatgactaatgaggatgagcgtattttcatgtgcttattggctacttgtatatcttccttagagaaatgtccactatttatccattatttgtatatcttccttagagaaatgtccaataatttttgtatttttagtagagacaggtttcagcatgttggtcaggctggtcttgaactcctgacctcaggtggtccgccygccttggcctcccaaagtgctgggattacaggcgtgagccaccacgctcagcatatatattcttgatattagactcatcagatatatgatttccaaatattttctcccattttatgggttatctttttactttcttaacagtgttctttgctgcataaaagttttaaatgatggagttctttatttttaaattttgttgtggccgggtgcagtggctcacgcctgtaatcccagcactttgggaggccgaggtgggtggatcacctgaggtcaggagtttgagaccagcctggccaacatggtgaaaccccgtctctactaaaaatacaaaaaaattagccaagtgtggtggtgggcgcctgtaatcccagctactctggaggctgagacaggagaatcgcttgaacccaggaggcggaggttgcagtgagctgagatcatgctatcgtactgaagcctgggcgacagagtgagactctgtctcaaaaacaaaaacaaaaacaaaaaaagcgttgtttgtgcttttggtatcatattgaagaaatcattacctaatccaaagtcataactaatttacctctatgttttattctaagagttttagtattttagctcttaaatttagatctttgttctattctgaattaatctttatatatagtgtgacataggggggtccagatttatccttttgctagtggatatccagttgttcctgcaccatttgttgaaaagactgttgaaaaagacttttcccccattgaatggtattggcaccctcttgaaaaaaaaaattgactgtaaatatatggctttatttctggactctcaattgtatcctgttgatctataatgtctctccttatgccagtaccacactgttttgattactattgctttgtagtaagttttaaaataggaagtgtgagtcccccagctttgttctttttccagatcgtttttgctatttgggctcccctgtagttttatatgaattttaggatgagcatatccatttctataaaaaaggcacttggggctttgatagaaattgctttgaatctgtaggttaattttaggaatattgtcatctaatattatgtcttcatattattaagtctgtgaacacaggatgtctaagtcttcagtttctttcaataatgtaattttcagtgtatgagtcttgtatttttttggttaagtttatttctaagtattttattctctttgatgctaatgtagatggaattctcttctgaatttcatttttggattgtcattgctggtatattgaaatacagctgattttagtatgttgatcttgtattttgcagttctgcagagcttattcattagcactaacagcttttgtgtggattctttagggttttctatatataagattatgtcatttttcaatagagatagttttacttcttccattccaatccagataccttatttggcaattgcagtctagtcttgttcctgttattagtggggaagccatttggtctttcaccagtaaatatgatgttaagcartgggtttttcatagatgtcccttatctagttgagggagtttctrttccaaggatgttgaatatttttatcatgaatgttggaatctgtcaaaaaaaatgttctgcatcaatttggatgatattgtggttttccccctttattcgattaacatggcatattacattgattgatttttgtatgttgaacccttgcattcctgggataaatcccttgatcatggtgtataatccttttaatatgctctatgttaaatttgtgcatatttcrttgaggattatttgcatctgtactcataaaggatattggtctgtaacatctttgtctgactttggtatctgggtgatactggcctcacagaatgagttaggaaatggctcctcttcttttatttttggaagaatttatgaaggggttttgttaatttaaaaaaaaaaatgtttatggtaaagctcaccagtgaagccatctggtcttagagtttttctttttggaagttcttttggttattgaattaatctgtttgttataggtctattcattttgctctttcttcttgagtctttaaaaaatttttaatttttgtgttgagtcagtttttgtagtatgcatatttctaagaatttgtccatttcatctgggttacctaatttgttggcatacaattattcatagtatttttttttaagttgagtagtagtgtccctagtttctctttctctctatttctttcaagacagggtctcactctgtcagtggtatgatctcagctcactgcagcttcagccacccaggctcaagtgatccccgcacctcagcctcccaagtagctgggattacaggtgtgtgtcaccacacccagctaatttttgtcttttttgtagagacagggtttcactgtgttgtcaggctagtctcaaaactcctgagctcaggtgatccactcgcttcagcctcgcaaagtgctgggattacagacatgagccactgcactggcccgtgtccccactttcatttttttatttctagtgattgaaatcttctctcctttttccttggtcagtctatctaaagatttgttagttttattgatcttttcaaagaaccaacttttgattttcttaattctctgtattgctgctttattctctatttcacttatctgtgctctaatctttaatatttcctttcttctgcttgctttgggttgaatttgctgttctttttctaattccttgagatggaagtttaggttattgatttcaggtcttcctatttcaatatatgcatttatagctatgaattttgttctcttcactgcttttgttatatgccacacattttgatatgttgtattttcattctcattcttctcaaagtattttctaatttctcttgtcatttttttcttgacctattgattaacagtgtataagttcacatttttgtaaattccaaatttycttctgttattgatttctaattttattccagtatggatgcagaagatactgtgtattacttcattcttttaaaatttattaagacttgttttgtggcctaatatgtatcctaaagaatgttccacatgtgcttgagaagaatacactttctgctactgttgggtaaactgtcctgtatatgtccgttaggtatagttgctttatagtattttttaagtcttctgttttcttgttgatcttctgtttagttgttctgttgttattgaaaatggagtattgctgtctccaacaattattgtagagctatttctccctcaattttgttagtttttttcctcatatatttggggctctattgttaggttcatatatgcttataattgttgtatcttcttgatggtttgactcttttatcattatataaggtttttctttgtcccttataacaatttttgtcttaaagtctgttttatccgatattaatatagccactgcagttggttactgtttgcatgggttatccttttctatccttctattttcaacctatttgtgtaattggatctaaaagtaatctcctgtttatgttaagtaaatattttctagtgtattattttaattccctttagtacaaatttaaatagtattttcttagtggttgccccgtggtttacaattaacatcttaatttataacaatctagtttaacttaataccaacttagtttcaatgatatataaaaactttgctcttatatagttctgtccaccactttatcttgttattgtcacagattatatctttatacattatgtgctcatcagtgtgtatttgtaataatttttatgcagccatctgttaaatcatattttaaaaagaagagttacaagccaaaaataacattactattccttttttaaatttgcctatatattttcctttattagtgttctttatttctcaggttactgtctaatgttcctttttttttttttttttttttttttagacggagtctcactttgtcacccaggctggagtgcagtggcatgatctcggctcactgcaagctccgcctcccgggttcacgccattctcctgcctcagcctcctaagtagctgggaccacaggccccgccaccacacccagctactgttttgtatttttagtagtgacagggtttcaccgtgttagccaggatgatctcgatctcctgaccttgtgatctgcccgccktggactcccaaagtgctgggattacaggtgtgagccaccgctcccagccgtctaatgttcttttgtttcagcttgaaagactcccctcagcatttcttgtagagcaggtttactatctacaaactttcttggtttttagctttgtaatgtcttcatttctcctttgtatttgaaggatagttctggcacatatagaatttttggttgacaatgcttttcttttagtaatttgaatatataattccattgcctttggctctatggtttctgatgcgatgtcagatgtgacttttattgaggatgccttctacatgattagttgtttctctcttgctgttttcaggattctctctttgtctttgtcrtataacaatttgattataatgtgttmctgtgtgtatccctttgaatttatcttacttaaaagtttgtttagcttcttgaatgtgtagattcatgtttttcatcaagtttgggacacttgcagtcattatttttaaaaataattttcctgctcctttctcttctctcattctgggattcctattatgcttatgttatgccagatggtattccacagacttcttagactctctttatttaaaaaaaatttttttttatttctgttcatcaagccagaaaacctcaagttacctattctcaggtttatctattctcatgacttcattttttacctgttcaaatctgctgttgagcctctcgtgaatttttaatttacattattgtacttttcaaacccagaatttttatttgattgcttttttataatttttgtcactttgttgatattctgtatttgttgagacactgttctcatggtttccattagttctttagacctggcttttgtttttgtttttagctcttcaagcatatttaggaccattgatttaaatagtctttgtctagtaagtccagtgactaggcttcctcaggggcaatttctgttaatttcttttttctgggtataggccatagttttttgtttatgtcttgtaatttttttgttccaaactggattttttgtatattataatgtggtaacttaggaaatgagatgctccccctccctgtggattgttgctgcttgttatagctatgccttgttcatttaggacttttctgaactaattttgtgaagtctgtatcctttgtcatgtgtggccacagaggcctctcttccactagcttagtggtcagctgatgaatcactagagatttatttacacgtctggaatgacaacaacaacaacagaaaccccccagtctttgcagatgggctgtgtgtatgttgtgaggcacgccttcaaggtgcagccaggcattttacaactctgtcttagtttttacttcctgtttgcaaagatcctgaaagtcagccagaggtaggagcttagggccctcttaggtcttttctgagcatgcacccagttgtggcatgcatgtgactttcttgattcacaaaaatatgtaggagctcttcaaatgaagcccatattccctaaagtatctcattccttagcctttcctcccaagtgtttacattagtccattgtttgtctcttgccccaggtaatagcaatgagtacattaaatgttttcaacaaatgcatgcccctacaccccacctctcctcccctgtagacctctaccactcccacacttctacccttgatatctaccttagccctgggagagttctgagttaggcaaaagacaggcatatcctttgagccagttcttcagggagccactagacaggtcaaatcagtcaaccacaattctttgagaataagatatgttctgctccctgtggtactaggtacctgtactggaatgttagctgttgccttcaaggctgctgctgaactggggagtggatgggaccagggtaaattaaaattccatgactctctcttagctgtttattttgtattaggtgttcccttgcttgtagtaagcttttgattatttcccagtgttctgaaacagttgattctggcagtttttgccagttattcattgtttttaatagagtgacagacttggtgttctctactgtcttagtccattgtctggtgccataacagaataccatagactgggtaatttataaagaaaagaaatttatttaaaattaatttaaattgaaatttgctaaatagctcttcatagagattattttagtttatatgcctaccagcaatgtctgagagtggctgtttctctataccatcatcaacactacttagtatcaaatttcttgatcttcacaaattgatggatacatgccatctctttttggtttattggtttttctcttatgattttggataaacatctttttaggtgtcattcgtatttggttttccactgaactgcctttttgtatcattgacctttattccattattcttggcctttaaaatttatttattagttattaccactacctcttgactagggtaatatattgaactggttcaaaaatcaaagtgctataaaaaggagtactcagtaagtcttgcacctgcagttggtagctattttattagtttcttattgatccttccatggttctcaacatgcaaatacaagcaaatgctaaaatacttgttaactccctttttacacaaaaggcggcaccctatgtctaccacttgtgtattgtttttgtcatgtactattttcctggggaccgctctcatcctttttcatggctgtgtatttaccagaatttactcagtcagtactgtgttgctggatcacttcggctttttccaggcctttgttcctcagtgatgtgctaagtagccccatgcatgtcatttctttacatgtgccagtttgtctatggacgacattgccagagtaagattgctgagttaaacggcacatgcatttaaaaagatatgatagatatggctggacttccctacgtaggtgttgtaacattttgcatttgttccagtctgtttctgcatcatcttttcaatagattgtcaaacttggatttttgccagtctgataggtgagagatggcatcttattgtaggtttaatctgcatctctcttgagtgaggttgagggtcctttcatatattcacgggctgtttatgtttatttcctgtgagctagctcttgatatctagttccctgattcttccccaagaaaaattccataaatattttcacaggattgtgttaaattcctagattaatttggaaagaactgattttatgttgcatctttttatccaagaacttgttatgtttctccatttgttcaacccttcatatataaaactttcttcatatggttttatttctaaagtttatttctaggaattttatcttttttcactgttgctttaaatgagatctttaccacatctgtgaactaagattgcctgtagatacaaaggttgttgttttcagtattctaattgtgttcccagttatcttactgaattattcttattctttataatagtttttcagtatattttcctgataatcatatcaatgaacaatgtttcaggacctcattttttatttctagctctttttcttattctgttgagtcattagtgcatcccaacactcttctacagtacaaaggagtctgtgtactatgtactatgtgttgctggtttgagggatgtccttgtttgctcttggctttgatggaaatgtgtcttaatgtttgtccatgaagcgagatattagcttttgaattgaaatatgtatattttatcatgtggagaaaacatttatatctttttcttgtattaagtttaaaaaaatcatacttggatgtcgaattttatcaaatgctttttcgttatctttggtgactcactcagagtccagtcagaaaaacaaactactccaggcatttcagatggaagagattgaatatgaggattgggttatatacgagttcaaaggctgacaaaatacaaaggaaatggggtactaggatagtgcagacactgtcacttccagggctggggaaaaataagagatggtgttaccacagttttggagcttggtgcagggctcctgtggggctggtctccaggcctccgagagaggcactgcagaactgctgtacagatgtttgagggtgtgggtgcagctcagtgagtgtttgaacccctagggagggtttgtgacctggtgggtgccaagtcaactgagagggctcccatctggtcagcgtttgggagccagccagtgagggagtgaacacagtatagcctgaggacaacctggggctaagccctgcggcttgccggtgtctgtgagggggtgtggcgaggctggcactaagagtgacaacggaagatgggggctggaaccaccatctgctgctgctggtggcatactgacagaaataggaaactaggaaggaagtccctttttctctcctgtcatcttccatcctctctctaggacttcctgttggcagaagttaacagggagtcagycaacaggggtctggaaaacctaggtaagttggtgaaactctagccccagcgttatagagagagtatagcagagtaggcttggagaggaaagaacgtgggtaaataactgcacatcaggaatcatgctattcccttaacatgtcacttctgggtgtacagaatgactttcaacacgatgcattagcttaatatcatattaggaaaactcaacctcttccaaatttccggtcacgccacaaatttgttactcttgtcaatactgaattccattctgttatgctcagaaggttactaagagccttcttactaaacttcttccttgatttaaagtgtgcatattactttaggcttgcagctgtgtgtctagtgatggaattgaagaaatggctctggaaaatgctctgctcatctaatgggcaatgctcctgtgtccttttctttttttctttctttctttctttwtttttttttttttttttttttgagacagagtttctctctattgcccaggctggagtgcagtggtgcgatcttggctcactgcaaccttcacctcctgggttcaagcgatcctcctgcctcagcctccccagtagctaggattacaggcatgcaccaccacgctcggttaatttttttgtatttttagtagagacggggtttcaccatatttgccaggctggtcttgaacccctgaccttaggtgatctgcccgcctcggcctcccaaagtgctgggattacaagcgtgagccaccatgcctggctgagaattgcttgaacccaggtggcggaggttgcagtgagccaagatcgcgccactgcactccagcctgggcracagagcgagactccgtatcaaaacaaaattgcaagtctttagtgcaagggcgtaacagggaatgcctggtatggaccagttgttaaggctctgcacagcaacaatggccaagtgttctttatgttgtgagtaggttgtgaatttcattacagtgtgatgaggtttgttctgttcgtggtttttgcatactttcaagggattttcttaaacttgtgagttcagagatgtctgttataaatgagattttaagaagaatgacttttgaaagggttctcacataggcaaattaggtcagcaacttcactttccatgcttttcacacgtttgggatacttgtcacctagtttctgggtcaggtgtgtatatatgccaacaggctggctgtttaggtgaacaataagatgtctccatatgctgktggtgttactaatggtcaaaagatcgatcacgtgtgaggttgcattaagagcaacttcttttctccgggaatgccacttaataccaccctgggactggctccgagaagcctgggaggagcttaatatttcttgcttcctgtaactgtatgctgtttagtgcagggtaaccctgcaaataggacagaaagatcgtttgcagtgagaatggctggaggttgacgctcaactttctctgtgttcaagaatggttgtttcccatttgtcagttgtgttaggtccgagcgatttctaggagctcctcatgagtctggatcttaaggaatcaatgaagcccaatcagaaatatcttaatgtcagtgtcttttttgttcgtttgtttttggtgacaattacaaaaattttattatcttttaaaatttttgtgggtacatagtaggtgtatatatttatgaggtacatgagatgttttgatacaggcaggcaatgtgaaataagcacattgtggagaatggagtatccatcccctgaagcatttatcctttgagttacaaataatccacttatattctttaagttattttgaaatatacaaagttttccagaaaagaatgctttctataagaggctccccatggtgagggtcctttgtagtggcagaagaattaatgagggtagatttcaatttcacacccttgctacagaggtgatgggaactctctacgtctgctatgcaggtgctaagggcagtgagtcatctttgttcaatcttgttccttctggtgacacatgaatgtacttttaccaaaaacatcacagaatctacgatgtgttatttccatctggttaataattataactacctttggatttcttcctacatctttccacacttacttggggaaaatgcaaaaggaatatttcatcttcaccgcagtagtgcctgtgattaatgcagtcatgagctgctaacgaaacaagcaaagagctgcttagctttgattcaatccttaaatcacttgggaaaaaccaactgaagggggaaaaaaagaggtcggagaaggcactggaattctcttttctgttttttcaagagacaaggtctcgctatattgcccaggctggatttgaactcccaggctcaagcgatcctgcctctgcctcctgagcggttgggattacaggcatacaccactgctcccggcaacaatggaattgttaaagacagaggctggccacctgtctgacttgcttgcagttagcacccacactgcttatgaaagtactagcgagtttcaggccttttccttgtagttcatgtgaccttgtgttcccagtatttaccaaatattttaaatagtttcccaaaaaatttcctccttcatttcacacagtgtgcacattcagaccataaaaggacctactggaataaatgctgaaatttcacaaaccacagtgtatcttaatgataggtttttagatataggtttacaggggggcttatagtagtttcatgatagggtgaatttttctcaatctttgatattttccagtttgcctccttggggttgcattttggcagagaaggctttaacaccccaatgttcttaacttcagtagttgttgattgaacaactacttttggcaataacctttttctgtaccatagaggatatcaaataaaaagggagaattgaccagatgtagtccctgctttgtagaattttacattgggaagggaaagatggaatggtgaagagaatcacagaagtatggagagaggcagattgattccagctggagggatttgaggaaggtttgtgtaggatgtggcatgtgaacttggcctggcatgattggttggaaataggcaaagggatgacggattgggagggcattttaagtaatgcaaatagattgagcaaaggcttggaagtagaatagcacttggcaaaatgtgttgggagaaggggaatgatagtcactctgtggactggaattgtagtcttagtgggataggcgatatagagagtcttcatccaactgtgtgataaatatcctctggccgtttaggcccctctgtgacacacacagccaaaatttaatatatgagtagaatgcaaaaatctgtcattataagagaaaaatcaagaaacagtatatatggtggtaaagaacatagatttgaagctagattgcctgggttcaaatctttaatagctgtgttatcttgggcaaagctactcagtctctctgatgcctcagttttctcacctataacatgggataagactagtccctatgatagattaatttcaagaattagattagaagattaacatgaaaagggtttacaacagtacctggcatatagtatagagtagtgtgtaattgttagtaattagtagtagtggttgttgttttagtgtttgtgtttgggtataatgtgtaattgattttttttccttcgagaaagattagcctttctgtagcttatgtattctatataattttgcattagtgaaagtatagcatctcaagctcgtaagtgcatgaagactctcacagtggaattttcgttgtgataaaaatgtctttctttcagagagaatttgcgctttgcattgtagctgtctagtttcactggctgcttcttgggatgtggcagattgtgaaggttggttgtgtagcttattcacgtgcatgtgcatgtgtacacctgtgtgtgtatcacaggttcttgttgagtccattttgaaattaatgggatatatatagaagagaatgattatcttttctatcagaagggtgttttggttacaggcaacagaaactgactttggctcatttaggcttaagaaaattaattggaaggctgctaggagcgcctagaagagccagtggctgggcaccaaacttgggaaaaagcaagaagcaaggtagcttgggtgaccaggaaaccagcatcctggtcataggcaaacagcctggtctgcgtgaagcccctattgctgtcattgccactgtaatgtgggatccccagcttccaatcattcctactctcctcatataactgcttgttgtataatagcagaaaattggaagcagtttaaatgcctagcactagggatcttaatacattatggaacagccatgtatcggaataattgcagcccttaaacattttatgtgagaatatctaatgacatggaaaccgttcacacattctattaagtgacagtggcaggtagcaaaaccgtatgggcrggataattacattaaaaatccgatcaagtaggtattactactattcctattttacagatgatgcatagagattttgactcttgcccaagatcacgtgggttagtaagtggaagaggggggtttcaacctgggagtgaggctccagaaccaggcacttagccatttcactgtcctttccctgataaagacagaaaggctctagaggaaaaagtagtaatagcagktatagctgggtagtgagatcatggatacttttattactatttatttcttctgatttctatgagcatatgttacctctatagtgaccaaaatgattcttaagttattgtaaaaatataacgttttagaatacttttcttccagttgaaaagttatgtgtcccggcggggcaccatggttcatgcccataatcgcagcactttgggaggccgaggcaggcggatcacttgaggtcaggagttctagaccagcctggccaacattgtgaaaccccatctctactaaaaatacaaaaattacccaggcgtggtgacgcacgcatgtaatcccttgggaggctgaggcacgagaattgcttgaacccgggaggcagaggctgcagtgagctgagatcgcaccactgcattctagcctgggtgacagactgagactccatctcaaaaaaaaaaaaagaaaagttgtggcccggagatatccatcacaaattgcttttcatatatgacaagaaaatttcaaaaattgtctccatcaatatatgaattttctctttgaagttttgtgtcctactgtgtgtgtttattgtagacaggacaagcaatttccatcattgaaaccagaaaacatctttggaattttaaactcagtgttgctgtattttggggattacataaaagcattgataaaataagttgtgctttaaatggaagatttaaatctgtgaagctttttaagattgtgtttgtcacgtcttggcacacatttcttgtttgtagagtctggttatgaaaagactctggtttccatatgtatatttaaaatactctgagtcatggattcaaatgagtaattgacataatatgtccatcagattcctgctttgtcataccgtcacataaggggagtacatttattttagtaattgtaatagcaaacacagttaattagcaaaatggtattcattttaaatacctttccccggtgtcttttataactttccagaaattgctttattggaatgaaaatgtgtttgatttcacaggaggcttaggaaaagggccacatgtgtatgaacacaggcgtatgtatacagtgctgggagtggtgtatacataggtgtttagagattagaagctccatgtctctatttcttcctcctttttgctaagtctcaactcagaatctgaaaccacattgattgtaagatgtacaattacatgtgccaccaaaaaagaaaaaaaattgattgtaaccgggtgtggtggctcatacgtgtaatctcagtactttgggaggctgaggtgggtggatcgcttgactcaggagtttgaaaccagcctgggcaacatagtgagaacctatttcccctaaagatagaaaaataagccaggcatgatggcacgcacctgtggtctcagctacttgggaggctgaggtgggaggatcgcttgagccctggagacgcactgctgtactccagcctgggtgacggagtgagactgtgtctcaaaaacaaaaaaacaaaaaaaccaaaaaaatgcagttgtaagatttacaattacgtgcaccaccaaaagagaaaaaatgctatgaatcaaataatgttgatgctttctaattatctataacctttacttataacattgaaagagccacttatttaagtatagattttttgcatgtgttattcttgtatatacataatttaaaagtataagaaaaatagattaaggaattcttaacatttcttcacagtcagtgtccatctcttctgaatcatccgtttgacacagaatcaacaatatttgtattttcacataatgagtaatcaaagtgttgacaaggcagcttttctggaagagggctctgtaagtttttttaaacagctatattaagatagaattcacataccatataatttgcccctttaaagtgtaaatatcagtggttttgggtatattcagttattcattttgtaaatttggcaaaatacacattataaaatttgccattttaaccattttaactattgagtggataaattctctttcaaaactctttagagacagatgcgtaggatattaatatgtacaaagaacaacaaaatattgaaataatttcatcataatattagggagattttagaatgtataaaaatataaaaattccatgttactatgtataggatcctattttacctatcttttatatatagtacaaatttaagtggaatcaaaatgtgtaatcctagtatgcccatataaaagggtagccaatatacaatgccttgtctttgaaaatttcaaatgtgcatcataatatcacattaaaagtctttgaatgtgcctagacatggaaatgcaaaataagaaaaatgaaattattcccttgttttgtatgtatctttttttttttttttgagacgtggtcgtgctctgtcgcccaggctggagtgcaatggcacaatctcggctcactgcaacctccgcctccctgttcaaatgattctcctgcctcagccttcccaatagcttacaggcgcacaccaccacrcctggctaatttttgtgttttcagtagagatggggtttcactacagtggccaggctggtttccaactcctgacctcaggcgatccgcctgcctcggcctcccgaagtgctgggattacaggcgtgagccaccatgcccggccgtgtgtatcatttttttcccttgagggtgagattaaaatgtctagacctttagatgtggaattcccacctccatttacgaaaagtgattacacattgggcaataaattaaatctatttattgtgtttcagtttgaaatttaattgtgcatgtctctggtagggtatttttttgctgtttaaatctctgctccaaatatgagccaggaacactgtagctcagttttaaaattagtagaaactgcatgttacatgaatggaacattcttttttgttgttgttctttttgagacagggtcttgttctatcacccatgctggagtgcagtggtgcaatcatagctcactacagcctygagctcctgggctcaagtgatcctcccacctcagcctcctgagtagctgggactacaggcacacaccactgcacccagctaatttctgtatttttttgtagagatgggattttgccatgttgcccaggccggggatgggacattcctttcactattccctacccccccatatttcttcagaacttaataatagttttgttccttatcaagaaccaagttcattggtagcctcccagaaaactggattcagttctaaaatgaagagatggctggaaaacttatcgaatgcatttaaaaattggtcaccttttcctccatttaagaaaagtctcaaaatcacttcattatgtatagtgttcttttctccaccttgcttatctctgaaacactctttctcggctttggatttaaaatttggtaagaattattgtatctctctttgactctgaatattcttgttgctttgtaagatgtatatgtctaaatttcatctcttcacttcacatcatgaaatcttccttctctagtcttctgttttaagtctcagtttgactgttgatagaatgtttccagtattaacttataagctatgactatgagttgataactgttgttttaacaaagatacaaaatttattcaaataaatctgctttagtctcctgggaaagctggatatatatttctgtgatgttgggctgagaattctgaactgcatttttatttttatttttttatttttgtttatttttcaagatggagttttgctctgttgcccaggctggaatgaagtggtgcgatcttggctcgctgcaacctctgtccccaggttaaagcaattctcctgcctcagccttctgagtagctgggattataggcgcccgccaccatgcccagctaatttttgtatttttaatagagacggggtttcaccatgttggccaggctggcctctaattcctgacctcaggaaatccacactcctcggcctcccgaagtactaggattacaggcgtgagccattgggcagggccggaatggcgtttttaaattgaaattaactgctggatgcgttcttactttcttactaggtagagtacaacatctttccttttgcttagtttatattgttaaaagtatatatttggcattctggggtcagagcattttgctttgcagctttttttttttttttttaacttttcccactaaaggttttaagattactgtaaatgtgataagatgaacacacacaaaaaacctgtgagaaccaggattctccggggatttgactgtatatttggaatgctgtgaaaggcactggtggctgtcctagttcgtttagagttgctgtatcagaatacctgaaactggatagtttataaagtaaagaggtttatttagcacatgattctgggggttggaaagttcaggactgagcatttgcatctggggagggccttagactgttttaactcatgttggaaaacagaagtggaaatgatgtgtgcaaagaaaccacatggccagagagagaaaccaaggaagccagactcttctgaacaacccaccctcttgggaatgaatmcattccgtgagagtgagaactcactcccgtgggaaggcattaatctattcatgagagctccacccccatgacccagacacctcccagtaggcccataggccccacctcccaccgctgccacagtggggatcaaattttaacatgagttttggtggggacagaccaaaccacagcagtggtcttgccagcgtgtacatgataatggcatttccccccctatcctgggaaaggaattactgcacggaccttagaaagcagataaaccactctgtaagaaattaggtattttcttcttagaatcaattcagttcagtgttactgttctcttttatgtgwtagaccctgtgttagatactgtggagtgacagcaaagcaatgtaaaacctccctcgactattgaaacagccaccaaagaggtcaacttcctgcctcctgcctctctccattccttctcattttctactcccgtgccagagtttatagctttccaaaaaaaaaaaaaaaaaaagtagtagtgtttggctcctcattgcctccagggcaaagtccaaattccttaacattgcatagaagaccttttctcatcgggctctagtctcctcttgttcctgaaccaaaccttccatagaaacacatttccctgaatgcattctgcctctcaaacatgtctttacacatgttctttctatagaatgatctactccctagttactccttcttgtcttcccatcacagtgtcttcataacgctattcacattatttatttccttgtctttgctgctgccaaagatgaaaggagggatctcaatcatttccattccagggcctggcacaaagcgcttattaaatgttgttttcagtgaatgatgcagagtaacctccttaaaggatcttataatttaatgaggagggaagatgatcagagggccgaaagtcactaacatgtgtctgaatggaaatagtgtattattcagctaaattctgcagtttcccttgaccagacatagaacaaatataaatctgtccagttttagttgccccatagcttagtgtttggtgacatttctcagtgcactgtggtgctattttgtatgctgctgttctttgtcaatgaagctccaagcagagggcttgtgaatacggagctaaggtttgttgcaatggggaagaaatatgagtcaattagtgatgaaaatgagaaaatgcactgttcgatatcataggcatgatcttgtcaaattgaaaaaagttctctttacactgtgagaccattctgtcttttgttattatatgcatacttctctctctttgattagagtcattttttttccctcccagccagttaacatgttcataaacagaggtccttctaactcagttaccttttgtaatgcccataggaaaatgctcattttggggttaaaatcttatcgtctcccctgcttccatctcagtttctttaccttaccagaaaattaggtaattatctgttagatttaaaatgtgaggatcagatttaactcctgaaataaggagaagggtgtagatgattttgtttattcttatagcaaatttagctttattgtagaattactttataataatttactaattgggatttttttctccgttttatgtgttttcaataaaagcagttcttgatgttgacagtgaaaattttgctggtggctaacttgggttttgtctgttgaaaaagatcttcatttttctcttgattcttaaaagctatttttgctgggtagagaattctaggttagcagttattttcttgaagatatttctgtcttcaaatcttcactgtggcatttcagaagttggtcactcgtacttggaaagtaatctttcctttttctgtggctgcattcaatatttttatctttgtatttcactttctgcagtttcactgtgaagtaaccaggtgtgtatttcttttcatttatcctgtttgggctttttgaagtgcattactgtcttcgaagccattcattactgtctttgttttgtgttgctataacacaataccacaggctgggtaacttataaataaaagaagtttatttcttacagttctcgaggctgggtagtccaatatcagggtgctagcatctggcaagggccttcttgtggcgtcattccatagtgaaagatggaagggcaagagaacatgtgtgagagagagagcaagagattgaactcacagcctcgagcccttttttaatgtcatcaatccattcatgcgagtagagccttcatgacctaaatatctcccatgaggtccacctcccagcacagttgcattgaagatgaagtttccaacatttactccttggggtgcacattcaagccactgcaatcactgttgaaaattcggagccgtgacctctttcactgttgtttttgcctcattccctctctctcccctctttttggtactcagtgaagctcaagttagagtttatgattgcaatggttcattctgctttccttttaaaatttcttaaggtagaagcttagatgcctgatttgcaacttttttcttttctaataaaaacatttaatcttataaatttcattctaagtttagctgaatctcacaaacttttttttttttctttcagttcaaaatattctctaatttcctttgagaccttccctgtcacccatggattatttagaagtgtgatgtctactatccaagtgtttgaagattttcctgttattttttcacattgctttctagtttaattccattatggtcaggaacatacatcgtatgactctagtccctttcagtttgctamgatttctattataaatgttccattttgtacttgaaaagaatatgtacactgttgtggttgaatggagtattctataaatgtcagtttgatcccgttagttaatggtgttcagttcttctatatatatccttgctgactctgtctactagctctgtcaattgctgattagagtttttacgtctccagctgtaattttagatttgcctctttcaattctgtcagtttttgctttatgtattttgatgctctattgttaggtacaaacacatataggattgttatatcttcttggtgaattgacccttttattattatgtactgtctttctttatctcccacacttttctttctctgaagttgaatattaatatagccattcaggctttcttatgattagtgtttgcatggcatatcttttcctcccatgtgagttgcaatttcgctggttctttatatgctgagtaattttggattttatccttgacattttggttattatgttctgagactctgtgtcttgtgtaaatactgtggagaatattgacgcatttgtttagcaggcattgacctagttgagctcagggcatgtgttctgttctaactagccttttgcgggttgtggtttcaatgtcacttgttttcaaaacctttgcagtgctatttgttacctgtctgtattttaccaggtggccacctggagcctggttggtggtttaccccatgatttaggcgtcctggtcatttgtaggtgaaagttgttcacagtagaccaaggtttgagattttcttggtcactcagctgaggtgaagctgggctgctgyctgaacttgtaccctcaaggtgctgcccctttgaaggttagcccacactgataggtaatgccccaggaccccattcttggaagttaaaggactccagccctcatcctccagactctaaaaggactcctttcagcaaatgtgaccctagggccaaaaaagcagctggacatctgggttttctccaggctcaggcactgatctcaggcttctagacttcagaactgtgagacgatacatttctgttgtttaagccactgagcagatggtactttgttatggcagccctagcaaactaatgctaagtgcscaattctcatctcccccaggcccccgtggctaagttgagatctttaagaaaacatattcttttaggtccttaaatttaacttcgagtacctagtccattgcctgtgcataggaagtaggcacttgataaatactcactggtgtttctgctgtgatggaaaatttatgtccctgaaaaaccatacattctgcacaacaatacactaaaaataataagtgtcttgtgggaaaagtaagattatagctggtctctcaaaatcattgcaacttggtaactactagcaaaaaccataattgctaccttaagagattatctggaccacccaagcaggcatctcagtgtggctggatgttgctaaaatggatactaaaatatacaaaaaaacagtccgcctgcggtggctcacgcctgtaatcccagcactttaggaggctgaggtgggtggatcacctgaggtcagcagttcaagaccagcctggccaacatggtgaaaccccgtctctactaaaaatacaaaaattagccggacatggtggcgcatgcctgtaatcccagctactcgggaggctgaggcaagagaatctcttgaacctgggaggcggaggttgcagtgagccgagatcgcgccattgcactctagcctgggtgacagagtgagactccatctcaaaagtaaaataaaataaaataaaataaaataaaataaacaaaaacagcaacatggaaacctggcaatgcttgaattggtacatgggcggtggatgttgagacagtgcacacagaagtggaactctgagccctgggcctcctgtgatagtggccattgatggagccagtgcaggtagccaaactgagggagcctctggctggctgtgggtgcgctgtctggggagtgggacccagctgtaggctgtttgacagcgtggcataaaataattttttgcatgaaacttttagtcatgaaactgcaaaactgcttgggacttgggtgccatttctaaagggctctgacaatttggcaatgatttaatgtcattatagggtggttgctttgttcttaaaatacagcttcttgctaaggccaagttaggtgacagttttttttttttttccttttcttgcctaagattttcatttcactccctccacttttttgcttaggaaactctcaaatgaatcagtgtgacttccatgctataagatgtcactgctacttaccaatcaaacatgagctcatctgtgttacagaagcagaacagaacagatggtatttgaattaagttgaattcccttttgtactgcttatattcatttgttagtctcctgggcttatgataaattcaagtgacttcagatgtattgagttagccagagctgtatatttaaaattacctgtggagttatttaaaattacctgtggagttatttaaaatttaagttgatatatattgccctaaacttgttcaaaatttgaattaattcattgaaacattcaaaaattgagtgttttcaattaatagagacattctctttgtgatatagaaagctattcgttgttcttgttgacttttctttcttacagaagaggttgtttataaatttttagtgtgatcctaattgtatttctaatatttttggtttggttccctaaaatagttaaggtcacttttaggtaacaattagcggactttaattttgaccatatatagttacacacacatcacgcacacacacaaatacagtttcaaataatttcttttaattgatttcagtcttgttaatcttgtgcgtaaatttcaactgagctattaatgacacctaygactgactttcattatttgttagttttgaaaattcaaattaatatattacaacatagaaagtctatcaaatcttgaacatttagattgtaaagctttttgttttagcaaatttacttatgatcaatttataattgaagaattggcttctaatcccatatatagttttttaaaattgaaattatatatatatagaaaagtgcatatatagagtgccatactttgtcataggttaagttttctaaataaggaaagtgtcttaaagagaaactctttatacaaggaggaaagtagtcataaactattcttagtttggcataaaatgattttttttttttgcatggaaattataggcgtaaaactgcaaaaattgcttaggacttgggtgccatttctataggactctggcaatttggcaataatgtaatgkcattatagagtggttgctttgttgcattttattgactttttagtgataaattccaggagaatctttattttccaggataaaactcaatgtggcgttaatcctttccattttctcacctcctttstgtagctagagctgaaagcaaagtaggagagtggctttgaaaaggaaggaaaataaatttgacaatgatcaaaaacgccaggctgaaggcagcttttaatgtgattaaccagtttgtaattcatttttgggaaacatttccagaatataacaatttcagagaacacgaaaccttyttataattytggaagtgggaaggagagaggaacagtgtgtgtttttgtgtgtggcttgcattctctcctccgtttttggagcagcgtgagattattgcaatgctacatttcctccctctgcgccctcctaccccatcaatgtctcatgggtggtgtgatakaggctatgggagtgaagaccactggtgttagtctgtgtatagttcctggggtgtggcgagtaccagctctgacagcggaagagaactatactgttgattcccattattctcagtaggtgtgttctataaaattgctgcgaacaccaaattagcgaatcctgaaccatcgttcccagaggaatagggggttagggtcctgtgatcctcaagttgcaacattgtcttcgactgattaatatgtaaccttgttttatgtgtgcttctgtttaaagataccttactcactatatatcgtggattcattaacattgaactcacracgaacagcactgccactcgtgcctgaacaaaatttccctaatccatgcattttctttgcaaggcacactggatagcacttcaccactttgcttggggaccattctaaacagcacagtcaccaacacaaagcacagacatgtgaaaaacatggcactaaatagaccatgaaaagaccatttgttgacagtacgaggctgaaacgagaaggcgcgttgttgcctggtttgacctcagctgggaacatgcacgttcgatgactcaatttttttgttgtcgttgttgctctgcaaacatstgtgaatgaccagggaggtgccacgagtattgatttttggggttacaaatacattttagcaagtaggtgaattcacaaatacagaatccaggaataatgagaatcagccatastcgaaagactagaattggagtctgtctcagtttccatatttataaaatgggtataaatatgacacacactggaagtttgtgaatatcaatatggaaaggttaaatgagtaaagctttcattgtattgccagacctttgagtcctcgataggtgatagtggtgttagtagtaattattaagacaagttaaaaataatagcagctatctttatttgatacctatatcattgctcgcaataaccctgaaaagtaggaagtattatctgtatggcacagatgagaacattaaggaccagagaggttgagtaatttggcccatccatcacccatctgggaaatagccaaaccggactttgaacccaggatttgatgacttcaaaatccatatcttttggtctggtgcagtgaataaagattatgtctggcttcaggtcccagatgatgaagttgggattgatattaggctggtgcaaaagtaattgcacctaatgcatccaggtgagggcagaaagtagttagggcaagaggaaagccatgtggggaaggttagacttgctgcccagagctggagacattagggcagagtaatccaactgactaatcttgggatgaaaagacgtttaaaaaaaaattataagactagggtagaagccagagggggctagaaygagaataaagctttagctaggaaccatctggaaagagggtctgggcaaggaacattttgtwtgtgagggaggtggtgaattagaggctccttggtttcagatactcccgtccaccatctttctagctgtccacaccttcccttttcccctcttaactgttgtgtagagattattctgagctaaggcagagcagtcttgtgaatgcccagaccctgagagagacatgtaagtttcctatcatttttctacttgttattctgcacatatttgttggtagactacaacgtagcaatttcagaggaatgcttcatggtgttcttgtggagtgattatttcttacatctggttcaagtttcatgggtatgcattgcatgaattttaccaaattgtgtgtgtgtgtttcagatccgcataaataaatcagtagtcaaaagtaagggtagtgtttttgggaatatatttttcttacttttgtgggtccccaagaagtcagtccactgattttatgtatatatgcactcactactactgtacatctggagtagaggctggcaagcttctgaaatgctcagatagtaaatattttatgctttgcrggccatgtggcctctattacaactactcaactctgctgttgttgtagccatggatactgagtaaactgattagtgtggctgtgttccaataaaactttatttacaaacacaggcagtagcttgccaaccccctaactagagcgtagctgtcactttgagacctgagtaacttctctgtaggattacacccttgcaagaattctgcccgcagcatttccgagtttgcattataaccttgtgggcagggcagtgaaagtactgttatataggaaagttaccgtctcctaggaattttgttttaagaaaaagattctaatactaaagtatgacatttgttgaatattttttattggcagtaggaaaggaaaattgaaattacatacaggaactccaaaagcttgctcgtgctcatttttcttctattacagattgaacatttaatgataaatgtgggtggggggatttaatatttcagaacagaaggcagagattaattttattttgccccctaaaatgtaatacattttctctctcttcttgccccctgccctgccctttcccactcctcctctctgtccctttgctgggatagggaaattgactgtaaggggattatgggtctatgtgggagggagagataagagggtctcagcaaaatgccaccttccaaccctgctatcgctgtaagcagtagggaaaggaaggggtaggtttatagctcccaacccatgatcaactagttctacttccttgattgtttgatcatggtcaatctgtagaggatccatttctgaagagctttgtttaaaacggccccttctctaaacaccttagagttttgcacccagtgccccggatcacccgctggaggccacagaggacaaacgctagttgcagtgtttgtgagctgcctttgctgaacagtagtgcgcgtgggaagcatcagcaattatccacctgtttctcaccatccctttccaaactgacttttactcattcatggccatggagatatatttgccagtctttgtcaattcatcagtttttttccaggaagtccttttcttttaaatgctatcatatgaaggctgcccttgctttaagcatttttgattgttcttattaaaatgaagaataaccccttccttctctcctaccccacactccttggaggtttaagtgagcagaaaatggtagtacgataaaagatccatgtaggtgggtttgcagaaaagttaatccaagataagtaacagattgaaaatgtaggcttctgactatgctagtgcaaaccgagttaaatggatcgattagagtttactttccaatatgattttgatgaatggtgtaacattgtgaaaggctttttgaagacaaaaccactaacccgttgtattgttttgttttgttttgttttgttttgttttaagagacagggtctcgctctgttgcccaggctggagggcaatggtatgatcatggctgactgcagcctggaactcctgggctcaagtgattctcccacctcagcctcctgagtagctgggattacaggcacacaccaccacacccagctaatttttgtattttttttgtagagatgaggtttcaccatgtttcccaggctgatctcgaactcctgggcccaagcgatcctcctgcctcggcctcccaaagtgctgggattacaggtgtgagccactgtattttaaaatacagtttttaaaataaaaaaactgtattttaaggattcaatttgaatttgtgtttagatccatgctaaggcatgcaagcaattgacacacggaccctgggatatgcggtgtcctgtctgactgattgattgatttctttcttttttttttttttgacagagtctcactaggtcaccaggctggagtgcagtggcacgatcttggctcactgcaacctccgcctcccaggttcaagcgattctcctgcctcagcctcctgagtagctgggattacaggcgcacgccaccacgcctagctaatttttgtatttttggtagaaatggggtttcaccatgtttgccaggatggtctcaatctcttgaccttgtgatctgcccgcctcagcctcccatagtgctargattacaggcgtgagccagcgcacccagcctttttttgtgtgtgtgtttttagtagagatagggtttcaccatgttggccaggctgatctcaaactcctgacctcaggtgatccacccacctcagcctcccaaagtgctgggattacaggcatgagcctgatttacaggcactgatttctgacaatacatccttactatatatccaaaacttacctgccctttgaaacccagcctgtctcacctctacaaaaacaaacaaactaccttcctaaccattcctacgatactattctatttctgtgaattcttaaaatctgcttgaacagcccattttgacatttgattctctgtgtcagtgtttattgtcttagatttaccccctgcatgcagaagtgactgcatagtcactacttttagtgagtttgaaatctgtttggagagctatgtaagtaccaatggaaaaaaaaaaagaagtaggtaactttacaggacagtaaaggacagattgaagaagggggacgggggacttgaactaggcctggaagcgcaggggtaaaggaggtggagcatgttggttgccaggggaccctgagcaaaggagcacttaaaaaaatgcatgaggggaaaggtcatcagtgacgtcagtagttcgatccaaggggagtttgtactctttttaatttttttttttttttgagacagagtcttgctctgttgcccaggctgcagtgcagtggcacgatctcggctcactgcagcctccacctaagaagttcaagtgattctcctgcctcagcctcccgagtagctgggattacaggcgcctgccaccatgcttggctaattttttgtatttttagttgagatggggttttgctatgttggccaggctggtctcgaactcctgacctcaggtgatccacctgcctcggcctcccaaagtgctgggattacagatgtgagccactgctcccggccaaatactttttttttttaaagaaattttcatttagtaaataatgctgagctcagaggtttatgtgtaggagagttatacaatgaaaatgttttattcatttatccaacaaataattatttcatgattaaaaggaattagagaaaagagatgccagagcctattgtactcatccagacatgagataagagttgcctggacttgagcagtggcagcggggctggaaagaatggacctaaaagatagcacaaaagatggattgatagcgtcggaggagtcatttaatgtgcgcggcagaagcgatcagccttgcactatcgttgcttttcttgctgatgcatttttgtctatctagctaaactctaaactcttatgyccagacactaccttttatactccttttacaataggtgccattgtcgttttattcttgtttaaataatttatttaaaatgtattgttccgcagagcatggcattttaaacaccgacttaacatcctctagtaagataatgctaagacttataagaagcaaatgccacttctgtaagtcttcaaatcactcttgtgtttaattttttttgtttgttttaagacagggtctttctctgttgctcaggctggagagcagtggtgcactcatagcttattgaagctttgacctcctgggctcaagcagtcctcccacctcagcctcccaagtagctgggaccataggcatatggcaccatgactggctaatttttttaaaattaaaaatttttttttttgtagagatggggtcttgctatgttgcccaggctggtctcaaactcctgagctcaagtgattcttcccccttgacctcccaaagttttgggattataggcatgagccactgcacccagtacatttaattttttttgagatgaaattgaaataccataaacttaaccctttaaagtgcataatttagtattttccgtatatccacagaattgtacaccatcaccctctaatttcagaatagtttcatcacccgaaaaagaaaccccacatatttcagcagtcactccctattccgcttattctgagtccctggcaaccactaatctactttctttatatatagatttgtctattctggacatttccgataaatgacattgtgcatatgtggtcctttgtatgtgacttctttaatttagcacattatgttctaggtgcacttacgttggagtatggattaatacttcattcttttcatggctgaataatattccattgtgtggatttgctgcggtttgtttatccattcatcagatgatggacgtttgggttgtttctgcatttttgctattctgaacaatgctgctatgagcattcacatgtaagattttgtgtgaccatatgttgtcacttttctttggtattttacataggggtagaattgctggattttatggtaactccacgttcaacattttgaacaactgccaacttgttttccaaagtggtggcaccattttacattgccaccatcaatgtaggagtgttccagtttctccatatccttgcccctctgtatttttttttttttttaactatcttaggtgggaagtggtatttctttctttctttttttttcctttttgagagagtctcactctgttgcccagactggagtgcaatggtgtgatcttggctcaatgaaacttccgtcccaggttcaagtgattctcccacctcagcctcccgaatagctgggattannnnnnnnnnnnnnnnnnnnaaataaaaccacaaggaacaattttataaatcataacagtgcaccacagaggcccaactttaaaccaatagctagaatgaaacattttctaagaacgtataaattgcccaaatttggccaaagagtagtgaaaccctgaccaatggctgtaagttgaaacagtaatcaaaaatttacccaaagaaacaaagcactaaacctatataagttttttgttttgttttgttttgtttttgagacggagtttcgctcttgttgcccagactggagtgcaatggtgtgatcttggctcaatgaaacttccgtctcccaggttcaagtgattctcccacctcatcctcccgaatagctgggattacaggtgtgtgtcaccatgcctggctaatttttgtatttttagtagagacggagtttcaccatgttggccaggctggtctcgaactgctaacctcaggtgatccacccacctcggcctctcaaaatgctgggaatacaggtgtgaaccaccacgcctggccgtggaaagtgatatttcatactagtcttgatttgcatctgcctgatggctaatgatgttgaccatcttttatgagctttattgaccatttgtttatcttctttggagaaatgtctggtcagatcctttgcctatattttaattggcttattttgtctttttattgctgatttgtaagaattgtaagtgaaagaagtcaatctgaaaaggatatatactatatgattccaactatgtgacattctggaaaaggcaaaactgtagagacagttaaaagattggaagttgccaaggggacggggagaataacgggtagagtacagaggattttttagggcagcgaaactattccgtgtgatactataagggtggctacatgtcattctacatttgtcaaaacctatagaatgtactgcaccacgagtgaaccctaatgtaaactatagactctgtatgataatgatgtgttcacataggttcattgagtatgataaatgcagcgctctggtataagatattgataatgggtgtattagtctgttcttgcactgctctaaagaaatacctgagactgggtaatttataaagaaaagaggtttaattggctcatggttccacaggctgtacaggaagcatgacggcttctgaggaggtccctcccaggagactttctttttcttttcttttcttttcttttttttttttttttttgagatggagtttcactcttgtcacccaggctggagtgcaatggcttgatctcgactcactgcactctccacctcctgggttcaagcgattctcctgccctagcctcctgagtagctgggattacaggcacccaccaccaygcccagctaatttttttgtatttttagtagagacggggtttagccatgttggccaggctggtctcgaactcctgacctcaggtgatccacccacctcggcctcccaaagtgctgggattataggtgtgagccaccgtgcccggccaccaggaaactttcaaccatggtggaaggtgaaggggaagcaggcacgtcttacatggccagagcaggaggaagagagagaacgaggaggatgctagttgctacacactttgaaacaaccagatcttctgagaactcactatacagtaccaaggagggtggtgttaaaccattcatgagaaccccacccccatgatcgaatcacctctcaccaggcctacttccaacactggggattacaatttgacatgagatttgcggggggacccatacccaaaccatatcagtaagggtagctgtgcatttggtcggggagggagtatagaggatttctggataccttttgctcgattttgttgtactaaagctgctctaagaaataaagtcggctgggtgcggtggctcacacctgtaattccagcactttgggaggccgaggtgggtggatcatgaggccaagagattgagactatcctggccatatattcacgggctattgatgtttattttctgtgagctagttcttgatatctagttccctgattcttccccaagaaaaattccgtaaatattttaacagaattgcattaaatttctagattaatttggaaagaactgatgtttatgttgcatctttttatccaagaacttgttaggtttttccatttgttcaaccctcgggcggatcacgaggtcaagagtcggaggttgcagtgagctgagatcgcgccactgcactccagcctggtgacacagcaggactccatctcaaaaataaataaatatcaattaataaataaaaagtctacttaaagaaataattcaaggtaatatagatttatgtgtcaaaggcaggaagtacttaagcagtgtagagaaaggagaatcattgttggctctagacattggagaggagataggatttgagcagtaacctgaagaatgactaggatttcagaagtcactggacagtgagtggttcaatgtgtgcagtcttggacaagtaatctgttagactgatagtttcttcacacagtttgtggaggaaatacaggagataatgtaggggaagtgcttaacacagagtcaggcatacaatatcaagtggcgctcatcagcaaatatcgatcaagtgcctactatgtgctgtgcactcctgtggagcccacattctagctgaaatattggctggatgttatcgaaagggggcagccaacatgcaacacaaagaaagacccaaaagtaaacatttccatgtcctggtctgtgaaccattaaacaaaccatatttgaatgataaggttgccaaagtagatcaagagaaactgcattttgggggggtttgaaatccaaagaatgcagtttgtaggcagtcgagatccttgaaaaatcaagatggattttaataatgtattaagaataaattggatttgaatcaacacaggaaacagggattttacttagagactayttcagtaattttgaaatcattgcccaagattgtagttggtttgtttataatgggtaggttatttatttgtgaatcccaaatgtactccatcaacattccattgaataatttacaaaagcaaacagcaggggtttatgttttctcttctcctagtttaatattgtggcagtcatatcatactttgttttagactaatttaacaggagttaatgtttccaagtaaatcattattatctaaacagtgtctttttgacattggcctgaggatgtggaacttttttcatacggaggtaaatggaacagtacaaaatgctaagagtttgttttatctagttaacaaggttctctctttcatttggtaacatttttattgagataactcacatactataaaagtcaccattttaaatgtaccattctgtggtttttagtgtagtcagagttgtgcaaccgtcaccacaatcaattatagaacattttctttactcccaaaagaaaccatgtatcccttagctgttatgcccaggtccccttatttcctgtccccgccccaccatcctatgcaaaccctaatctactgaaaataaaaaaattttaaaaatctattttaaaatagtataaaaaagcattaataggagtaaattcaatgaaagaagtataagacctgtacactaaaaactctaaaatatcgtggaaagaaatgaaagaggacctaactaaatggaaagacagccatgttcatggattgaaggacttgctcttgtcaagatgggagtcctccctaaccagatctgcagatgcagcactgtacctattaacatcccagaaggtgttttcttgttgttttttgttttgcagaatttgacaagctgattaaaatttatctggaaatgcaagagatctagaatagctcaaacagtcctgaaaaaacaacaacaaagttggagactagcacttctcaatttcaaaacttactacaaagctaaagtaattacgacagaatggtactgacagtagcgtagatatagaggtcaatagaatagacttcggaatccagaaataagtcctcatatttatggtcagttgattttcaacagtgatgacaagataatttgacaggggaaataatagtcttttcaacaaatggtcctggaacaagtggatatacacatgtaaaagaatgaaattgagctcctacctcaagaactcctaggagaaaacaggaataaatcttcaatactttggtctagacatggaatcttagatatgacaaacaaagcacaggcaacaaaaggaaaacagattaattggatttcatcaaaattcaaagcttctgtgcttcaaaggactcttgaagaaaaagaaaactcacagcatgggagaaaatgtttgcaaattatgtttgaaaagggtcttgtctctaaaatatataaagaacccttacaactccacaatgaaaaacaaataactcagtttaatacatgggtaaaggatctgaacagacatttctccaaagaaggctaccaacatggccaataagcccatgaaaagatgctcagcatcaaagtctcagagacatgccaatcaaaaccgtggtgagataccccgtagactcactagatggctaaaattaaaaaatgcgatcaggccaggtgtggtggctcatgcctgtaatcccagcactttgggaggccaaggcaggtggatcacctgaggttaggagttcgagaccagcctggccaacacggcaaaaccccatctctactaaaaatacaaaaattagctgggcgtggtggcaggcgcctgtaatcccagctactcgggaggctgaggcaggagaatagcttgaacctgggaggcagagatcgcagtgagcctagattgcaccactgcactccagcctgggtgacagagcaagactgtctccaaaaagaacaaaaacagaagtgagatcataataagcggtggctagaatgtggtgaaattggaacttttatgtattgctgttgggaatgtaaaattgtgcagctactttggaaaacactttgacagttccccagaatgttggacatagagttcctgtctgatgtggcagttctatctctaggcagaatcctcaagagaattaagtatatgtctacacaaacccttgttacatgaatgtttattagtgacatccccgcttcagcctcccaaggagctgaaactaacagatgtgtgtcaccatgcccagctaacttaaaacagtatttttggtaaagatggaatcttgctatgttgcctgggctggtctcaaactcttggcttcaagcgatattcctgcctcggtctcccagactgctgcgattatagacatgaaccactgtacctgacccaagatttatttttaattaagaagcaatgtatacatgcattctctttgtggaaagacaaaaatgctaggctaaaggcctcctcgtccacctcttccaagcctgggatcctccctgcgccatccttctccactcccggacccctgccccaggtaactatgatttaatttctgcccatgttcattgtgagttgggggtcagggggagctgttttccacccagtcattcagatatcaaggccgataggagttcggtggcttcgggcttcactgaggcttggagatctcttacctgctcctctgtattgtggtccggaagtgacacacagcacttttgctagagagactccagtcatgtgatcccttgcagggagctgggaagtgcagacttctgttttcctggaaggacaggaaaaggagatgttggcagcactggaggaatctaccatcgcctgtaattttgcttgcttttgttgtagtttcctggtttcagtgtcggtctcatcaactcagttgggatggcttctcttattattattttgttagaaggtgggaacagtttttataaggtgggaattatctgtaccttgaaatcttgatagagttttcctgtaaaactaggtaggtttagccgggcgtggtggctcacgcctgtaatcccagcagtttgggaggccgaggtgggctgatcacctgaggttgggagttcaagaccagcctgaccaacatggagaaaccccatctctactaaaaatacaaagttagccgggtgtagtggtgcatgcttgtaatcccagctactcaggaggctgaggcaggggaatcacttgaacctgggaggcagaggttgcagtgagccgggatcgcgccgctgcactccagcctccgcaacaagagcgaaactccgtctcaaaaacaaaacaaaacaaaacaaaaaacttatctaggtttagtgctttgtttctttgggtaaatttttgattactgtttcaacttacagccattggtcagggtttcactactctttggccaaatttgggcaatttatacgttcttagaaaatgtttcattctagctattggtttaaagttgggcctctgtggtgcactgttatgatttataaaattgttccttgtggttttattttctccttttgtctttatttggggtatctgtgccttttttctttttcttgagcttacttaaaaaggtttgttcttttttttttttcttaactaatcttttaaaagaaccggcttctggtttgactgacagttgtttcccctttcattaacctgcactattatctttattaattccttctttctgctttatttattcatccttgagttgaaagtgtaggttattcattttcagtctttctgggtttctagtgaatgaataagtctgcattttaatatacagtattttttattttcatttgattgaaacagtttctcatttctactttgactttctctttaatccaagagttatttaaaactgtttaaaaatttccagatgtgtggatttatttaggatgtatatttagtgcggatttttttttggggttacatttagtgaatgaatgcagactgtttatcaatttgggagatttgttaaagtctcttttgtagcttagtatgtagttagcttttctaaattccatgtgtgtttgaaacgagtatgtagtctctgttttacgaggaaacacttttattgagtttctttctttctttcatgaggtgacttcttgtaaatgttgaatggttcttggttctgtgttcattcttgcagctgggatttcctgcttctccttcgagctgtggggaggagctggggaggagctgcaggagggactcttatgctgtgtaccggacacgctgtgttcttcagtcacctgccagcctgcgcagaacatggccctgtgtcccagagccaggcttccatactctgtcttgcagatggagaacgagcctggtcattacctccactggggggtgggcatggccaagcaatgaggattccargcgcagctgctgtggccacacgccctgcccgaggcatcactctagtggcctcytctgggcctcagcttcccggcttcccacctgggcatcccccaagggttggtcccacctcctgtagtggcagttgcctgagggtggctgtgtcatctgtcaatagcgaagatttccctctgctcctttgctttccatcttttagggcagtgatccccagcctttttggcaccagggascagtttcatggaagacaatttttccgtggacaggggtgggggagatggttttgggatgattcaagcgcattccatttatagtgcactttatttctattattattacattgcaatatataataattctacaactcaccatgcagagtcagtgggagccctgaacttgttttcctgcaactagacagtcccatgtgggggtgatgggagacagtgacagatcatcaggcattagattctcataaaagggtgcaacctagacccctcgcatgcgcagttcacaacagggttcatgctcctatgagaatcaaatgctgcccggctgatgtgacaggaggcggagctaaggcagtaatgccagttgatcaggagcggctgtaaacacagatgaagcttcgcttgcttgctggctgctcacctcctgctgtgcagcctgggggatggggaggagggtgcaggggagggggggttgaggacccctgttttaaggattccttttgtgagtagagctgtgtatatgtttatcttaaatatctattctgtcattactattggtatagcaaagaagaggcagtccacagcatgtgttcagtctgtcagtctcaaacctaattatctgtcaattttattcaagttggaagtgtgaaattaagctctcaattcggtgccactttttttttttttttttcgcccaggctggagtgcactggtatgatctcagctcaacgcaacctctgcctcccaggttcaagtgattctcctgcctcagcctcccgtgtagctgggattacaggcacccactaccacgcctggctaatttttttgtatttctagtagagacggggtttcaccatatttggccaggctggtcttgaactcctgacctcaggtgatccacctgcctcggcctcccaaagtgctgggattataggagtgagtgactgtgcccggcactggtgccactattttttttttaaataaagacatgaaaagccacaagatttcagataacgaagcaaataaccgagtaatagaatgagccctttcaggattctgtaaaagctgttttatttgtgaattaatttttgaaaaattttaccctgagtcttcaaaactttgtatttttctgtggttactgacattagtgacatttctttttgatttgtccctgtcttctgtaacatatttatattatacatcaacctggaaaaatttcatattcagccctttagagttgcctgatggtggaaatcacaaatgacatattaataatctgaacaaagaatagaaagtgaaccagacatagcaccagtgcctgtgcttagaagtggattaagaggccaggcgcagtggctcacacctgtaatcccagcactttgggaggctgaggcaggtggatcatgaggtcaagagatcaagaacatcctggccaacatgttgaaaccccatctctactaaaaatacaaaaagttagccgggtgtggtggtgggcacctgtagtcccagctactcgagaggctgaggcaggagaataacttgaacccgggaggcagaggttgcactgagctgagattgcgccactgtactccagcctggcaacagagcgagactccatctcaaaaaaaaaataaaaaaaaataaaaaaaataaaaaaaaagaagtggattaagaatcctagctactgtcagtttaatccttttttaaagtcactaatattttaatataaaaagtaagcttttacttttcctcataaatgtttttcatatcatcattctttgcagaaaatttaaagattacaaccaggtgaaaagaagagaaataaattataccataatttattattaaagaaagataattatactgtattagttgacatcattccagactcttaaatacacatttatccacatacacacaattttaccaaaaagagtttacctcgtcactgttctgtaaccttttttgtttttttttttattatagacattattttttagaacaattttggacttatggaattattgccaaggtaggacagacagttcccatgttaccccttccgcccccacacgcgcacacacgtgcacacacatgcaggcacacgcacacacatgcacgtgcacacacacatgggcacacgtgcacacatgcacacttgcacacatgcgcacacacacatgtacatacgcatacacacgtccagattccccaattaacaacatctaacatgactgcagtacatttgttgcaattaatgaagcaattttaatacactgttactaactcaagtccatgctttcactgtcttattttttacctactgacatgttctgtttcaggatcccatccaggatatgacatcacatttagttgtcatatttccttaggttgctcttggctgtgacagtttsttagactttccttgcttttgatgatcttgacagctttgagaagcactggtcaggtatttgtagaatgttcctccactggaagtgtttgatgtttgtgtcatgattagattgggattatgcattttagagaggaagaccacagaagtgaagtaccattctcatcgggtcctgtcaaaatttcatgctcttaatatcagcgtgacttgtcactgttgatgttgaccttgatcacctggctgagatggtgttcgtcaggtttctccactgtaaagttacttttttttccyctctttccatactggactctttggaaggaagtcactacacacagctcacacttaaggagtaggggctgggtgtgggggcccacgcctgtaatcccagcacttyggtaggctgtggctggaggatcgcttgagcccaggatttgagaccaggctgggcaacattgcgagaccccatcgctataaaaaataaaaaattagccaggataaggtaatgacctgcaggacacatgaagaaggtgactggggaactggccatgctctatttcctsacctgggtgctaattatatacgtgtgttcagtttgtgagaattcagtgagctgtacactcagatatttataaatcaatcataaacatcaatagacagaatagaaagtccaaatatagacccatgtcaactgatgttcttcaaaggtgccaagacaattcgatgatggggaaaaaaagatagccttgtctagactggaaaataggaaatccagccagaatgaatgggatatccttatgaaaaaagaataataataagtctcaacccttacctcacatcatacacaaaaattgacctgtgtgtgatactctgagctgttgttacacatgacactgatgacacctaatgtgtgggttttttttttttttccccacatcaatcccaattctgatgctaactggctattctacagttcgattcaatcccaacgcttaattccccagaattagcaaagaccccacaggttaagggctcagtcccacaagactactcctaccttatccatgagttgcaaatcaaaggttgtcacctatatttctgactaataaataaatcgggggttccctttgcaggttcagtaatttgctagaggcctgtaatcctgtaatcccagcactttgggaggctgaagcaggcagatcacttgaggccaggagttcaagcccagcctgagcaacagactgagattccagctgtacaaaaaattaaacaaaatgagccaggcttggtggcgcatgcctgtagtcccagctacttggggaggctgaggtgggaggatcgcttgaacctgggaggttgaggctgcagtgagctgtgattgtgccactgcactccagcctgggtgacagagtgtagaccctgtctcaaaataataataatttgctagaatgtctccaggagtcaggaaaacactacttactactgctacttccacctccttgctagcacttagtattgtcagtctttttaattttagcaattctagtaggtatgtggtggtaccttactgtggttttcatgtgcattgtgcattgtaccaatgattattgatactgagcatgtttttctgtgcttattggccatgtgatgtcttttttggtaaggtgtctatttaaaagttaattttaaaaatttttatagagatagggtctcactgttttgcccaggctgatcttgaacacctggacacaagtcatcctcccaccttggcttcccagtgttgggattacagttgtgagctgctgtgctcagccaaatatcaattttttaattggattgggttttttttttaaattgagttgtagagttctttattctagatgcaggtcttttgttggtcatatgggttgttaatattttctcccagtctgtctcttgccctttcattttcctaatggtatctagtttttacgttattgtatttaatttttatgtttctgctccgtttgaggccaatttttgtgtatgatgtgaggtaagggttgagacttattattattcttttttcataatgatatcccattcattctggctggatttcttattttccagtctagacaaggctatcttttttcccccatcatcgaattgtcttggcatctttgaagaacatcagttgacatgggtctatatttggactttctattctgtctattgatgtttatgattgatttataaatatctgagtgtacagctcactgaattctcacaaactgaacacatgtatataattagcatccaggtcaggacatagagcatggccagttccccagtcaccttcttcatgcgtccttcaggtcattaccttatcctgctaaaggataatcactagcctaactttaacagcatatattagttctgtctgcttttgtactttatataagtggcattgtatgaaatgtattgtcttgtggctttcattgaatattatgtttgtgagattcattcataaatgtgtgtgttgttaggatctgccattctcattgctgtatagtattccattttgtgatgaccacaacttttttattgtttgtattgttgatggacatctcaatggttctcagttccaaaactgagtacaatcaaacagtacaatcaataaaagaactattaggaactgtgctactattatttattatccttttactacatggtgagcatgtatctgtgcatttgcattgaggacatacctaagggtgaaattgctgggtcatgaccaattttttttttttttttgagatggaatctcactctgtcacccaggctggagtgcagtggcatgattttggctcagtgcaacctcagccccctgggttcaagcgattgtcctgccttagcctcccaagtagctgggattataggtgcatgccaccatacccagctaattctttatatttttggtagagacggggtttcaccatgttggccaggctggtctcgaactcctgacctcatgtgatccacctgccttggcctcccaaagtgctgggattacaggcgtgagccactgtgtctggttgattttttttttttttaagttttaaatgatcttatgaatctattgttagctacatcgactggaaacgtttaatgttgygacaaattttttcttttttttttttttgagatggagtctcactcgttgcccaggctggagtgcagttgcgtgatctggactcactgcaacccacgcctcccaggttcaagcaattctcctgcctcagtctcccgagtagctgggattacaggtgcccaacaccaggcccagctaactttttttgtatttttagtagagacggggttttaccattttggccaggctggtctcgagctcctgaccttgtgatccacccgcctcggcctcccagactgctgggattacaggcatgagccaccaaaatgttttcattctaatgctcagttgtcttgatgaagtagcgtgagtcagtgaatgctgtggttttcattgaggagatggatcagttcttatctccgtcactaactttgccaggtcacctcgagctgttgcttaatctctctgagcttctattttccttctatgctcaatcaagttgagcataattattttaccctgatttatactgtgatgtgaataatgattagccaaataattataatggcttttatgataaaaccaggcaaaataataccgttaaatacttcagtgttatggaagtagcactataaaatgataaataggaaagaaattataaggcactttgttttagaagattgtgtgtatttcctggggttttcatagccacgtgtggggtttttgcagtgtattaccttgctaaacttcatcctcaccttcggattttcttttcttttctttttttgacatagaattttgctctgtctccaggctggagtccaatggcagaatcttggctcactgcagccttcgtcccccaggttcaagtgattcttctgcctcaacctccccagtagctgggattataggcttgcgccaccacgcctggctaattttgtatttttagtagtggtagggtttcactgcgttggtcaggctggtctcaaactcctgacctcaggtgatccacctgccttggcctcccaaagtgctggtgagccaccacgcctggccgcctttggattttctgttgatctttctatgtgtcaaattaatactgcctcggttggaaatgttgactcacacctggaattccagcactccgggaggctgaggcagaaggattgctgagaccaagagtttgagaccagcctgggcaacatagcaaaatcctatctctataaaataataatactgcctcatttggtagaacacagagagagaaaatactgacattgctttctcttgctattacttatgattacttttttttttcctttcttcttcttatttatttattcttttaaagagacggcatctcactctgttgcccaggctggagtgcggtggtgcagtcatagcttaccgcagccttgaactcttgggttcaagcagttctcctccctcagcctcctgagtagctggtgctgagtagtgcaaaccactgaactggctaatttctatttttttttttttaagatacagtgtcttgttacgttgctcaggggtggtctccaactcctgggctcaaggaatcttcctgcctcagcctcccaaagtgctgggattacaggcatgagccgctgagtctggccttgcccttgttccgctgtaaaacattccactgggtttatttaagacagaaacattatctggagatagaaattgtcctatatagatagactttaatgagacacttttcttaccttccaaagcaaaggtgttagcctataatacttaagaaaaaaccaaacgaaagaaaacaatagctttggcaattgcttcctgtgtgcgacctgtcttctttctccatccaggaagagctcctacttcaggggctgcagattctgtgagggtgttgggaaaaataacattttaatgttaaaaaatagagagtgatccccagttaccggttttcttggaatgtgatggtgtaacaaatccttgaagatcattccttaagatgtaaaaatgacggttccttcatgagagctttgttcaaataaaaagttccgtgtcccgtttttggccgggcgcggtggctcacgcctgtaatcccagcactttgtgaggccgaggcgggtggatcacctgaggtcaggagttcgagaccagcctggccaacatggcgaaacctcgtctctactaaaaatacaaaaattagccgggcatggtggcacatgcctgtaatcccagctactaggggggctgaggcaggaggatcgcttgaacctgggaggtggagtttgcaacgagctgagatcgtgccactgcactccagcctgggcaacagagcaagactccatctcaaaaaaaaaaaaaaaagttccaaatgccctctggactttagtacttgttttttgacatgtactttattactttatttctccctcattataataatacttctgctttgaacctgcagaatatatatatatattttatttccaaagaatcagatcttccaggcagtagtgtgcaaagcttccaggctctcgactccttgtgaacatggcataggagtcagacacatcacattgtggcgcttgcaaaacagttgttttcatacattcattcaagcaggcagttatccattgatttcaacaaacattgatcaagcgctaatttctgccaggccctgtgcttccgtgctaggaatgtaatggttgagaaggcagcgtctgccttcttgatgcttacattctagtgggttaactacacagttaaaaaaaaaaaaagtcattacctaataccatttaacaaatatgtttaaagtcaactgcatgtgccaggcactgtttcagcctctggggagacagtggttaagaataaaagacacagtacttgcttcagtggagctaggcattaagaagaatgcaaataaagaaagggtttaatttcaggctctgcaaagagctatgatgatgccgcattaatgtagagtgggatgggggtgcagcagagatgccttcacccatgaattaggaaaaaaatccatctgtctgtgtgtccatgtccctcatcctatgagaataagaagagaatagtgtttctagaagagctttctggactagaaaggatcacacagatagtattaatgtttggtgctggcagggaacccgtggggacaggcagcaggtggcacatccccacctcgtccttggggctcagttgtgtctcacagaagagacagtttttgccacaacagctctgcctaaccctgccacgtttggggtatgatctgaattctgtcacacttctgatggcaaatagttcacatgattttgtcatttatttttaatttagtgcaattgtagaagatgaactgtaacatccatattttaagcaaacaggtgttttgaaaacttacctcaggactgtcactttaccagagatctgttcccacctccaaagccaataggcatggccggtgggtgctaaagtgtgttttgttaacttagacagttttccccgcaggaagaaatcatttgatcatttaatggtgtctgaatagtggaaacatgtgtgagtcttgtgtatgcataaacttactgagcaagattggaaagaagtgtttgtttcagttgcagataatggaatggagttcagttctcctgtatgggcttaacatttttggcatttgaatctgttgatataactgaaatgtgacttttttttccttcaatgcaaatttgaagatatcctaaatttgtatcagaattgacagatcagtggctctggtacagtggccttggaagtggcacagcacttggggaggctgaggcgggaggattgcttaagctcagtttgataccagcctgggcaacatagtaagaccttgtccctacaagaaattgaaaaattagtcaggggtggtggtgcatgccctgtagtcccaggtactcaggaggctgtggtgggagcatcacyggagcccaggagttcgagactgcagtgagctgtgttcgtgccactgcattctagcctgggtgacagagcgaaacgctggcccagaaaatgaatgaatgaatggatggatggatggttcctccctcagaggggcctaacttagctggggaacaaagccacctgtatgggaagtaattgaatactaaactatatgattcttaaataggattaaaaagagggagctgatcactgatggttagagttgtaattcccagagcagtcgaaacatttatgtacatgtggggatcagtataatattgcccagtttttattttgctaagtcactgctctgtcaccgttttttgttacctctttcattaaagaaagaacattttaacatgaaaaaagcaggaaagacataacatcacaacaaagaacagccacttaaaattagtttcgttttatgaaaaccccgcttacattgtccttatttttttggttttggcactagtgaaaatgtcatcacagactgacgtttgggaaacactggcttgagtgaggcttcactgacaaaatgcctggcctggaccctgaatgtaggttagggcccagcaaggagagagggattgtctgatgggttaagaagcaagaataaactctgggaggtagctggggtgggtaaaaggggctaatccaagctataccatgaggaataatggggaataaatgtgttgttagggaatgggaaatcttaatacccagggagaaactcaggattcacagtaaaatacagagtcattagagatttttgttgttgttgtttgttgttgttgatgtttttgcataagaacatgaaaatggcattcaaaagattgatctgggccaggcacagtggcttagtcctgtaatctcagcacttggggaggctgaggcaggaggatcacttgaggccaggtgtttggagcagcctgggcaacatagtgagaccttgtttctacagagattttttaaaaataggaaaattagctgagcatagtggtgcatgcctatagtcccagctactcaggaggccgaggtgggaggatcacttgagcccargagtctgaggctgcagtcagccatgattgtgcccctgcactctagactgggcagagagtgagatcttacctctacagatacaaaaaagattgatgtagtggctaaatgtcttgtggaccagggaggcttccatcagggagggcacagttgtgcataggtgatgccaagaagaagagagtgggtataaaaatacagaacagacaaattcaagagacattcagaagaagatagtgataggacttggagacacagaaatataagaagaagagaggaataacattgcagtgaaagtttctagccacaggctagagaaatattagaagtattgacacaaattagaaactttctcaagattgaataaagtactannnnnnnnnnnnnnnnnnnntatgtaatttgctttggcctattcccaacattaggaaaactacgggcatgtgattaggaaattatggcatgtaagaggcatgatctggctaaggtagaggggtgcttcagggttggaactgaagaaaacatgcattggtccacactgaaaaataaactcagtgttctggaaatgtgtcttttgttaattgctgtatccccagaacctcactgtattggtacataaatgtattttttaaaaaatactagatctaagcctgggcatggtggctcacacctgtaatcccagcactttgggaggccgaggcgggtggaccatgaggtcaaaagttcaagaccagcctgaccaatatggtgaaaccccgtctctactaaaaataaaaaaattagccgggcatggtggtgtgtgtgcctgtaatccsagctactcaggaagctgaggcaggagaatcacttgaacccaggaggtggaggttgcagtgagccgagatcatgccactgcactccagtctgggtgacagagcgagactctgtctcaaaaaaaaaaaaaaagaaaaaaaaatccaaatacaatgagattttatgctgtctaatgaattaccttttatccatatatctctagagtggaccaaattccatgtcctgatcacaaagctattttagtaggagaaatcatataccattaacttaaccacattcagaatgacctgaaatgatccttacagggaattgaagcaaatttcttcttttctttttttttttttttctttttgagacagagtctcactgtgtcacccaggctggagtgcagtggtgtggtcatagctcactgcagtctcgacctccccaggctcaggtgagcctcccatctctgccttccaagtagctgggactacagtcgcctaccaccttgcctggctaatttttgtattttttgtagagatgggatcttgccatgttgcccaggctggkctcgaactcctgagctcaagcgatcccacctgcctcagtctcccaaagtactgggattacaggmatgagccattgtgtctggccaaagcaaaattttctttgtgctaacactgctgagacctttccgcactttatgatataaccaaattccactggaatgagccttaaactcaaacattgtatgagcaaagattaatatttgtgagacatgtgaccaggattattctattcagaagcaatctagcaccagcacctccaaaaaccagggcccagaattggtggctaatatttgagactgcacagggaggttgggagggatcggaggctcataaggctagagttctgcaaggggaagccactggagaattttaaaaggaagacagacatgagatgtaagtcttgaaacggtcagttcatcagagcttgtgttgggagcttggacaagggtggagatgctaagaaggtaacgtatttgagattcagaggaaaaagggagaacatgtagtcttctcgcttgtgcctttttttttttttgagacggartctcactgtgtcatcaggctggagtacagtggcgcgatctcagttcactgcaacctccgcctcctgggttcaagcgattctcctgcctcaacctcccaagtagctgcgactacaggcacgcacctccacacccagctaatttttgtatttttagtagagacggggtttcaccatgttggccaggatggtctcgatctcttgacctcgtgatcctcccacctcggcctcccaaagtgctgggattacaggcgtaagccaccgcgcccagcctcgcttgtgcctttgatgggggctggtaaggtctctgaactgatggatcctgggagaggactaggtttctagtcagactgggaagaacttcagttttggacacttggaattttatatgagagctgttgagatattccaagctttggaaaagaaaaggaaaactgaagcaaacagaacattataggccaatgtgaagagagcccaaatagatgggtgatttcaaattaatgtgagaaaactaatagctcgtctatatccaaataacaatgagaaaatgcaacaaaaggaaggattccattcacaatagtaacaaaaaatacccgaagaatccacccaaagagaaatgtgcaagacttttatgaaatactttaaaatctcagctggatgcagcagctcacgtctgtaatcccagcattttgggaggccgaggctggtggattgcttgaacccaggagtttcagacccgcctgggcaacatactgagaccccgtttctacaaaaaaattatccaagtgtgctggtgtttatctgcggtcccagttccttgggaggctgtggtgggaggctcacctgagcctgggaagctcaaggctgcagtgagctgtgatcgcaccactgcactccagcctgggcgacagagactctgtctcaaaaaagaaaaaaaaaaaacccaactcacttaaaggcatcaaaaaacttaataaagggataaatatgctacattcaagatactctattgtaaataggtaaaaattttcctcatttacttatgaagtcattttttaaaaacttgctcaaaatgattctaaatgttaatgggaaaaataagcacatgagactagccaggcaaatgctagacaaacagtaatgatgaggttttggggctgtggattttctattttacacatttccatattttcaagtatgtattttgtaattagagtaacaagaaatgaaacatcagcaggaggtgtaattaatagtgatctatccactaaaaagactgaggtggaaaggaagkatataaagattacattactctgaagaagaaatattactattgactatacagaaatattatcaaggaatactgattatcaaggaatattacaaacaagtgtatgccaacaatttgataacatgggtgaaatcaacaaacatctacaaagacacaaactactaaggctgaagaagaaatgcaaaaatctgaatagacttatgaaaagtgaggagatcaacaaacttctggaaattcacaaactaccagggctgattgaagaagaaatggaaaaatctgactaggtctataaaaagtaaagagattggattagtaatttaaaacacttctcacaaagaaaatgaaaagcccaggcctagaggccatcactggtgaactctacccaacattaaagaagaattaatacaaattcttccaaaacaaaacaaaaagacgaggaggaggagggaatatttcccagctcattttatgaggccagtatcactctgataccaaaactagatagcctatgaaggaaaggaaaatacaaaccaatatcccttatgaatatagatgtgaaattcctcaacaaaatactagcaaactgaatatagcgacatattaaaaggactgtgtaccgtgaccaagttgagtttatctcacaatgcagggttggtttaacaacttaaaatcaattaatgtcacgcaccgtatcaatagacaaaggccaaacaccaaaacagcatctcaacacatgtagaaaaagcatttgacaaaatctaacaccacttcgtgatgtcaagtaatccgtccgcctcggcctcccaaagtgtgctgggtggcgtgtgcctgtaatcctagctactagggaggttgaggcaagaggattgcttgatcccaggagttcgaggctgcagtgagctatgatcatgccactgcactccagcctgggcaacagagcaagaccctgtctctgaaaaaaaaaaaaaagtatattgataaacccatcttaatgtgtttaagattgttagtttaaactgggtatggcctttctttttgggatgataaaaatgttctaaaattgattgtaatgatagttgtcccacccatgagtatactaaaaaccactgtattgcacactttaaatggatgaattgtgtggtatataaatcgtatcttggttgggcatggtggcctatccctataatcccagcactttgtggggcgaagttgggaggattgcttgaggccaggagcttgggaccagcctgggcaacatagtgagagcctgtctctttaaaaaaagaagttagttgggtgtggtggtgtgtgcctgtagtcccagcaactcgagaggctgaggctggaggatccctagagcccaagggtttgaggctacagtgagctatgattgtgccactgtactccagcctggggtgacggagtgagaccctgtctctttatatatatatatatatatatataaaaatcttatatatatatatatatcttgactatataaatatatatatcttgataaagctatagcttatcacttacgacattattcacttagttttataaaacgaagtgaaacttggcagaacaatattctattatgtgagcacatttttgtaaaatnnnnnnnnnnnnnnnnnnnnattatgtttataatagttgctttgaagtttttcactaccaaatctaacttctggagatcctcagagactagttttccctccctctgacccccagagtataggtcatatatgcctatttttttgcatttctctttttttttgttgttgaaaactggaaattttaggtaacatattatatcagctttggattttgattttccccaagaaggttgttactgtttgttgcttgttcatttgtttagtaacttgcctgtgctaactctaggaaattcattttccttgctgtgtatagctgctgatgctcagattaaaaatatatatatatttctggctgggtgtggtggcttacacctgtaatcccagcactttgggaggccaaggcaggcagatcatttgaggtcaggagttctagaccagcctggccaacatggtgaaaccccctctctactaaaaacacaaaaattagccgggcgtggtggcacgcgcctgtagtcccagctactcagtaggctgagtcagcagaatcgcttgaaccaggaggtggaggttgcagtgagccaagatcacgccattgcactccagcctgggcgacagagtgagattctgtctctctccctctctctctctctctctttttatatatatatatatatatatatatatatatatatatatatatatatatatatatatatacataaataaatcttatatatatatatatatcttgactatataaatatatatatcttgataaagctatagcttatcacttacgacattattcacttagttttataaaacgaagtgaaacttggcagaacaatatctattatgtgagcacatttttgtaaaatacaagtgcttaataaaacataatattcttaaaattgaggacaatttgtgaagcagtacaaaagacaaaagcacctcagtgtctccctgacacagtcacttgcgttgtgtagcaagcaggtctggtgacaaactctcttaacagtaattgatactacctcattactcattaataaaataataagaaccttaattgcattctttctatacatcaacactgtgcttagttcttttttttggagacagagtctcgctctgtcacccaggctggagtgcagtggtgagatcttggctcactgcaacctctgcctcccgggtttaagtgattctcctgcctcagcttctggagtagctgggattagaggcatgcgctaccacacacagctaatttttgtattttagtagagatggagtttctccatgttggccaggctggtcttgaactcctgacctcaggtgatctgcccacctcagcctcccaaagtactgggattacaggcgtgagccaccatgcccagcctgtgctaagttcttaacgtgcattttatcattttttgttcacactaccctgatgatggccccatatttttttttaccaccttccccttgcttactattttccaacatatcaaagtttacatttacaaaattgtattacttatcagaataaaaaattgcatagcttcttctgtcattagcggtacctgtaaggataaatacttcaggtctttatttgagttggtttttatgtgatcatatgcagtataagagaatatcggtaggctgggtgcagtggccctatctctacaaaaataagaacatttagccaggcatggtggcgtgtgcctataatcctagctactgggagggctgaggcaagaggattgcttgatcccaggagttcgaggctgcaatgagctatgatcatgcccctgcactccagcctgggcaagagagcaagaccttatctcttaaaaaaaaaaaaagtatattgatcaacccatctgaatgtgtttaagatttttagtttaaagcattttgtatttgttatagctgatcttcagtttgaggagaaaacactttttagatggttgtccattttttgtttcatatgatactagatttgaaagtcaaatcttcggcaaagctaatttttagagtctttttgttcgggtgtaaatatagattagctattatggaaatctcgtctttaatgctaacctgagtaatttttctttgtttttagtgttatgtgccaagaaccttgcaaagaaagacttcttcagtaagtaaacacttatttttttccctcttataatgttatgcatgtatttctgaaattttaaactttaaaaaaagattgggtatattctcttcaaagttttgccctttacttaatagaaatccatggttctccaagctttatttcccggttgactacaacatgggtagttccttagctgaaatatacagaacttataaatcataccgcaaaacctgtctttcgtttcctattctggtcacacccaattttttctgcctctctacctattagaatattgctttctgctggatgatgtattctcagctctaatacaaatgaaatacttttgtataaaacagctggatttgcatacaattgttaatcagattttataaattaaatcacatttacaacaccctataattaaaggaattgcaaaaataagagactccttttctaaaggaaggaatcactccttaagaaagtcatgcagtatctggtcagtgcctgcagcattaaattcttcacacactttctgatcctcacaagacatctttcagttcttaagtggtattattcatgctttcaagatgaagaaacttaggctcaaaggctttctccaggtagccaggaagctccagcatggtggctcgtgtccatctctatctctgacaactgtccactttgccacctgtctgatctaataaacctctctgattcattctctagcatttagggacttaccgaattaaggcctggtgaatacttgcttccatagataagataggcaaagatcagtaaacaaatttcggggcattattaatttttagaaagtctaaatacaattactttcagacacttttccctccacttaattagccccactttaatagaaatttgaatgtaagcctttttttttttcagtcactttcttttctaccctctaaaaatctgagtatggaggcatactaggctctcttagaaagctcaatagacataacttattttgctgattgaaattatcctgaaattagagaacacgaattgtgtgttctgtgtcacatggatggatgtgaggtctcatctaggtgtgggtctcctctctcctctagggctccctgacccttttgcaaagattgtcgtggatgggtctgggcagtgccactcaaccgacactgtgaaaaacacattggacccaaagtggaaccagcactatgatctgtgagttgaatgttctgtaagccccatgcggagcggcaggaaagcaggtgtctaccttttacgagaaacatccaagagaaaaaaaaaaaaggatgactttttattgataacaaaagcggatggccaaatgaatgtctacattgcctaattttagaattcatgtacttggaagttcttgcattttgttactttcttttttcttttttttttttttttttgagacggagtctcactctgtcacccaggctggagtgcggtggcgtgatctcagctcactgcaacctccgcctcccgggtacaagtgattctcctacctcagcctcccaagtagctgggattatggacatakgccaccatgcccagctaatttttgtattttttagtagagatggggtttcaccatgttggccaggctggtcttgaactcctgacctcaagtgatctgcccaccttagcctcccaaagtgttgggattacaggcgtgagccactgcgcccgactgcatttggcatgttcatagatttttatggtttggttttgtacatgtgatcctcaaacttttcaatctcctggccattttagcagaaaaaaaggccatagtttgtgaactccacatgctactgtttttcagcaaaaccctaaacctagttgtagtttctacctaaaaaatgcattttttttttttttgagatggagtcttgctttgtcgcccaggctagagtgtgcagtggcgygatctcggctcactgtgacctccacctcctggattcaagtgattctcctgcctcagcctcccaagtagctggaattacaggcatccgccagcatgcccaactaatttttgtatttttagttgagacggggtttcaccatcttggccaggctggtctcgaactcctgacytcatgatccacccgcctcagcctcccaaagttctgggattacaggcgtgagccactgtaccaggcctaaaaaattcattattatgactgtatgtttctgttgactttgaaaatttttgctttttagtacatatatattttctgcaagagaaaatatagttttatatgatcaaagccatcaatttcttatagtcattcaaaaactggattgtactttgaagaccactattttattttattttattttattttattttattttattttattttattttattttattttatttttttttgagatggagtcttgctctgtcgcccaggctggagtgcagtggcgggatctcggctcactgcaagctccgcctcccgggttcacgccattctcctgcctcagcctcccaagtagctaggactacaggcgcccgccactacgcccggctattttttgtagttttagtagagacggggtttcaccgttttagccgggatggtctcgatctcctgacctcgtgatccgcccgcctcggcctcccaaagtgctgggattacaggcgtgagccaccgcgcccggcctattttatttttaaattaaattaaatttttttttcaaacagagtctcgctctgttgcccaggctggagcgcagtggcgcaatcttggctcaccgcaacctcctcctgctgggttcaagcgattctcgatcttcagcctcccgagtagctgggattacaggtacccgccaccatgcctggctaatttttatatttttagtagagatgggtttcaccatgttggccaggctggtcttgaccttctgacctcaggtgatccaccttggcctcctgaagtgctgggattataggcgtgagccactgcacctggctgtgaagaccactattttatatgcacccatgttttcatgttcctactaagatattttcatcaaagtaatcctgaaagattattgtcttttagttaatacaaattatactgtatttgggtgggatttttaagaattatattctaagattcagtttcagtgacactgaggctgtgtaagtgggttgagttcctctctccgttgacttgcagtgacagtaaatggaggtttaatgtcttagtgtcctcttgtgtactttgaatagatccgtaggtttgtaagtagtcccttgtcgcaaaccagtattctgtatcaaacctaattggtgagaatttatgaatcatgttactgtcctatgcgactattaaaatatagtaaatttgctgggtgcagtggctcacacctgtaatctaagcactttgggaggccgaggcaggaagatcacctgaggtcaggaggttgagaccagcctggccaacatggtgaaaccccgtctctactaaaaatacaaaaattagccaggtgtggtggcaggtgcctgtaatctcagctgctggggaggctgaggcaggagaattccttgaacccaggagacaggttgcagtgagctaacactgcgccattgcactccggcctgggcgacaagagcaaaattccgtctcaaaaaaataaaaaaataaataaaaataaataaaatatagtaagtctgttataagattattatcatcgtgtggttatctacatttgccccttccataaggagcaaggtagttcttcttcccagcttgttgaaattaatggatacgtatttattaaatgcctgttacatgtgtaatacagaggcaacattattttataaggtttcttaaagagaaaatctcaatgagatatcataattcagaaatacaaataaaagctgggcatagtagctcatgcctgtaatcccagcactttgggaggccaaggcaggtggatcacctgaggttaggagttcaagaccaacctggccacatggcgaaaccccatctctactaaaaatacaaaaattagccaggcatggtgatgcacgcctgtagtcccagctactcgggaggctgaggcaggagaatcacttgaacttgggagttgcagtgagctgagatcacacaactgcactccagcctgggggcaacagagcaggattctatctcaaaaaaaaaaaaaaacaaaacaaaaaaaaccaaacacaattaaaaatgagttttgcactttctttccagatatgttgggaaaacggattcgataaccattagcgtgtggaaccataagaaaattcacaagaaacagggagctggcttcctgggctgtgtgcggctgctctccaatgccatcagcagattaaaagataccggatgtaagaaccaaacactttcctgcctcttaatgcaaccaaagaaagcttaggaggcatcgttttttgttttgatcgctgaatactgaattcctgccttcctccctagttcacgttccttgggttaagttttgaattgtttgtttacagaccagcgtttggatctatgcaaactaaacccctcagatactgatgcagttcgtggccagatagtgggtaagaactttcttgtctgtgtaaagagatgcttttccagaacttacattcaacccttcatcgccgagaactcacatacaggcactgacgatgctgacgggcctcagaggacagaccacgtacggggccttctcttcagtactaggaagttttgtcttgtgtagtttttattattttatctaattcccttctcctggcttttttttttttttggtttttttttttttgagatggagtgcagtggtgagatctcagctcacykcaacctccgcctcccaggttccagcgattctcctgcctcagcctcccgagtacttgggaccacaggtgtgtgccaccacgcctggctaatttttgtatttttagtagaggcggagtttcaccatgttggccaggctggtctcgatttcctgacctcgagtgatctgcccgccttggcctcccaaagtgctgggcttacrggcgtgagccaccatgcccggcccccttctcttggcttttaaagttgagtaaaaatgactcgggtacagaaagatttagggttagaattttaaatgtaattttaatcatcacatttatggacaatacatttttgaccgtattatccaagggtagataataagaatggtggccacacatacaggagttgggaaatagtttcttctggaagccccatcatatatgtaaaaagcatagagttgtgaagaattccatgtaatatgatttgtacagtcaggggactgcattatttagaatgaaaaattaaagtgtgctaatgttacaaagtgttggctagaggcartctgttggaagtgatttagctgttaaataactcatcctattatccacccacttgtattagtgttttagggtaactcagatattgacttggaagcactgctgcatggaataaaaaaaaaaaggtctctctgcagcacactggagtgattctcactccaaatcttttaggtattgtcctgtgtagacctgacccaagataaatgaatagtgcagacatacaccctgaaatctaccatcatgaaaaagttctcaccgaatgctttcctgcgtgtaatttcttttttctttgtggcgggatgtgccagggagaaaaatgagtaactgaaaacaactttataaaagtcttgttcatagtaaagatagagaataaatatttagattcacttagactttgcagatactgaaagtactctctgtgtctttattcattttttttttgacacggagtcttgctctgtcgcccaggctggagtgcagtggcatgatctyagctcactgcaacctccgcctcccgcgtttaagcgattctcctgcctcagcctcctgagtagctggagttacagctgcttgccaccacgcctgggtaattttttgtatttgtagtggagacggggttttgccatgttggccagactggtctggaactcccagcctcaggtgatccgccygccttagcctcccagagtgctggtattacaggtgtgagccactgtgcccggcctctctgtgtctttattaaacttaagtcagaatgttcttaagaaataaaaactgggctcagtggcacatgcctgtagtctagctactctgaggctgaggtgggaggattgctcaagcccaggagtttgaggccagcctgggcaacacagtgagacttaatcccccccaaaaaaacttcttatttttattattttttttaatttttaattttttttggagacagagtctcactctgtcacccctgctgcagttcagtggcgcgatcttagctcactgtaacctccgcctcctgggttcaagcaattctcctgcctcagcctcccaagtagctgggactacaagtgtgtgccaccatgcctggctcatttttgtatttttagtagagatggggttttgccatgttgcccaggctggtctcaaaatccttgagctcaggcgatcctcccttcttggcctcccaaagtgctgggattacaggcatgagccaccgtgcctggcccaaaaaaagtcttcttaaaaaataaatcttcttgaaaataacttagagggactgaatattacattgttatttttatggagaccaggagaaacatagcacccttttcttcaccacatttacaaggaatattccaagtagcatgcagctactggagtaaaatgcttcgtattggaaagcataggaatatatgtgtgtatgcatacacatatgcctcgttttttatgatattgtacataaattctaaattagcaatgactcactgtattataattatgtaaaccccgctgggttttaacacaagtcgttcttttctcttttagtcagtttacagacacgagacagaataggaaccggcggctcggtggtggactgcagaggactgttagaaaatgaagggtacgtataaccacagcaagaggcgggctgagttctctgctgccttaacctctcggcctataggaaagcgcccttccctccttaagtcactctgcagaatgcttgagatgcataaaggatgttgggataaaactgtgaaccagtttacttggctataaaggaagctgtaaatacaactggagttggctgggcgtggtggctcacgcttataatcccagcagtttgggaggccgaggcaggtggatcacgaggtcaggagattgagaccatcctggctaatacggtgaaaccccatctctactaaatatgcaaaaaattagccaggcgtggtggtgggcgcctgtagtcccagctactggggagactgaggcaggagaattgcttgaacccgggaggagggggttgcagtgagccaagatcatgccactgcactccagcctgggtgacagagcaagactctgtctcaaaaacaaacaaacaaacaactggggttgtgcctgactcaaaatccagtgaaagaggctcccacgggccaaagatgggtgagtttgagcatcaataagaattataactgcctgtaatcccagcactttgggaggccaaggtggccagagactttggtctcgagtttgagaccagccagggcaacatagcgagactttgtctctaccaaaaaataaaaaataacaaattwgctgggcatggtggcacgcacctataatcccagctgctagggaagctgaggtgggaggattgctttgagtccaggagtttgaagttgcagtgaaccctgatcacaccactgcgctccaccttgggcgacacagcaagaccctggctcaaagaaaagaaaagaattataactgccatgaatttggaacatatcagatatattaaaaatctttgggttcataatgacggggggaggaactcaacacactaaaaaaatacaacaaactgccgaaccgtcattggtcactgtcacaattttgcagtcccccatgaattaatggacctggccaacaagcagtaattgctaacaacatcacaaaagagagatgatccaacattaacacacctcttggaaatacagggaaccaggaatgtgtctcacggccccaagggaatataatcaacaaacatccagaatggggccttctgtaggacagacaacccagggtcttcaacaaatagactgcaagaaaagcaaagacaggagggaaggagaacctgtcaacaattcatattcaaacaaacttgagacatagctacacatgcaaggtgtggactttggatcctgatttatgagacaattggagaaatctgaacaccggtatttgatttttttaaaaaattaatgaacattttttagtcatgataatggaaatatttaaggatgaagtcataaaatgttggggttggtggggagggattggaagagtggacattggatgatggttagctgggaggggtggacacagggggttcattgtactggtctctcattttttatacatatttgaaatttttcaatctaagattttaaaagagtatttgcttctaagggacagtagcctattaaggtgaattgtcttcaaaattgctcagggggtgaagattgatgtttaaaaagtatctaaaggcattttggcattttatgtaaccaggagtttcattatagagtaaaataacaaggaaaatggagtatttggatatgattttattttattttaaagatggagtctcgctctgtcacccaggctggagtacaatggcacaatcttggctcactgcaacctctgcctcctgggttcaagcaattctcagcctcccgagtagctgggaccacaggcgtgtgccaccacacccagctaatttttgtatttttagtagagatgcggtttcatcatgttggccaggctggtcttgaactcctgacctcaagtgatctgcccacttcggcgtcccaaagttgggattacaggcgtgagccaccgcatctggcctggatttgattttaaatcaagaaaaatgagatctcatttcacaaactcctcatagtctaaggctggtttcttctaatcatttcagtctaccctatggtgaaattgtacagttggccttggggacactccggccacctgttcctcttagaagagtctgtctttctgtttgagtggcacatggtgaattttacaaaactaggcccttggaacactggacgttgttaaaggaaagcaaatcaatttatgtgacggtgtcccctargacactagccctaaggcgctggtctkgtgactcctccatggtgacnccatgcctgcctgctctcgtccctttcagaacggtgtatgaagactcsgggcctgggaggccgctcagctgcttcatggaggaaccagccccttacacagatagcaccggtgctgctgctggaggagggaattgcaggttcgtggagtccccaagtcaagatcaaagacttcaggcacagcggcttcgaaaccctgatgtgcgaggttcactacagacgccccagaaccgaccacacggccaccagtccccggaactgcccgaaggctacggtgagagaatgtatcctgctgtggccaatgccatctgccctgtttccatgagttgactttttttttttttttgagacaaggtcttgctgtcacccatgctggagtgcagtggcatgatcatggctcacggcagccttgacctccctagctcaagcgatcctcgcgagtagctgggcttataggcatacaccatcatgccyggctaatttttgtattttttgtagagaatgggtctcgccatgttgcccaggctggtctcaaactcctgggctcaagtgatccacctgcctcagccgcccaagtgctgggattacaggtgtgagccactgcatctggcctttaaccctttttgagtagcctgtgccataagtgcggatgtttgcgtggctatgccatttgataattgtggcagtgtaaagacaactggaagacaatggtcctaaatctagctaatcatgaattttcagcaattgctccaaatctcccagtttagaaatcaagtgaaaatcttaggcaaacgaacaccaaagcaaaccaaggtaacatgtaggctagatgagggtgtctgtagtgctctggaaaggagagcatggggcgagatggagaagaggggattattcggccacctcagagagaagaactgggataagaggggagtgttatctagatttagataataccagacgtgagggcatcgagggttggttacaaactctccctggaattgaacttgtctcatttggatctctaatttcttgtgtagaacaaagaacaacagtccagggccaagtttactttttgcatacacagactggagttagcacgtggcacgaccccaggataccaaggtaagcctcctgaaatggacaccccccagctgtctttccagcagttgacttgaaaagccaataccttccagatgtgttgctcttgttttaaactaaaaatagtgatgaatgagatgatattgatgtctgggatttccttcagataagctggggtggggggagtagacaggggtacatttgaaacgtgagtcattgttgacctttgaaacaaggttgaccatgatcattgttgaagttggttacacagcaattccttatgatcactaacttttttatatgcttaaaattttccatcataagtcaaggaaatataaagactctgttaccctttctctcttctactttactgtccccattgcctcagtccctcggggaccattcctgggggagatgcagcttttctatacgaattccttctacaaggccatacatctgagcccaggttagagagaccccccccccaccccataacagagttaagtttctttttttcttttgctttttatttccttttagaatagcattactacctaatatgatttttggtaatatttagttcctttttattcatgatttgtttcatctgagaataaacttcctgtctgattttccaasactatgtttaatgtatgactcagtacctataatgagactggaaatatattacctgcaaatgaatgaggtgtctcttttgtaccccctgttagaaatgacaggcttttgtgttaattagaaacacatcttggtcagtaaagctgtgctcccttctgactgtagattgtgttgaaattattaatcaggagaatmattaatcattcttagagtggaaaatacttgttgagcaaaaagcccatttgaaaatgagaatgcctcgtcctgctgcaactgtttagaattgcgagtttctgaaygcatgttcctgtacctcccttagccctgaaaagcttggtgctgtctgggaactttccaatgaagaaacccttctggccgggaacatttaatgacacttgtgaattcagatagttttctgacagcactaagatacttcctactattagggccttctttcatataagaaatgatatgccgtggggagcccctgttccttatcatggttataagctctgaaactgcctatttttttttttggagatggaatttcactcttgttgcccaggctggagtgcaatggcgtgatctcggctcactgcaacctccgcctcccaggttcaagcaattctcctgtctcagcctcccaagtagctgagattacaggcacccaccaccacacccaactaatttttgtattattagtagagacagggtttcatcatgttggccaggctggtctcgaattcctgacctcaggtgattcacttgcctcccagagtgctgggattacaggcgtgagctaccgcgcccagcctgaaagtttggttttaaatctctcggatgttgctgctgtttgcagcagagaggcctggactgagtagaggtttggcgtaagtagcaccacgaaggtccatcttagcagagctgggacacagacaccttgataaggaacctctgtggcttctgttgctgacttttggtctcattcctccatactcagttggacaaacctctctgtatcttccattttggtagagaccttaacagtgtgaactgtgatgaacttggaccactgccgccaggctgggaagtcagaagtacagtttctgggaggatatattttgtagatcataataaccgaacaacccagtttacagacccaaggttacaccacatcatgaagtaagactttaaaaatattttttgctgacctctttcattggtaatcnaatgctttcttggactggtatttttgtgaatttattgactgtcttgctggttggataataagcatggtcaaaatgatgttaaatatctggcggataattgcatattttaaactcttaaattagctgtgaagagcactgaagccctatgttgttgctacccttttcttacttgcagcctacataaaatttaccgagatggcagtattaggcggctgcacgaaggaagtttccgcacgcagcgctctcatgagacacgtggcccttaggttgagaagtagagatacgtgctatccccctagtgcctgcacggtggggaactggataccttggaactgggaattatcttggatcccatatttagtgttccaggcctgtcgtgttctcagagccaaacattccacatagctctttttttttttttttttgagacagagtccagctctgtcacccaggctggagtgcagtggcacaatctctgctcactgcaccctccacctcctgggttcaagtgattctcctgcctcagcctcctgagtagctgggattacaggcgcccgccaccatgcccagctaattattgtatttttagtagagatgggattttgccatgttggccaggctggtcccaaattcctgactgcgggtgatccgcctgccttggcctcccgaagtgctgggattataggcatgagccactgcgcctgcccccgacatagctcttttaaccgacagctctgtgtctcagtggcaaaacttgaacaggacaaatgccactttgtcaccgtactaatcctactccttttactgaaattttgctctcaatgagcaggtgtagaaatctcttggcggtaaaaatgagggatggttttcattagatttcactcgagcggtctgctgttgtgcctatcatgagatttcatttgagttctccactgttacctcctttaaaattttttcccatcatctccatttcattctaactgccaaggtgcatctgatgatgctttggttcatctcatgggtgcgtaatagatgcataataaatgacagccatttccatttttatttgtggtggtaatgtgtgagataagtgtttgcttggaattgtggtacctccttttttttgagagagagagtctggctctgtcacccaggctggagggcagtggcgcaatctcagctcactgcaacctctgcctcccgggttcaagcgatttccctgtctcagcctcctgagtagctgggattataagtgcccaccaccacacctggctaattttttgtatttttagtagagaccgggtttcaccatgttgtccaggctggtctcgaactcctgacctcaggtgatccacccacctcagcctcccaaagtgctgggattacaggcttgagccaccacgcccggcctggggtacctcctttatggtactgtagacatacatttaggctaatgtggccatcagcaagtttgacacagctagctaggtacctggttacgtcatcagggaaacaaattctccctgaagttgtgtgcagctagctctctcctctgaccctgtcgcgtacgtggstgcttgcagctcccctggccggggcttcggagtgactttctgcatctyttcttctcaagtcaccagtgccaactcaaggagcccagccagccgctgccactgcccagtgagggctctctggaggacgaggagcttcctgcccagagatacgaaagagatctagtccagaagctgaaagtcctcagacacgaactgtcgcttcagcagccccaagctggtcattgccgcatcgaagtgtccagagaagaaatctttgaggtagagagttcagggccactgcccagaccctgttcagaaacaaataaggcaattcagacaaaggaatctcaaatgcgattgttttcaagggctgctttaaatgaactgctttgtgggtgatgtctgcgtttcagggaacccttctttctgtttggtatttgaggtattgattttattactaagggaagtgcagagtttgtcaggaccacagcctgtctagagggagggaatggtattcatttcctcttatggtaaaaatggaaaaactaaatagtttcacctctaggtgaaaacctagaggtgtatacagaaactagcactaaaaaatagtgggaaccgccttgtctacatgatgtgggttaaatattcctgcaatctgcaatctgcgctttccccagagccaggtagtctccctcctctcttcttgtatgagatgtcatctgagggctctccttctcagggcagctcaggggctgggggccatcctgcttctcctgtggaaattggcgaggagcaggtggctcttgggacaggctctgtcccttacacagcttcctgcaggagcaggtccctaaacagaccaggcccttttcccaagaaagctgaccatacaggaaaatctccatggcatttgggccatttcctgccctcctttgtggagacactgtcagaaatgatcaaaggagactgagcacagattctccctgggtgacagcactaagggagcactggggggccgagggagctgagcgccttccccaccgcgagggctgggcctgagtgttggatgggcagcttggccacagcgcccagccctgcctgctgcatgtatgcccttgttgcagggctagaaaagcgctgaagtactgacttcactaccagctcgtttcctctttccctcttgggttgccagagtttatttgtttgggtttttttttttttttttttttttgagacggagtcttgcactgttgcccaggctggagtgcagcggcatgatctcggctcactgcaacctctgactcccaggttcaagcgattctcctgtctcagcctcccgtgtagctgggattacaggcgcccgccaccaggcccagctaattttttgtatttttagtagagatgggggggtttcaccatgttggccaggctggtcttgaacttctgacctcaagtgatccgctcactttggcctcccaaagtactgggattacaggcggagccaccgcgcccggctgggttgctggagtttgaattgcgttaaatttaaagcaygaaaaatttcttaagtgcctcgttactgaatctacatctataaacacgtagcggcttctgcttcaagtgctgagtgtgagggaatagcaggctgatcacatgtgttctgtgctgtgcttaagccaccttatgtcttacttaaaatctttttgccttttgactcagtgggaaatcaaatgtgatttttcactttagatataaagagaggctcagaactctcttagcattcagactttctaatgtcttgattttggttgcgatgcacaagttgtttatagtgtgcattgaaattaatttatacagagaagaatcaaccctagtgagttttgtccttaagtccttggtgattcactgaaaacagacacgtgtttccctgaaggttagtgtttcctggcatcgtgtttgttttgttgttgtctcagagggagaaactgagaaaaaagatgatggaatatactagatgccgaagaaacattctgatgaggagccagataaaacttgaattggaatggatgcgtgttcttaaccgggctccattatcaatgacctttcataactttaagaataagaatgttcttctctctgaaactgtgatgttgctcttcaggagtcttaccgccagataatgaagatgcgaccgaaagacttgaaaaaacggctgatggtgaaattccgtggggaagaaggtttggattayggtggtgtggccaggtgagctgcttgttcattcaccttctctgctgtgtggatctcagtcttttcaagagaagtcatttgcccttctccagtgctcatcaccaagcactcctgggcagggctgatgtctccttggagcagtcgggccatcatgcactggcttcagccaccctgcggagaataggaattcctccgagcatgctcgtgccagcctcttgccataacctaccagaatatccgtgattgtcaccactaattgacttcttgtaaagctagaattaaacttttaaattcactcccttcttttgaaacatgaggagcatgctcctgaaatttaacacaggaggcagccttgctctcctctgtagaggatttgctgcagggagcagggcagggattgcatttgtgcatgtaaattgcatttgtgtcaaaggaattttgtaaaatgttaaaattttggtcaaaataattcaagaaaatgatattaaaaaacagaatagaatgatgaaaaactgctatttcatgtcctgcttcttttcagcttcaagacaattttttttttttggtcttttttgagayggggtcttgctctgttgcccaggctggagtgcagtggcacaatcatagctcactgcagcctcaacctcctgggctcaagcgatcctcctacctcagcctcccaagtagctggaactacaggtgtgtgccaccaggcctggctaatttttaaaaagttttttgtagagatgaggtcttactatgttgcccaggctggtctcaaactcctgggctcaagccactctcccatcttggcctcccaaagtgctgagattgcaggtgtgaaccgctgtgcttggctaagacaactgcttcttaactcttttagctcttttctttgaataggtatcttgttatttccggatttaatgatttatgggcatatacataagatagactgactctagttactctcatgttcaatttagtaatatggatctttttagttcttccatcatttgtaactttatgtcctgtgctttcacctttatttttttgatgtatcaactagagacatgatctctggacctctcatttgcataagaacaggatattcatacttacaactttctcttcagcattccttctgcctcttaaattctgtcatctgtaatattacttttatgttgtcaaggttaagatttacattctcttctgtaaccaaaatttggtcagtctcctatgcttgtctaccaattatttgtaaagggatgaaagtttatacggtttacattattatgaatgaaaatattgtccattaagggtttaaatagtattctagaatttaactttttggaacaaattctaatttttccaagaatttcttcttcccttttttttctggagacagcatctcactctatggcccaggctggagtccactggctggatctcggctcactgctacctccacctcccaggttcaagtgattctcatgcctcagccccctgagtagctgggattacaggtgcgagtcaccatgtccagctaatttttatatttttagtagagatggggtttcaccatggtggccaggtgggtgttgaactactgacctcaggtgatcctcccgccttggcttccctccccagtagctttcactgyctctactgccccttgaacttcaagtcctccaggatggttacacatcataccttctgacagcccccgtgtctcctgcaaggcctctgtgcagcctgatggcgattctcttgctcctctgtgccgtggttgtcctgagacttcactgcttccctgggtgaggtccattgtcctgggcgtcccatagcttcccctttcttggcgtcctcccttgtcatgctgtgaccaccgcatggttgtgtggtgtgatgtttctctttctcatctgcatcttccaagagagtcaaacwacatgcagtcaggaacttgtcttgttcacagctgatccccggttcctagaacagcacctaacacacagcggaacacttgtctctgtaaatatgtgccaaatgaatgaattttactttttgttaatttcttcgcacattttctttctttggtcrttctgaaatgcctgttactcagctgtcggactccctggtttggtctggtaggagttacattccttctgcgttttccgtagtcatccagtcttctgcgtggagatgggtcgttgtgaatttcccttgactgacatgatgctgtagtggaaagagttgggaatctctgctctgccacctccagtttggtcttgtagtgttatttcaccactggagtcttcctcctaatgggatgatacttagagaacggtggagagatttcagttgcatgtgtattacacatgtgcaggtgtgtgttcattatccgatctgtgggagttaggctacacttatctccccagtatttagtcctgaagtcctttctgtagcctctctttttggcctgtttagttattgcttcccttaccacttccagaacagaactgattgtatctttacgctgtccatggctcggtcggaatgtttgcttgtattttaatcacttcctgtctagacaactggaggtctttgtctttttcaaaaaaggttcttcctaaattgaaactccaaaacttgggatgaattcaaattcagcaatgttgcctttgtagtaaaaagagactttataggattcggagtctcatctcttctggcagttcctttctgttcttttgagtacaatgaagaactgtttttgtttgatattttttgtgtattctcacgattttcttggacagattatctgcatttgtgtctgtccttccctattcgctctcatttctgtttgaaaaagtaagaaattccagaataaaatttggagctgctatcttaatgcgatccgttgaaaaggagttttgagcagaatgaatagaagactcttcgtagatctgccacaggtgtttgtctaagggctgggcttaatgcaacctgagtgtagccactgaaccatacaatttctatttaaagtgccttttttttggcttgactgtttttaactttggggtttttmaaataataaaatgatgcaaacattaaagaaattcagaaaataacaacttaggctgrgcgtggtggctcacgcctgtaatcctggcactttgggaggccgagatgggtggatcatttgaggtcaggagttcgaggccaccctggccaacatggtgaaaccctgtctctactaaaaaatccagaaaatagccgggcctggtggcgcatgcctgtagtgccagctactcgggaggcaggaaaatcacttggaccaggaaggcagaggttgcagtgagccaagatcatgccactgcactccagcctgggcgacagagtgagactccatctcagggaaaaaaaaaaaatgtagaaattttagcgcgtctcaaatgcatttttgttgtttgctcccagggagtggctttacttgctgtgccatgaaatgctgaatccttattacgggctcttccagtattctacggacaatatttacatgttgcaaataaatccggattcttcaatcaaccccgtaagtatgaatgaacaaagaggtagggaattgagttggagaagttttgagatggattttcagtttcattctcagtccttggtctatttgttgtagacttaatcaaagacagtggtaagcaaaacatggagaggtaaagtgaaaactgaattaagatggatgattccaatcctgtattttcagagatcgtgatcactgggtgtgctgtgttgaaggagatgaagggtgaaactgagctgttcatacactcacactttgtgatcatttgagggaactctggtgtgrtgatcgtatgtgttaatggtgtcattctaaggagtaggttccgaagtccagcctcctccyggtcaaaactggaatctttccagaactagctttttaagccacaaatgctgccacccttagcgtgctggttttagagatgaagaagtcagtgcagtgtttgcacgcccagctcaagggtgggcagccggccagcaggggactcctcctgtggcaccacggccttmaccagcgtcctgcacaggccactgaggcgaagtcgggacaggctccgcttgtgcattcaaatgtggaagaaccttttaccaacatggaagcagagttttgattcattttttgaggtgaacataattcaaacctgaaagtagagacgtgtggttcctgagttaagaccagaacggctctggttctagaatggttcttttcttttttttgagagagagtctcgctgtgtcccccaggctggagtgcagtggcatgatctctgctcactgcaacctctgcctcccaggttcaagcgattctcctgcctcagcctcccgagtagctgggatcacagacccctgccaccaggcccagctagtttttgtatttttagtagagatggggttttgccatgttggccaggctggtctcgaactcctgacctcaggtgatctgcctgcctcagcctcccaaagtgttgagattacaggcgtgagcaaccatgcccggcctaggattgttatttgatttggcttactcatacatattttcctgtggtctttttctcccccttagcatttcttccctccctccctctctttccctctcttcctttcgttctggatcgagggagtggtggtggaggaggaagggaacttgcccttttctttcctgtgcagtgggaggaagcacagggctggcttcctgggtgcgcgtccagcatggtgccgaggccctgcagtgtcaaggccctgggcttggttcgattctctgttgtcacgaaggtgaaattctcagtsattgctgaacacggggctcctctgccagttatatggcccttctgaggaggtgttggccctgagagcatacaaaacgctgtccagcgaatctaggcaaatttctgctacacaagcagccttctttcacttgttcaggagcggggcctgtgagtccctgagtcagtaggtctggttgcctctgggacacttttcccaagaagcttggggacagcacgagattcccacattggccggcaccatgctgacaaattcgtgttctctggtgccccctacaggaccacttgtcttatttccactttgtggggcggatcatggggctggctgtgttccatggacactacatcaacgggggcttcacagtgcccttctacaagcagctgctggggaagcccatccagctctcagatctggaatctgtggacccagagctgcataagagcttggtgtggatcctgtaagtattgactgacggccggtcacctggcttagggcccaccaccacgtctatcgtatgtatgcgcgtgcgcgcgcgcgcgygtgtgtgtgtattttggggatgtgtgtgaagccattgtattataacctgaaacaaaaaaaggrgattytttggaaggcggaggcgggcagatcaattcagtccaggagttcgacaccagcctgggcaacacagtgagaccccgttactgcaaaaaaatacaaaaaaacccaccagatctagcaaaaagtactcagttgacttattttcctcatgatgttgggcaggtttctcttcatggactagtttcttttgtttccttgaatgaagaaggcgcgatcacagacgttaacaggccactccccaggcccgttgtggggtgtgtgtgagacactcagggcatctccagttaacctacacaggggccaagcaagtatcaaaacaaaattaacatttagttacctctgctttagaattattctaaacactctgttaagagcagcaggcagtgacaagatgaaccgtgactatcacgggtccttgcagatttcacggggacaaaacatcaggctctgacagatggagggaatgtgggtgagtcggagtcggggctcctggttgtgtcccatgtgtcacatgttccaacttgaacaggggactytggggatcaggtagaaaatcttccactcagctgggtgcggtggctcatgcctattatcccagcactttgtggggccgaggtgggtggatcacttgctcttttcacttgaggtcaaaggttggagtttgagaccaacctggccaacatggtgaaatcccgtccctactaaaattaaaaaaattttaaaaagccaggtgtggcacatgcctgtaatcccagctactcaggaggctgaggcaggaaaattgcttcaacccaggaggcagaggttgcagtgagctgagaccacaccactgcactccagcctggatgacagagtgagtctctgtctcaaaaaaaaagaaagaaaaagaaaatcttccactctgcctaggctcaagaacgatggcagattcaagagctagttttcactttcgagtacttttgtgtttgaactgatgcctttgggaaggctgcctctaagggaggaacagtatttttttttttttttttttttttttttgagacagagtcttgctctgtcacccaggctcgagtgcagtggctcaattatcggctcaacgcaacctccacctcccaggttcaagcaattctcctgcctcagcttcctgagtagctgggactacaggcgcctgccaccacacctggctaattttttgtgtttttagtagagatggggtttcaccatgttggccaggctggtctcaatctcctgacctcgtaatccacccgcctcggtatcccaaagtgctgggattacaggtgtaagccgctgtacctggccaggcacagtattttcttggcatggcttcatctccaggtcaatttccctttgaccctggtacctcttcacgttcctgccttttgactcccacactgcttacaaagcagctgggttgtgggtcccctgaaatcacaggatggtacagcaacctgctgcccgccttctatgactgtggaagccaggagccgggacatctggaaacagagctgtggtctcagggtcctccagcacctgttgctgtgccacccccacgcaggttctgtgtctgcccgaggctgtcctgtcttgcagcccygggtttggcagtcgtaaatgttttctgtctacccaatggccccgcgtggtggcagagttctaacctacatccttctgtcttatttcaacagagagaacgacatcacgcctgtactggaccacaccttctgcgtggaacacaacgccttcgggcggatcctgcagcatgaactgaaacccaatggcagaaatgtgccagtcacagaggagaataagaaagaatacgtccggtaatgccacctgtcggggacggccaggtgcctggggcgcggctgagcctgcatttagttgctgtagctccttcgctgtgtgaggcctgcatgtccctgatggctggtgcttatgatcagatcacatgaacagaggcgactttcagaaaccgacagctcagcagcagcgtcagggatctgcttggaggggccctgatggggccaggcctggcctgagggacagagcccatgtggggaaggacttttcagtgaccacctaattctgggtgcaaaggtggggggcaaaggagagagcagcagcttggagggtctctcgtgctcagtccgaggaagccaccctctcagtttttttccacccctaacttgaggcagatctgtgttcaggcctaggcacttgcggcctaggcacttgcagctgagaactatgtgggcacgtctgtgtgccacgctgtcctgtgctgtactttcaaatgtacttttacacatttaaacaatttttaaatttttacatggtcttgctatgttgccaggctggtctcgaacccctggcctcaagcaatcctcttgcttccgcctcccaaggggctggcattgcaggcgtgagccgccatgcctggccagaacatgctttcacattgcagcaattgatgtgacagatcaggttcaatcctcctgttttcgcgagcaaatcggaatgaatcagggcacgtgctgagtcatttttaacgtgatgccaaggtttggtactactagctggtggtgtgtttgtctgtcttggagagatccggggagtggggggctcagtgtgttcccatgtttgtcagactgtgatatcagaacctgctcacaggtcgggcgcagtggctcatgcctgtaatcccaacactttgggagaccgaggcgggcggatcacctgaggtcaggagctcgagaccagccatggccaacatggtgaaaccccatctccactaaaaatacaaaaatyagccaggtgtggtggtgggtgcctgtaatcctagctactggggagggtgaggcagaagaattgcttgaacccaggaggctgaggttgcagtgagccgagattgagccattgcactccagcctgggtgacagagtgagaccctgtctccaaaaaaaacytgcccatggcggaaaatccacttggtgttgcatccaacttgcgagtttttcttccaggttgtatgtaaactggaggtttatgagaggaatcgaagcccagttcttagctctgcagaaggggttcaatgagctcatccctcaacatctgctgaagccttttgaccagaaggaactggaggtatgtgcctgctgtgcggagtcgacccagggcgtccctgtggctggcgtctgcctgttttaaatccttgctgcagggggcagtgtgtgccgctttctagtaagcctaggagctgctggggttcccagactagagccagggctggagcaagagtggggagtagagggtgttcatgccagttagtaaccggcgagatgtctgcttggcggtaggaaatctgactaactcccgggaaactgttcaaggtggctgtggcttcccttgtttgcaagatctctagcaggggagattgcatagccctctcctgtcttgggagaaccaggttctcccacaagagcatcttactgctttttattctggctcttcctagcctaggaacaaggggctactgtcttctctagtcatactgcatgcacttgaacacggtgattcattcagcccttatccatctctggtgccaaatagctcaagccgtgtagattgttctccaagtctttctgctgccagtgaggagagcttgggagccaagagcttggatggagcagtagttctggggtgaacttttgtggttttttttttttttttttttgagacacggtctcgctctgttgctcaggctggagtgcagtggtgcratcatggctcactgcagcctcgacctcccaggctgaagccatcctcccacctccgcctcccgagtagctgaggctacaggtgcacgtcatcatgcctggctaatttttgtatttgttgtagagacggggttttgccatgttgcccaggctggccttgaactcctgggctcaagtgatctgcccaacttcggcccccacaaagtgctgggactacaggcgtgagccactgcacccagcaggggttgaactttttaagccaattgcggaaacatgccctatcggccccagccccacctaactcttgctgaattctcctctcttcagacttgaaactccacatgtccttgagtgtcctggagagaccctgggacgtgccgttattcatggttagctctgttcagtgtcaccggttggttctttgatactcctcaccgatgcagagcaaaaaccccgctttggttataaaataacatcccatcaacagctgtgcaccgcggtccttggggttggagacccgtttggaggaggcggacggaagcatgtgccacaggcctcctgtttgtagctttcttcctgtctcaacatctgcctagtacacagctgctgctttgcttgggaatcgacktttcactgttgtgtgtcgggtacctaggaggcgcatcctgacgtgggtttatgcattttggaagtaattcayctttctgcacctcctcagctgatcataggcggcctggataaaatagacttgaacgactggaagtcgaacacgcggctgaagcactgtgtggccgacagcaacatcgtgcggtggttctggcaagcggtggagacgttcgatgaagaaaggagggccaggctcctgcagtttgtgactgggtccacgcgagtcccgctccaaggcttcaaggctttgcaaggtgactgaygtggaggcagggctattcgatgacgcgtctatgtgcgctgtgggcaggaagagctggaaggtggctgggatgtttttctgagatgtgtgctagaaaatggcataaggaatgttctccagtagctaatgctctgccctacagaggtggttacctggcaggggccgtgtgtgagcaggtgtggggccccgctgagcaaagactgtggagccactccagggcacctggattccccctcctcactgcttccaaaaagccaagagggtctggacagcaggggccttcagagtgtctgtgaggccagcttagccaagatcccggggagggagctatgggggaaccgcccccagtctcagtggctccaaagcttggagctgcacatgaacccgtttagccaccaaccacaccgaaagatgatgtcctgctcactctgtttaagccactgaggtcgccggaagtggggtggaattctgtgcgaaaggtgcccatctgcctgtagggcaggcggcctaatgtctcatcttttacacttagggtttggagggtacgttgctggaaggagtgaggtgagtgaagggtgtcaccatactgaaatttagctgattggactgtaaatgctgatagacacacagacacattgtaaacacagaatattccctctgcctcgctgagtaaaatgaggttaattccatttcagtyggctttggccatcagggcacctgcatcttttccattgtgacctctgcctatagatttgctgctgggggcccagcatggataaaaaggggtttgaggctgagccccgctcgtatctgggagcctctgtctgcctgaccatgacagctgctcccagagcttgctggtgcctgtcatttacaaagcctttctcattcagttctcccaacaaccccgagagcctggctgatggggattattagccccattccatggatgaggaagccgagactcactgaggtcatgggatttattatccccccgaggaaaaaaaacaggaggtgtgagtggggaggcagggcaggaatccaggcttcctgaccaagtcacttttctcatggcgccattgtcttgcccacagcaggtccacatgctaaaccttcctgcttagagatagtccctgtcattgtaagggtctcattagtcctccaataattggatagactttagcccagtgtcctccaagtgtctagaaggtgggtcagaggtgaccagggtcacagtcccgaacagggagtgctggtgctgtgggagggcactgaatggtggcccgggcagagtggccagggccctgcaggaggtctctgaagrccctcacctggcccagcctgtcctgactccccaggaggctggggcttggagggtgtggcctgtgagggggaggagccagcttcctgtcccaggaccccagaaaccaggggctgcacwctgagaccctctgcccaacataaagatggtgtctctgctggtcctcattgctcccggagtcctgtcctgccactgaccttggcccagcttgaaaggagtatctgtgaatacacaggagcaaggggcagcagagccaaggcccgtgccctctgcsccctcctttcccagcacctggcacccctgtcagctagccgtctttgcagcagcagtggtggctgctggccagcctggtgctcacttggggctgagtttggaaacacctgagcaagaaggggcctggtgcctctccctgccctacagaactggtgggcaagtcgtctattccagagggtgggtacaaatagctctgaccctcagggagcctgtctggagcaggcccatggtcagggtgcactttagggggggccttagcagtccttgctctgccccctgcgatattctaaaatgttggcatcttggctgagtgtggtggctcacgcctgtaatcccagcactctgggaggccgaggcaggtggatcacctgaggtgatccaggagttccagaccagcctgggaaacatggcaaaaccccgtctctactaaaaatacaacaattagccaggcgtggtggcatgtacctgttatcccagctactcgggaggcaggagaattgcttgaacccggcagtcagatgttgcagtgagccgagactgccccactgcactccagcctgagcaacagagtgagaccctgtctcaaaaaagtgtctgaattttgtcactttgatagccattgcaggcatgtcctaaaaccaggcctgggaacctcatggccctctcacaggacagcctgcctgggtgtgggggtgggaatgtggtcagggccctgctcctgggggctgtgtggccgggaagcgccacggctgtaactctgaagtacattaactagaatgttgtcttgtaaggttctacaggcgcggcagggccccggctgttcaccatccacctgatagaygcgaacacagacaaccttccgaaggcccatacctggtaagcaccgcggccaggaagtcacggcgtcctgggagccccagaggatgctgacgttcacgttttttttttgttgtttttttttgagatggagtctctgccaaaatatttttgtcatcatcagaactcaaaagccacagcacctgagacagaaggagaaattctagagttgaatgacaattctgaagccctcaagcaagagactttccccccgacattacgacactgtatagagcggctttactggccatgtaaaaaaatacctgtaagagggccaacattattgctaaacttaacatacatctttcttacagtatatataacctaaaatttaaatatagattttctcttgatttagttttttgtttttgagacagtcttgctttgtcactcaggatggagtgcagtggcacgatctcggctcactgcaacctctgcctcctgggttcaagcaattctcatgcctcagcctcctgagtagctgggactacaggygcacgccaccacacttggctaatttttgtatttttagtagagatggggttttgccatgttggccaggctagtctggaactcctggcctcaggtgatctgcccacctcggcctcccaaagtgctgagattacaggcgtgagccaccaagcccggcctcatgttattttttaaagctgttttccgatttgtaggactctgtttcatttatgccaattctcaatgactggcagtagtgcttgtgtcagatgggacaagtactttgcagcgtcccacacaaaggttgtcagagtctcttatgaaactaattttgttatgagccatgtaattaattaatattggtgtttcagtggagtgtggctaccactccagcaggctcaagtcttcctctctgccaggtcttatgtacacacacctgttggtaaggaaaattgtatagtttttagtttggatgtattgggcttcactttatctgacatttctgggtccccatcttcttggaatcctgcttatgacacacgtaccttgtctattgcaaatgttttcttcctaaattttaacttaaaaacgagtctccatagtagattatttcctgtatggtttacaaatacaatcacttgcgtacactttgtcctggaaccatccattgagacgagtagccacatttccttgggggaaccagttctagatgctgctgagatgccccgtgagatgatggaaggttcctgtcttggaacccaaggatgcggggtcagatgctagctgtgacaccctctgacatgtgatttggggcaagtgacttcatattctaacttggttttccacacctgtgaaatggggtaatgcagctggtcctggaccatggtgggtgccaaggtcctgctccaagcatggctgtggcgtccattacgggaacgcaccatgttggctgcacaccctactcacaaggcttttgtcctttagtagtttagtgcttggagttagatggatgtggaaagtatgctctgaagctccagaaaaaagagtgcccgccctggaacccagctctgtagagacagaaaccatccttaattgcttaccctagaaagccagaagtcactgtacatcctctgggtcacaattttgtattttttggtttgctacgatagcttcttaaaggatgtctttttctttgcacaaatactggaaatgagcttccccctggaaatatcgagtcagaagttgaatattcatttcatcttttaaggatctgtcatcttgttagttttgagatctattttgtttttgcagggaattttccagactgccctgttttggtctcagatcaagtcccagaggaacagacagacacgcagtacatcgttagtggtgacgttgcctgacagccagtctaggttacaggggctgccaaagaggcattcccagtacagagaaagaatttctcccaaagacagacaaacagaaaacaagtggagagctttgtcctgatagaagcagtaaatagtaacttggttatgttttggttgtgaaggcccaagacttactttactgtgtgttgattgggcacagtggctcccagcacgttgagagggcaaggcaggaggttcacttgaggccaggagtttgagagcagcctgggcaacctagcgagacmctgtctctaccaaaaagcaaaaacaaattacaaatctttgtattagaagcagaaaaacacaggggacatggagaactcatcaccaaccctgccccaccccccattcctctcccctcccacatatacttctcactgcctgtccttggccttgaggttggtcctagggctggactgcccacacggtgactctcttttgtcctttttcagctttaaccggatcgacattccaccatatgagtcctatgagaagctctacgagaagctgctgacagccgtggaggagacctgcgggtttgctgtggagtgaaaagcaaccaaaggcaacagagtctagctcatggccaccagaccaaaagcatccagcttctgtgcacctcctgcaaagctggcagaggccctggaattccagatcacctgaggggaaagggttgtctctctcctttctgttgggggagggggatgggggacttttgttggtggctcccacccatatatccctcctttaccatagtactcccacccacttccatcacccatccaataaaatgcagccaggtttagcctttggctttggtcacacaggatattctgctgtgttgcaacccatgtggtgataaggctcacagccctgagctctttacgggagcatcaactcacagttaggggactgggcgtggctgattgagggtttggaactggtggctatgccagctattccatctcaaaacagccttgaggccccttttcaatttgagcagctgctagatatcttatcagagctcagattccagatttcacatcccagcagccggttctgggtagcagatcaatttccaactggaaaataactatataatgtatgcttattggaattctgccacagcaggaagcttgagtcaaaatgtgtttcccctttgaaaggagaaggaattggagcagcttttcctggaggcccaggatatttcttttctgggtatcttggctgaaaattttgttttacatagagaaaaacgatcttttaagggtcccttttgctgcattatctgtccartttgacttttttttcagtgaaaacaccatgtcatggagtgtaggaaagagcagaccaaaatcagccctagagccaaccagtcagtcccaaagctgtgacctctgtgccactgttgtccatagaagagcatcgactgtgtcacttaaaatattagtaaaccatgatgcagcaactgctaagagctaaactaacaaaattgtgtcatcatagctgctggcttggtgtgaactcgcttaaaagcaatggtgaaaggataacctcgatgatgtaaatccacccaaagatactgttctacaaaaagtagggtgtggacgcaaacctgtgacagcagagggggacgacttcacactcactgcctcatgtggcccctttcccagtggcagctggtgacactaacgattgctactcggttcacttgcccagatgtcttcatatgatgagcaaggccagaagcaaggctagattcgaagtttctgacaccatttccagtttgcacaaaagtcagtattttatcttaaagtggcttgatttccaatagctgaacttgggcagaaaacagcaggccaatgttcctatgtggtttctttgttgttgtttttgtttggggtgggggcaagtacagggtaattcatgagcaagacatttcactgctgtcgaagtctctgggatcccgctgtgggtctgagatggcctgggaaggaccttgtggacaatggttttatctgttctttttgtcactgttaatttctgggctgctgaggttctagaatagaagggctgccaaatgaggtttgctgcaggaggaaagtttaatcccccattccaaaagtccaggccaaatggtgggcttagcctctttgaaaagttctgccttgcccccacaggtgggcacatcctgtgtctcattcaccatgatgcttcctgagrgtgttctagaagcccgttccccagtggctgtatccagcctttccttgcatcatcttcctcttgaaggkgaggaagtgaaaactacagacctcccccggacagcccactctctatcacgagcctaacccgcgggaggcggaagagacatccattcgagaactgaagcggcctccgggatgaggtcagaggccccacctgattttcctggtggtggtatccaaaatcttcagtaactaggaaggaaaccagggtctcatggtttaaaagactttgaagcaggaatgttgcatttgacgcctttaaaactacctttttgctgttgggaggagtcgggggcgagccttagcagctgcaccgccatccccatgctggttggtgctgccctgcctctcgtgccgggtgttgcttcagcccagagccagagggctgggtcccgggtcctccacaggtgaccccggtggacacacgcgttcccatcctggcctccgtctctgcttttccacttctacctgcgtgtgggtttgccgccttgtcatcrgttgtgtgagtgtcgcagacctttccagagctccggttcactctttccaaacaggcctccctgtcggtggcactgcactcctagaaccttcagtttctacgatggtttgtttggtccttttgaaccaccccaaagaactcaacatggcaaagcaaatggtaaaagcttcccgactgttctactttgggtccgcgcgaagcccactcacgtgtgatytgtgttgcccctctcggtggtcccaggcgatccagccatgccccctgcccctctgcccagatgcttcaggggcccggcttttcaggcttgccctcaccagcggccgtcagccgacactcagggatgtagctaacaccactccgccagtgctttcagtaggaagagctgaggctgcctgggaggcccggggcgaccggaaaagggctctctcaagttctgaaaagagaatctgccaccagatcgaatttcgacccctgagcttgttcggacgtatggtccaaattcagattaaggtggtcacccaacccgagatgtcaggaaaggccttctgcagagaaaatgtccccccacccgccatctgcagccaggtgtgtgccacacggcagccttcccgaaacatagtatggattttaaaaatgtgtttatttttgtttctcaaccactttataacgtattttttaatttattttgtaatgtcttgttttgaagtattgctgctatccttgttatccttcccactgtttktatcactgatttattttgtgaaagttgtacactaatgttctatgtcaaaatcaaaagtatttaatgaaatactagttctatttaatgtggttatggaaccagctggaaacacaaaacaaacagtgattgtacagcaggctgggcccaggaggtcaggttcattttgttacatatgcaataaactcacgactttacatttttggcgtctgttattttggtgtggaaatgagattctagtgtctttgcaaacccacaagaaaggaagtgtgtaggcagcaggaatactggcaagggccttccaaggaagaaggacagagataaggatagaattgtaagggaaactaatggcaatatggtagtgggctgaaagtgctctatcgggaaaaaacatgggattgagaaaatttagaatttctttgcgcaccggttatcttttcgttttttccttttttttttatttttttgagatggagttttgctcttgttgcccaggctggagtgcagtggcgcaatctcggctcactgcaacctccacctcccaggttcaagcaattctcctgcctcagcctcccgagtagctgggattacaggcttgcgccaccacgcccggctaattttgtatttttagtagagatggggtttctccatgttggtcaagctggtctcaaactcccaacctcaggtgatccgcccgcctcggcctcccaaagtgccgggattacaggcatgagctactgtgcccagcccttacttttttaaaaagttgtagtaaaaatactgtcagccctacataccagtgggttccacatatatggatccaactggggatcaaaaatatttttttggctgggtgcggtcaggagctggagaccagtcccagcttcttgggaggctgaggcatgagaattgcttgaacctgggaggtggagtttgcagtgagctgagatcacgctactgcactccagcctaggcaacacagcaagactgtctcaaaaaaaaaaaaaaaaaaaattttttttttaaatggatggttgcatcagaacatgaatagatttttttttcttttcattattccctaaaccatacagaataaaaactacttacatggcatttatattgtattagaaattataaacaatctagagatgatttaaagtatacaggaggatgactttttttttttttttaaaaaaaagagtctcactctgtcacccaggttagagtgcagtgacacaatcttggctcactgcaaccttcgcctcctgggttcaagcgattctcccgcctcagcctcccgagtagctgggactacaggaatgcgccaacatgcccggctaatttttgtattttcagtagagatgaggttttaccatgttgcccaggctggtctcaaactcctccacccacctccaccttccacagtgctgggattacaggcatgagccactgcacctggcattactgacatcttaacaaagttaagtcttccaatctatgaacatgggatgtcttttcaatttacttaagttttctttaacttctttatacaatattttgttttcggcagacaactggcaagtcttgcacctgcatggttagctttattcttttagatgctattataaacataattgctttcttaagctcttttgtggacattcattgctagtatatagaaacataactgcatttgtgtgtcaatcttgtaccctaaaactgcaaaaattcgtttcctggctctagtggctttcttgtgaattctttgcaattttctatctgtaggagatagctttaccttttccttccaacttggatgccttttattttttatctattagctctggcttatactttccagtacaatgttgaatagctgtggtaaaagtgggaatttttttcttgttcctgatctcagagggaatgtttataagtaaaatgcccttctgtatcagttgagatgtacatgtttttttccctgtgttctattaatgtgatgtgttacattgattgatttttcttatgttgggccacctttcccttcctgggataaattccacttggttgtggtgaataattcttttaatatggtcttggggccgggcgttgtggctcatgcctgtaaccccagcactttgggaggccgaggtgggtggatcacgaggtcaggagttcgagaccagcctggccaacacagtgaaaccttatctgtactaaaaatacaaaaattagcctggtatggtggcacacgactgtagtcccagctactcaggaggctaaggcaggagaatcgcttaaacctgggaggtggaggttgcagtgagccaagactgcggcactgtactccagcctgggtgacagatcaagactccgtctccaaaaaaaaaaaaatgctgttggattcaatttgctaatattttgttgaggatttttacatctatattcataacagatattggtctatagttttcttgtagtgtttttgtctggctttcaaaaatcaccgtaatgctagtctcatagaataagttaggaagcattctttccttttcaactatttggaagagtttgagaaagactggcattaattctgctttaaatgtttgctagaattcaccagtgaagccatctggtcttgagcttttctttgttgggacgttttagatttttgattcaatcttcttactagttatcagtctattcagattttgtttctttatgattcggtcttggtaggttgtagagttctaggaatccatttcatctaggttattcaatttgttggcatacagttgttcatgatactctacgatcctttatatttctgtaacattggtaataatgtcccctctttccttttagctgattcttccttcttaatcatctaaagttttgtcaatcttgttgatctttttgaagaaccaactcttagcttcactgatttttgtcatttgtcttttatttcctctgctatagtatttattttcttctgttagctttgggtttagtttgttctttttttcctaattccttcaggtataatgtaagttgttcatttttaaccttctttttaatataaagatttacagccataagtttccttggtcatggtgaataatccttcttagcactgctttcgctgcattccataagttttggtatgttgtgttttcatttgtctcaagatattttctaatttcccttgtgatttattctttgacccactggttgtttgaaagcatcttgtttcatttccacatatttatgaatttcccagtttccttctgttactgatttttagcttcattctgttgtggtcagagaaaatactttgtgtgacttcagtcttcttaaatttattgagacttgttttatgacctctctggagacagtctattctggagaatgaatgttccatgtgtatttgagaagaatgtgtactctgctgttgggtggagtgtttgtgtatgtctgttaggtccagttggtctacagtgttgttcaagtcctgtatttccttattgatcctctgtctagttgttctattaataatttattgaaagtggggtattgggctgcgcacagtggctcatgcctgtaatcccagcactttgggaggctgaggcaggcgttcacttgaggtcaggagtttgagaccagcgaaaccccgtctctaataaaaatacaaaaattagccaagtgtggtggcacatgcctgcaatcccagctaccctggaggctgaggcaggagaatcagttgaacctggaaggcagaggttgtagtgagccaagattgcaccactgcactccagcctgggtgacagagcaagactctatctcaaaaaaaaaaaaaaaaaaaaagtggggtactgaagctttctactattatagtggagctatttcacccttcgcctttgctgtgagcctctctgggtttatcctagctgaaatttgtcaagcttcttaaatttgtatgtccatttctttcttccaatttgagaaagttttgtccattattttttcaaataagctctgtcctcttcctttcttctctttctggaatttcctaaattggacctgtcctaaatcggacaccttgatgtgttccataaatcccttgagctctcttcattttttctctttgctcgtccagttcagtgatttcaaatgatcagttttctaaggtgtctgattctttcttttgcctgtttgagtctggtgttgaaccactgtattgaatacttcatttattgtatttttcagtgccagaatttggttcttttagataatttctatttttggttgatattctcattttgttcatacatcactatcctgatctcctttaggcctttgtcgtgttctcccatagatctctgggcatattcaagacaactgttttaaagtcttttctaacaagtctgatgcctttgtttcttcagggatggtttctagagatatattttgttcctttgaatgggacatgttttcctgtttctttgtattccttgtgatttttttttttttttttaaactgggcattcgcaaaagcagtcatctcttccagtctttgaagagtggtggggaaaagcttcactaattcagagggtatatcgtaatagttgctatcagcctgaggcgacagcttaaggtcatctcaggtcttttaggggcctctgtttttctttcgtttataccatatacatggctgcttttcaaagtcttaatttttagccaggcgcggtggctcacgcctgtaatcccagcactttgggaggccgaggcaggcagatcacgaggtcaggagatcgagaccatcctggctaacacagtgaaaccccgtctctactaaaaatacaaaaaattaactgggtgtggtggcgggcgcctgtagtcccagctactctggaggctgaggcaggagaatggcacgaacccgggaggtggagcttgcagtgagccaagatcgcgccactgcactcctgcctaggcaaaagagcgagactccgtctcaaaaaaaaaaaaaagtcttaatttttcaaagggtcttaacccagctgcttcttaggaataagatgttctcttatattttctgcccataatctcttgccccaggtatccactgtggtgcccctggcagattttacatgtcgtacctgccactgccttccatggctcttgccagcctgagatctgaactatgccaccttccctgtttcacctctgagtcagatgacatagaaaccagtccttcaggtagcccaaagacagggcagaacactgcaaatcagttctgctctgctccctccggtgcaagggaagacactggaaattgggctgcttcctcccaaacacccagttgtgccagggaggaatgggggaagggcaaataaaaatgacataaaaactattttcaatgtggctttttcttgattgggtgttcagctggttgctatagacctttggctggttcccagagctcctagtgagtgcctagttgtttttttttcccctcaatgtttccttggggaaatgtgggcctggagcttcctggtctgccatctccaatctctcttgattggagaattcaatccattttacatttaaagtacttactgataagaagggacttacttctgccatttaaacttttttttttttttggttcctcatttcctccattactgcctttcgtgtttagttcattttttatagtgacacggggattacacttgacatcctaacattacaacaacctaaatcgaatttatatcaacctaatttgaataacatacagaactctgctcctgtactgctgtctcccttactgttactgacatcacaaattacatctttatacgttgtgcacccaatattagcagttgttaatggatctgtctttttaatcatgtagaaaataaaaagagttacaaaccatcattagaatatactagattttataactgtccatgtatttacctttactggagatctctatttcttcttacaacttcaagttgtaagatgcttagtgttcttttaaagaagtttatagtgttcagcgtttcaacctgaaagactccttctagcatttcttgcaaagaatgataatgaactccctcagcttttatctgggaaggtattaatttcttcctcatttctaaaggacagttgttagatgtagaattctaacaggt

SEQ ID NO: 96068 - DNA, 28312 bp, Homo sapiens
atgctccagcagggcctctccaattcagcctcaccgtcgaggagaccaagcagccccctgacagcaagctgactgcactgaccccttcctccatggaaggaaaggtgatttgccttgacagtaagaggagacacatcgcaggcatgggtcttgtctctgcccacggggtgtcagccagagccactctctgaagcctacagactatgtgacttgtcagcacagagccccacataacatctcggaccacagtccagcaaagaaggcgggggagtgggcccatgacagcgatctctagtagtcacggcacatgccacctcgcccaggagctgccagccagccaggacacggagagccaattgaagctgccagctcagggatgactcctgcaaggaaggggtgttgtcctccacgatggggtggacacttaggcctgagtccccagcaggaaccaaaggatgaaacaaaaagggctacaggccccaccacacccagtgagccatgtggggagtctatgccgcccctccctgcagctctgggacccgaggcttagaaggcccccgcagcagaaaggcaagagtatatggcgggtgccacctggccccgccaggctaacccagggcaatgcagagcagtggcagggagagggggtgagggggaagaatggcaggggctgggggtgccatcacgcccagggcgcgggcaggagcgtgcagctgagccctgaacccatgacgacctggagctgagcagcaagagggtgaggggcgcccggatggcagtctaggaaagaactccccagtcccagccactgggtgtgggaagtcagccttcacctccgctgaggtgtgcgccgggattgccccagaggaatgttgcctgtgggggccacgcaccttccttcccaagacagaccacgcccctctaccagggcatgccccgcccatttccaggacaggccccaccccctctctgggcagaccacgcctcttcccagcgccgactctgccctgtcccaggatggacagcacttcatgagtgctcagtgcagggacacagaggcctggacatgttggtccaacctggaaggttcattccagctccagagctccctgtaagatccagcaaggctgtcctggagcctacccggcagcgtgcttctccctctgccctccctggcttcttcccctgtccctcctttcccttcccagtactggtcctgagagcatgctaaacttcctccccgctaatctgcatctcagagtctacttcctgaaaccaagagggagggcagcacatccccaccccaggcccaggaaacgcagaggtgcaggtggggagaagacgccttcccctcagcagggctggatcccctgactctttcctcacctcrgagctcttgattctyctccaggcagcgctggagggtctcaggagcgccctgttctgaaggcaggtgcagcatggctggcttccccagaggagactcttcgcccagtacgtcctgatctgctgccgggccaccactgggctgcaccatctcacacagttggctcttccagaggtgcctattcatccaacagggcaagggctgaaagagaaaggcagcaggggagtcacaggagacccacatccttacccagcagaaaaagcctatgagttctggggctacattttaaacagaatgctgataattcacctagtgtatcaggatgctaaagtgggttttcagtctaaggggtagcagatactcccattccaaagggaggtgctggaccacccatgtgggacttgaaaaggcctagctccaggctggaaatagaagaatttcaccagagatgggagagtcgggacaagactgtttgtggagggagatgtcagtatgctgggaatcctgatcccctacacacctccaagcaggagaagtggagggtaccggcccctcatccagtgtagtgggctgaatggtagccccccgaaaagatatgcccatgttctaacccctgaaacatatgtgattcgggaaaagggtctttgcagatgtaggatctcaagatgagatcattctgggtgacgtgggtgggccctaaatccaacaacgtgtctttatgagagacagaagagagaagccagagggagacgcaaggggaggaggccatgtcgggactgcctcggagactggagtgaggcagccacaagcccaggaataaatggggcagaagcttgggagaggcaagggaggattgccctcttagagcctttgagggtgtgtgcttgctaaccctttggttttggacttctagtctccagaactgtgagattaaaatgtctggccgggcgcagtggctcacacctgtaatcccagcactttgggaggccgaggcgggccaatcatgaggtcaggagatcgagaccagcctggctaacacggtgaaaccctgcctctactaaaaaaaaaaaaaaaaattgccggtcacggtggctcacgcctgtaatcccagcactttgggaggccgacacgggtggatcatgaggtcaggagattgagaccatcctggctaacacagtgaaaccctgtctctactaaaaatacaaaaaattagccaggcatggtagcgggcgcctgtagccccagctacccaggaggctgaggcaggagaatggcgtgaacccgggaggcaggagaatggcgtgaacccgggatcgcgccactgcactccagcctgggcaacagagcgagactccatctcaaaaaaaaaaaatacaaaaaattagcagagtgtggtgacacgcgcctgtagtcccagctactcgggaggccgaagcaagagaatcgcttgaacccaggaggcggacgttgcagtgagctgagattgtgccactgcactccacccttggctttcagaacagccccttctcctggtttcctccctatcttgctggctactcctgcccaggcactctcactgggttcccatccttcatgttgggctgccccagggctctgtcctaggacatcttcttctctgtaacttcattcactcccacaggaattctgtccagtctcatgccttgaactccaatcttgatgcttaattagacctcttttctaaactccacattcatttatcaaactcgacatttctacttggttatctagtagccttctcaaaacgaacctctctaagacctccgacagtccccaaaacccagatctacccaaggccttctttgttatcagctgatggcgaatccatcctccagctgtcaaaagtcttttttgattctctctctctctctcacacacacacacacacatacacacacacacacacacacacacaagagcacatctaatccatcaagaaatcctgttaaaatgtatcccccaaccgatctgatcacactgagcaattaacattaactattttaggtgtcataatgatattgtggttgtttttcagagtcctgtcttagagagaggcacacttaaatgtttaaagatgatgtctgaattcacctccaaataatgggaaaactcctaggtatataccggagagaaatgaaaacacatgtgtccacatgaatgcttgtagcagcattactcatagcagccagagagtggaaacaacccaaatgtccatcaactatgaataaacaaaatctagtacatccacatgctataacatgaacaaatcttgaaaatatgctgagaaataaacaagtcacaaaagattaaacattgtatgagtctatttatataagatgtctacaacaggcaaatccacagagacataaagtggattaaagattgctggggagtgccacttagggctgaggggaagataagctgagctaaagggtatggggtttctttgaggggtgacgaaaatgtcctgtgaatatacatacaacaaaccattgaattgtacactttaaatggatgaactgtgtgacatgctaatgatatctcaagctgttattgaaaataatagtggtggccaggcatggtggttcacacctgtaatcccagcactttgggaggtcatggcaagtggatcacttgaggtcaggaattcaagaccagcctggccaacatgacaaaaccctgtatttaccaaaaatacaaaaaaaaaaaaaatagctgggagtgatggtgcatgcctgtaatcccagctatttgggaagctgaggcaggagaatcgctcaaacctgggagatggaggttgcggtgagccaagatcgtgccactgcactccattctgggcgacagagtgagactgggtctcaaaaaaagaggccgggcgcggtggctcatgcctgtaatcccagcactttgggaggccgaggcgggcggatgacaaggtcaagagatcaagaccatcctggccaacatgatgaaaccccatctctactaaaaatacaaaaattagctgggcgtggtggtgcacaactgtagtcccagcggctgaggcagaagaatcgcttgaatccaggaggcggaagttgcagtgggtggagatcacaccactgcactccagcctggtgacagagcgagattctgtctcaaaaaaaaaaaaaaaagaaagaaagaaagaaaaagaaataaaataataatgggagaggattgcgagggatataaacaaaattagtcagaagttgataccttcaattgttgaagttggtagctgtgaatgtaagatttactatactggccgagcgcagtggctcacacctgtaatcccagcactttgggagtctgaggcaggcagatcacctgaggtcaggagttcaagaccagactggccaacatatagtgaaaccccgtctctactaaaaatacaaaaattagctgggcgtagtggcgcacgcctgcagtcccagctacctgggaagctgaggcaggagaatcgcttgaacccaggaggaggaggttagagtgagctgagatcatgccactgcactccagcctgggcgacagagcgagactccatctctcaaaaacaaacaaaccaaaaagatttactatactcatttttctactttcgtacatttttgaaatttccaataataaaatgctcaaagcactgtctctgagctggattactgcaattacctcttaccacgccacccttcttttacccttgcccactatggtctggtctccccaccactgctagaacgatcagtgtaagacgtaattccgatcacattcctcctctactgagaaccctaccatggatccccgttgccttctgcgtaaaagccaatctccctacaacggcctacaaggccctgtaccatcgggttccccatcccttcctctccaactgtgctcccctccctcactctgctccagctatagtgacctccgtgctattcctctaatgtgccaggagagcccattcattctcagatcacagaaacagtatgacgataggcagatgttgtcttgcaaaacgagcaaacaggcatatgaaatcagatacctagctgccaaactatatgtgaggcatttccgaagaatttaacgacctcgatagagcgcagtcaagtttggtgaacagaatatgtctctgaactagaggagtcctcacacaaggagtagggtcagaccccgcagtggaggaggagggaggagtagaaacagtccagctcgccgcccaagtaacctgggtcctgaatcggcccgccttggccagtgctccagaagcgcggagcaggaacgggctggggcccaaaaaagaggggggagcctgaacgtccgggggaagtttcggaggcggcggaacgcccacggatggaaccctgtctttggggaaaaggaccacacctgtcagcagagtccgtcagacgtgagaagggtgggagcggcggactgtgaacgctggtagggccccggcgctccgagaaagtcccagtttcgcggtcgcccttccctaccacgcttccggcttccggtgtcatagctgtgggatccggaagtaaaaacacaagccccgcccccgrgaactcgggaagccggcgagaagtgtgaggccgcggtagggccgcatcccgctccggagagaagtctgagtccgccaggctctgcaggcccgcggaagctcggtaatgataagcacgccggccactttgcagggcgtcaccgcctacacgccccctcgtctctcggacggcggcgtctagcctcggggcgctcggccgccccgccctctccgggggaggaatcaagaagagactgcccaatagggccggcttgacccgcgaacaggcgagggttcccgggggagtggcgcggcagaaggccccgcccaggagccgagggacagcccagaggaggcgtggccacgctgccggcggaagtggagccctccgcgagcgcgcgaggccgccggggcaggcggggaaaccggacagtaggggcggggcckggccggcgatkgggatkcgggagcactacgcggagctgcacccgtgcccgccggaattggggatgcagagcagcggcagcgggtatggcaggcagccggcgggccggcctccagcgcaggtgcccgagaggcaggggctggcctgggatgcgcgcgcacctgccctcgccccgccccgcccgcacgaggggtggtggccgaggccccgccccgcacgcctcgcctgaggcgggtccgctcagcccaggcgcccgcccccgcccccgccgattaaatgggccggcggggctcagcccccggaaacggtcgtacacttcggggctgcgagcgcggagggcgacgacgacgaagcgcaggtaaccggccgggcgggcgccgcgcaggcggaggagcgtactgtcccgcgctgcgccgcgcggcggtaaaatacacgctgtttgttgtgcttgagaaccgagcagaatcgagagggtcttaaccaatccctttataccccgcacctcctctcttgagcccctgagaccccgagagcgaaggggacttgccgaccggggtcacccagcttggcaaggggagggctggagctgaactccagcatctgcaccatctcccatgctccaggtcattgtggagttcccgctacagtcgggaatgagatggtcctgggcacgcagttccatgccccacaaggattttactcggttgtccagaattgatgctgtagtcggaatacaccaatgctttgagtaattttgtaatgtacaccctgaatgaaggctgcctaggagagagtggctggagcccagagccagcagtttctaacccatcaaccactccccaatgcccagccgttcacaaggagtgatttgggcaatcaggtgtcaccctggtgtgagaccccagaggaactctcaagaaaggggctaacttctcaatgctctcctgttcttctgccttgttaacgagcctttcttccaccagacagcgtcatggcagagcaggtggccctgagccggacccasktgtgcrggatcctgcgggaagagcttttccagggcgatgccttccatcagtcggatacacacatattcatcatcatgggtgcatcggtgagtatctcccaggccccaatcttaaaagccaggaagtgcctgctccatgcctcagcttttccaactaattgttgcagggccccacaggctctgctaagttgagctcctcctcccgctcctgctagtgcgccaggatcatcccggctctacctggtgtgcatatgcacttgcaagacttttttttttttttttttttggagacggagttttgctctggtcgcccaggatggggtgcagtggcgccatcttggctcactgcaacctcggcctcctgggttcaagcgattctcctgcctcagccccccaagtagctgagattacaggcatgcaccaccacacccggctaatttttgtattgttagtagagacggagtttcaccatgttgaccaggctggtctcaaactcctgacctcaagtgatccgcccgcctcggcctcccaaagtgctgggatgacaggcatgagccaccacgcccggctgcaggacgtttctgaaccctgtgcctagccgctgaatgtagcccttaatcctggagttgcaggctctttagggactgtctagatggacttcttggggaaaacagggaatgctattcattctgtagttttttcagacctgttcatgccttaacaaatgagttccaaaggcaggatctgaggcctgatctctgcctcttcactaacacttcaagttccgtcgatacaaacacttagcttttctttgaacactgtctctttgcctcaatttcgaaagcctaccaaggagctctgcctcaccccacctggccccaattgtccagcttgtagaaccgccattctgcactcataggaaagacaaaagaatagtatagcatgaggatttccatgggaggggagggaggggtggtcctaggacagccatcgcccgagactagagcaccctcccctgtgtcccatggggcagtgagactgtgcaggggctggtggaacaagggcttcatctcaaattacacgtggtctcagttttcacttttaaccctggatgcactcaagaatctctctgctcattactgtatgaccatctttgccattaacttaccttgtaaccttgagcaggagctctatcaaaactagttagttcttccacatcgtgcgcccctcagtgctggctgagctcagtggttctttgttcacatagaacaacgcgctgtcacactttgtcaaacctactccttgacacctttgtacttctgatcagaacttagaaaaggagagccaaaagggaatgaggaggcagccgagggagaagggctctgccagtggcagagtaaggaggggccattgtcctctgactccccataagcctgagacccaggagaggtaccaggtggagcccacagtagattgggcttggcctcagccccagccccagcctggtcccctcagaagagccatacctggccgggcacggtggctcacgcctgtattcccagcactttgggaggccgaggcaggtggatcgcctgaggtcaggagtttgacaccagcctggccaacatggcgaaacccagtctctacttaaaatacaaaaattggctgggcgcagtggctcacatctgtaatcccagcactttggggggccaaggtgggcagatcacaaggtcaagagatcgagaccatcctggccaacatggtgaaaccccatctctactaaaaatacaaaaattagctgggcgtggtggtgcgtgcctgtagtcccagctactcagtaggctgaggcagtagaatcgcttgaatcagggagtcagaggttgcagtgagctgagatcgcgccactgcactccagcctggcgacagagcgagactctgtctcaaaacaaaacaaaacaaaaaggccgggcgcagtggctcacgtctgtaatcccagcactttgggaggctgaagcgggtggatcatgaggtcaggagattgagaccatcctggctaacatggtgaaatcccgtctctactaaataaaaaattagccaggcctggtgtgggcacctgtagtccagctactcaggaggctgaggcaggagaaaggcgtgaactcgggaggcggagcttgcagtgagcagaaatcgcaacactgcattccagcctgggtgacagagtgagactccatctcaaaaaaaaaaaaaaaataacaaaaattagttaggtgtagtggcacccatctgtaatcccagctacttgggaggctgaggcaggaaaatcgcttgaacccaggaggtggaggttgcagtgagctgagatggcaccattgcactccatcctgggtgacggagtgagtgagactccatctcaaaaaaataaaaataaaaagagccatacctgcatcagccacaaaccttaacagccaggactctgaccgttaaacccttagtccaagaagcagactggaggagaaggtaactgaggttgctttctccatccccaccccatgctgtcacaaggcactgcaacagagcaacccaggccacaatgatagcttatgactcctggccttcagctcttattagacacctcattgagagcatccaagcttgctgtgtgagttggagcaagtgtcttccttttcctgaacctcagcatttcgtgtagcaaatgacagcttttgaaacgagggcccagggtccttaggyttttccaagctgattttgtcatttcactgcctccgcctgtggccagcttcgggttgggcaactttgttttgttgaaatcagtagggttcccctttgctctcctctgttctgagagtgacaacctgaggctttcaaagcagaaataggaagtgccagctccagcactgtgggtaggggacaaggggtcctctctctgaagagcctcgtggtttgttttttcctcttcctgctgkgggggagatgggaggtggcgtgctcaggcagcacctggaacagctccggctcccrggcttcttccacgcctgatgcctcactcggtgcgggaggtaggcagggtggcacttgagggcacgtgatcctagaatctgctgttccaggaaagcagcccattctccgttcattgagcagacagcgattgggtacttctgggccacagcagccagtccctgccctcctcatgggacctatgtgctattgcggccagggaaccacggcaagtaagcagaccagcaagagttcaggctgacgtgtgtttcagaagatacacatgggccctgtgtccccagtcccccaaagcgcatagatcccacaaagagggccgggagagcacaaacacagaaggaagagcaaatgcccggagccccgagttgggaacaagctcagcatgacctagaaactgaaagcaggcaagtggctggcagacccacagcctgggcaagcaggacaccctggggcaggctggacccacgtggccttcctctgtcccttcctcctccctggccagcttacctcacacttgcccacacacccagcttccttcctgggggccctgatggcacctcagagttaccaagtgggccacttcctgccttctcaggactcccacccctaccagaaagggagccgaggtacttactgcccccttccagaaagctctggccttgtagactagtgtgcgcctggaacagcatctttccccacctgatgggacctcgatgatgctggagagcttcacagggagtgaggggaagagactgggattgatagtctgcggggtcctcacttctctgggccttagtttccccacctggatcacaagggccatgggcttgatgggcgttcaggacgcatcccaatgatgggcctgtgggagggatgacccagcggcccccgcctcccctttcctcagaacatttctgggctgacttccccattggtctgataagattcttgctgtgtcatgatgatgttggcactcccccaaagccccggtgactcatgagcccccgggtatagcagggaggcccttttgttggtttttcagctgaactaactcagcagcccccaggttctctggccccagtggccaggaaccagctgggcccctgccaaggcccagggctccacccagggagtctgggcaggtccttaaccccagtgacccttggggatgggatggcccacccccgctggccctccagcaggcatcgtgctctaccatgaaaccctcatgccaagacaagggctgcagcgatttcggtttataaaacagacaggtcatggcccaggtccctttgccctggcctagccagatgttggtggctagagatcttcatcatgccctgcttctactaagtcaccttgtgtccttgggcagatccctcccctgctgtggtcctcaggaaagaggagggygtggggaagatgagaagctcccaactgcttttcactaaggaccccttgaattgcccccacccacatggcacgagtagactcttgaccaagctgtcaggtttcccgatgtcttcccatgtttgttcctccagaaagtcccactagagcatcgcagccagctgggagggcagggctacccctgagtcctgaggagagcagctcagtccggctcagctcagcttagctccctgtcaccatgggagagagcggcctgccttaccccacccctactgtccgtcttacctcacctcgcctctcaggtgacttggagcccagcagacggtcggtcggttgcagggcctgagctgaaacaaggtgagccggttcaatctctagttaatcccaaagggagcagcaggaacaaacggcctggagcgtggggttgctgtgactcagcagaccagtcccctgccaccagtacctttctggagtctgtcccgatgcctcccagtcttccggaatttggtcatgagcaaacatgacctgctttgagtgaggcttagaggtatttgcaggctgtggttctttccgtttatttcagggtccagttagttcccagtaagctgaccctttctgtgtggggccagccgtgagttgatgtgacatgggcaacgttcccctccccagccccactgatggcaggtgctgtgaggagctgagtagaggagctcctaccccagggcgaggggttgtctgctggactttgaagggtgcagcagtgagaggtccgtgtcgctgtagtcctggcaccgagctcacctgaggagcatcagaagtggagcagggcccctgaagagcgcaagcacacaaggcacccacaccatagcagttgccctcctggaagccctgtggtggcttcctaactgcctggctctgggtgagggcgtttgacctggtggcatggcccccattctgtaatggtttgtagaaatggacccatccatggttgcagtgcctgattgcttcgaagagcatgtgtttttttttttttttttttcgtgacatggagtcttgctgtcacccaggctggagtttggtggcgcaatcttggctcactgcaacctccgtctcctggattcaagtgattctcctgccttagcctcctgagtagctgggattccaggtgcctgccaccacatccagctaatttttgttttttcttttttttgagatggagtcttgctctttcaccaggctggagtacagtggcgcaatcttggctcactgcaatctccacctgcgaggttcaagcaattcccctgcctcagcctcccgagtagctgggactacaggcgcgcaccaccacatccagctaattttttgtattttagtagaaacggggtctcaccatgttggccaggatggtctcaatctcctgacctcgtgatccacccacctcaacctcccaaagtgctaggattacaggcatgagccaccgcgcctggcctgtatttttagtagagacggggtttcaccatgtttgccaggctggtctcgaactcctgacctcaggtgatccaccctcctcagcctcccaaagtgctggggttacaggcatgagccaccacgcccagactattagtttttaccatgttttattgaaatatatgtcatgggccggccacggtggctcacgcctgtaatgccagcactttgggaggccacggcaggtggatcacaaggtcaggagtttgaggccagcctggccaacatggcgaaaccccatctctagtaaaaatacaaaaattagccgggcgtggtggcaggtgcctggagtcccagctactcaggaggctgaggcaggagaatggcttgaacccaggaggtggagatttcagtgagccaagatcacgccactgcactccagcctggccgacagagtgagactccgtctcaaaaaaaaaaagaaatacatgtcatgaagaacacagatggtgcaggtctagcttgttgatgacttttcacaaactcagcacagccacagaaactgctcctagatcaagaaacagaatatgctctgcacccaggaagccccctcacctggggctctcacagtcactggccctcaaagggtcatttctgacccactccccaccctccgctccattgttggttttctcgccgtcttttgttggtgcgcaaatcttaactgtacaattggctgtacaccctcatcacaataaaggccatcgtcatctccccagaaagttcctgggtacccattcccagccaatctgccctgctccaggcaaccgctgatctgatttctgtcacaatgggttgcatctctgatgctgagatttcccagtgttgctgagtagtatccgttgtatgaatgcacagtttgccgggtcacatgttaattcaagtgtttgacttgtttccagtttggggccgctatgaaccaaggctgctgtgaccattcgtgtgcaggtctttgtgtggacttgcactttcatttctcttggggtggaacggccaggtcacaggataggtgtgtgtttcacttgatcagagggagcacccgcaccacctcacagctcaacttcagccattttcattttcttgccttactgcacttttcttgttcctgattgcttaaagggatgattaatatttcagcatttcctataagtgtgatatttgtagtatttgtaaggatgatggtttgggggtttttttgttctttgttttttggtggtggtttttttttttgagacgacgtctagctctgttgctcaggctacagtggtgtgatctcggctcactccagtctctscctcctggttcaagcgattctcctgcctcagtctcctgaatagctgggattacaggcatacaccaccatgttcagctaagttttgtatttttagtagaaatggggtttcaccatgttggtcaggctggtctcaaactcctgacctcaagcgattccccgcctcggcctcccaaagtgctgggattacaggcttgagccaccacgcccagccagaatggtgttttatagatgccctttatcaagttagtgaagttcccttgcattccccctctgctaagagttttagcgtgaataggtgatttctgaaacacttgatctacatctgttgggttgagcaagattgctagatttaaaaaatcaaaacatagcagtaggcagagagttcttagaggttttttttaatctcttaatatggtgaatttcaatgatttttttctgttaatatcaaaccaactttttatttacagatgtatttattctgtaaataaaaaacctaccgtttttaacattgcaggatttggtttgctgatgttttcttctttttttttaaagagacagggtcagtgggtcgtcgtggctcacgcctgtaatcccaacactttgggaggctgaggcgggcagatcacttgagcccaggagttcaagagcagcctggacaacatggggaaaccctgtctctacaaaaaatacaaaaaattagctgggtgtgttggcatgtacctgtagtcccagctactccagaggctgaggtgggaggattgcttgagcccagaggcagaggttgcagtgaactgagatcgtgccactgcactccagcctaggtgacagagtgagaccatgtctttaaaaaaaaaaaaaaaaaaaaacctcctgatttcaagcaatcttcctcccaccttggtctcccaaagtgctggggtgtgtgagttgtgcccggcctgctgatatttcgtgtgggatttctgcatctgcatgtgtgtgtgaatgaggcgtatgggttttcccatgtgcctttctcatcaggtttccgtaccaaggctctgtaggccccataaggtggcttgggaagtgttcccctttcttccttctgcaggaagagtttgcttcaggctggaattctcttgtgcttgcattttggtagaacccactggcaacactctctatgccagggggttgtttctgtaggaagatttgtggccactgtcccctctcaggtccattgctctgttttttgtttgtttgagacggagtttcgcttttgtagcccaggctggagtgcagtggcttgatcttggctcactgcaacctccgcctcccaggttcaagcgattctcctgcctcagcctcctgagtagctgggattacaggcatgggccaccatgcccagccaattttgtatttttagtagaaacggtttctccatgttggtcaggctggtcttgaactcccgaactcaggtaatccatccgcctcggccttccaaagtgctgggattataggcttgagccaccgcgtccagctgtttagttgtttttttgttttttgttttttgagacggagtttcactcttgtcgcccaggctggggtgcaatggtgcaatcttggctcactgcaacctccatctcccgggttcaagtgattctcctacctcagccttccgagtagctgggactacagacacccgccaccacgcctggctaattttttgtatttttggtagaggcggggtttcaccgtgtcagccaggatggtctcgatctcctgacctcttgatccgcctgcctcggcctctcaaagtgctgggattacaggagtaagccactgtgcccggcctatgcccttttaaaaaagcaaccatgccagggggttgtctgtttctattcgtctttttcaaacaccaatttcyagctttgttcatcttttctttgggttagcttttaattttattaattttacttgtcattatttcctattttcttcctggtaatttggcttgcagttctatctttttctcactttttttttggagatgaagtctcactcttgtcacccaggctggagtgcagtggcacgatctcggctcactgcaacctctgcctcccggattcaagtgattctcctgcctcagcctcctgagtaactgggattacaggtgcctgccaccacacctggctaatttttgtatttttaatagagatggggttttgccacattggctggtcttgaactcctgacttcaggtgatctgcctgcctcagcctcccaaagtgctgggattacaggtgtgagccaccgcatctggccctttttctcacttcttaagtggaatgcttagctycttatttttgaaccactcttttttgctaatgtaagcacttgaggtcacgtctcacaaatgtggctacatgrtacttctgtcgtcccttggttctactgaattgaattttcaggttttctcctggaacgcaggagatgcgtttatgtcttctgggtcagggatggagggctggcacaggcttgaatctcggggctcttctgtctgtrtatcaggcaagacagacatgcttgtggcccagtagtgatcctgagtagtgcccagatcaccaagggtggaggatgatgtatgtaggtcgtgtccccagccacttctaaccacacacctgttccctctgccacagggtgacctggccaagaagaagatctaccccaccatctggtaagtgtgtcccaccactgcccctgtgacctcccgccagggacaggcctggtcctgccctgcccgcactggttacagctgtgccctgccctcaggtggctgttcyggratggccttctgcccgaaaacaccttcatcrtgggcyrtgcccgttcccgccycacagtggctgacatccgcaaacagagtgagcccttcttcaaggtgggtggtgtcagggcctcccccagcctggttctgccctctctaccagcccccagcatggccagcttcggggacctccccccatcccatcccgggatgctctcctcctctcctgccccgccccgcctgctctcgtacttccttgagacccccattaccagcccccgtgaccaggacccacaggtcccctcctgctgtgctctgctgcgttttctccgccaatcatagttgggtgtcatgattttggagagagagctttctccagtgtatttctcccaggtcaaaatatcctgaaatctggcctctgtcctaaggcacaggggtcccagcctggggcagtgtctgtgctgcctgctttggcctccctccctctggatgtgcagagctgctaagatggggctgaacccagtgtgggacggggacactgacttctgagggcaccctccctggacctccagggaagaccctccactcccctggggcagaacacacacggactcaaagagaggggctgacatctgtctgtgtgtctgtctgtccgtgtctcccaggccaccccagaggagaagctcaagctggaggacttctttgcccgcaactsctatgwggctggccagtacratgatgcagcctcctaccagcgcctcaacagccacatgratgcccbccacctggkgtcacaggccamcygcctcttctacctggccttgcccccgaccgtctacgaggccgtcaccaagaacattcacragtcctgcatgagccagatgtaaggcttgccgttgccctcccttcccgcctgccaggctggcccaggcagtgctcccaccactctatgagcgtgtccggggccggggatctgggcagcatccatggtgccggggccatccccagcgggaccacaaggtggcagcgttgctccacgaaacaccgcctttccgctctgcttccccaaaggcccggccaggccgcagggtggcagccttgctctgcgaatgcagcatggcccgcgctgggtggtttcccaacccagccagaggctcttgtcctctggctggttttgaatgcgggggtagtaaagcaaaggtcctcttctcattttcaaaaccaatgaggaagccatggcttggatgcctcctccccctgctcccctacaggccttcaggccactcagacccaccggggacccagcatgaggcaggaggggaacgggcccccggcagcatgccagcaatgccaccctggcacccagggtgggaaggcttcccggaaggtgttgagccagagggtcatctgggaacacaaggcacgggaggtggccacgggggcgaggaggttctggcctctactcccctgggagggcgtctgaatgatgcagctstgatcctcactccccgaagaggggttcaagggggtaacgcagctccgggctcccagcagarrctggraccrcatcatcgtggagaagcccttcgggagggrcctgcagwgctctgwcyggctgtccaaccacatctyctccctgttccgtgaggaccagatctacyscatcgaccactacctgggcaaggagatggtgcagaacctcrtgstgctgaggtggggccaagcctgggccgggggaccagggtgggggtggtactcaggagcctcacctggcccactgcctccccgaggacgaattcctccagaactcagacaagggtgacccctcacatgtggcccctgcaccacagaggcccaaggtcagttcctccacyttgcccctccctgcagattkgccaacaggatcttcggccccatctggaaccgggacaacatcgcctrcgttatcctcaccttcarggagccctttggcactgagggtcgcgggggctatttcgatgaatttgggatcatcsggtgagagctcttcctctctcctgggaggctggcacagggtggcagagccagtcaccctgcagggctactcttccctatcttgggggagctcctcctcaccctgcagttcaaaacctaagtgtctgagctatcagaccgggctggaaagggctggacccctacacagccaagcacyccacggttttatgattcagtgatagcatcaccatgtccttccttgatttaaggggacctggaagacaagggggatcaggaagtgagtcttgcagcttgtcactaggaagccttgtttggggtccccatgcccttgaaccaggtgaacagggcggggagctaaggcgagctctggcctcttccgtccccagggacgtgatgcagaaccacctactgcagatgctgtgtctggtggccatgragaagcccgcctccaccaactcasatgamgtcyrtgatgagaaggtagggggtgcaccccagtccccaggagcatgccctgtcgcaggcccatctgtgacgaggcactgagctggggtgtgcatgcagagcaggtgtcctcaaccccggagaagtcaccacctctgagcacagcgtggcctcccggaggtgacctggactggcagtcatgaagcccaagttgtcatgtcccaggcctgacagtcactatgtgaccagggaaggccattgcctctctgggcctcagcttgttcatcagaatagactcgagatggaccagggtggtcctggagggtcctcagggaggggccctgagctgggcctctggcagggtgagcagagccaagcaggggcctcctcctgccctgagggctgcacatctgtggccacagtcatccctgcaccccaactcaacacccaaggagcccattctctcccttggctttctctcaggtcaagrtgttgaaatgcatctcagaggtgcaggccaacaatktgktcctgrgccastacgtggrgaaccccgatggagagggcraggccaccaaagrgyaccyggacgaccmcacggtgccccgcgggtccaccaccrmcrcttttgcagccgtcgtcctctatgtggagaatgagaggtggsatkgtaggtgatgccttcgaggcccagcaaggcagaactgggcatgccctgtgtgcgggcactggagctcccactgagacactcacgcactggtccacaccctgagagagctggtgctgaggctgccctttccgccacgtagkggtgyccttcatcctgcgctgcggcaaggccctgaacgagcgcaaggccgaggtgaggctgcarttccatgatgtggccggcgacrycytccaccagcagyksragyrcracgrgctggtgatcsrcstgcagcycaacrrggccgtgtacaccaagatgatraccamgaagccgkvcatgttcttcaaccccraggagtcggagctggacctgacctacggcaacagatamaaggtgccctacagagaaggagcagtgtggagggtgggcggcctgggcccgggggactccacatggtggcaggcagtggcatcagcaagacactctctccctcacagaacrkgaagctccctgacgcctaygagcgcctcatcctggacgtcttctgcgggrgccasatgcacttcgwgyrcaggtgaggcccagctgccggcccctgcatacctgtgggctatggggtggcctttgccctccctccctgtgtgccaccggcctcccaagccatacyatgtcccctcagcgacgagctccbtgagrcctggcgtattttcaccccactgctgcaccagattgagctggagaagcccaagcccatcccctatatttatggcaggtgaggaaagggtgggggctggggacagagcccagcgggcaggggcggggtgagggtggagctacctcatgcctctcctccacccgtcactctccagccgarkccycacggaggcagacgagctgatgaagagagtgggttkccagtatgagggcacctacaagtgggtgaacccccacaagctctgagccctgggcacccacctccacccccgccacggccaccctccttcccgccgcccgaccccgagtcgggaggactccgggaccattgacctcagctgcacattcctggccccgggctctggccaccctggcccgcccctcgctgctgctactacccgagcccagctacattcctcagctgccaagcactcgagaccatcctggcccctccagaccctgcctgagcccaggagctgagtcacctcctccactcactccagcccaacagaaggaaggaggagggcgcccattcgtctgtcccagagcttattggccactgggtctcactcctgagtggggccagggtgggagggagggacragggggaggaaargggcgagcacccacgtgagagaatctgcctgtggccttgcccgccagcctcagtgccacttgacattccttgtcaccagcaacatctcgagccccctrgatgtcccctgtcccaccaactctgcactccatggccaccccgtgccacccgtaggcagcctytytgctataagaaaagcagacgcagcagctgggacccctcccaacctcaatgccctgccattaaatccgcaaacagcccctcctgtccccttgtcatttgcttccctgaggacccacttccttgtcccactccccaagtcacccgggtgcttcctctgtggccactgaggagcctcctcacttctggttctgaccccatgtccagccatgaccatgtttggtgtcagagacacctcctgagtcctcctccgctccacgcatattgtcattgtgagaccagcttgaggtgcaaggatgtggggtcaccttccgctcttactgtccatgtccctgccccacccaagatgacttccagcaacactgccagtccacagaagtatttaggaaggagaggggatgggttttgtgactgatgtcagaggccaagggagaggggacagtccacagtgatgcacagccaggcccagccaccccttccaggcagaagggccacacactgggcagctctcaacataggctgattctcccagttctggaggccagagtccaagatccagcactcccgccagaggcccaaggggagggtccttcctgccctctccagctcctggggaaccaggcatcttgggctggtggtcacctcactccactcactctgcctgtcttctcgtggcctccccatggtgtgacttctatgtcctaactcagcgacatctgcagacctcctatttccaaataaggccacatcaggaactcccaggagacatgtatttgggggccgctgttcagcccctgcactgctccccacacagcccctgggtgtttcagtgcagcatgtgtcctgccagggagatggcgaaaccagacactatggtccctgcacttgtggcccgggttctaggaggtgaggccggcagggaacaaaataaccaggtggtgctgggatttgtcctttgcggagagcaaaccagtggcctggaaagtggccagggaggagtgttccacccgcagcacaggtgaggacgcgcaccctgggcgctgcaggtagcagggcccgatgtcgtagaacgaaggaggcctctggtgagacctgtggcaacagggacacatgctgcatcccggtgttcaattcttgctcttcctgtgccctgaatggggagtggcacctcttgagttttcagagggaggaagtatgccaagttcacctggaccctagatagggaaaggagcttgatgggggccaaggacaggtcacaggctcagtgggctctgtgtgcacaggattgggggccaggcttcggccacaggggcagtggttttagtcctcttgtcctggttcctgtggcctccagaaggggctgtggcaaggctgagagtcgggttgggctgggggctgatggggtgtggtaaggctaagcagggtaggttccagggcagggaacaacacccaagtaaggccaggcgcagtggctcaagcgtgtaatctcagcacttcaggaagccaagatgggcagatcacttgaggccagaagttcaagaccagcctgaccaacatgacgaaaacatgtccctaccaaaaaaaatacaaaaatttgccaggcgtggtggcgggcacctgtggtcccagctactcaggaggctgaggcaggacaatcgcttgaacccgggaggtggaagaccatccactggcacctgaacccatcaggcaactgtcccttcagctctgggcgcctacttgggtggaggcaggaggtcccaggtgaggacagcactgggtccacaatgggagagaatgagagatcaggtcagggcattccactgtcacctcagttgcgggtgtccacactgagacatggacataagcccgagaaaacaacacgagctgtaccctgaacaagaaggcagtcctccccagccccttggagctcacaggagcactgaggcccttgcctgtgagcccagatccaccctggcccattccatagggtgactcactcagcctccctgacccctgctgaccggttcaaggctggagccctgttttcaccccttctctgcctgcaatgccaaagaattcagccacaatttgcttttttttttttttttttttttttttttgaaactggatctcactctgttgcccaggttggagtgcagtgacgcaatcaccaactcactgcagcttccacctcccaggttcaagcatcctcctacctcagcctcctgagtagctgggtctacaggcgtgagccaccacgcttggcctgcaatgtactcttttttttttttttttttttttttttttttttttgagatggagttttgctctgtcgcccagtctggactacactggcgtgatctcggctcactgcaacctccacctcctgggttcaagtgattctcctgcctcagcctctcaagtagctgaggctacaggtgtacgccaccacgcctggctaatttttgtatttttagtagagacggggtttcatcatgttgggcaggttggtctcgaactcttaaccttaggtgatcccccagccttggcggcccaaagtgctgggattacaggcgtgagccactgcactcggccccgcaatttaccgggttttttgtttgtttttgtttttgttttttgagacagagtgtggctctggcactcaggctggagtgcagtggcacgatctctgctcgctgcaacctctacctcccaggttcaagcaattcttctgtctcagcatcctgagtagctggtattacaggcgcccgctaccatgcccagctaatttttatttttagtagagatggggtttccccatgctggccaggctgatcttgaactcccgtgatccgcccgcctcagcctcccaaagtgctgggattacaggcatgggccaccgcacctggccacaatttactctttttttttttctttttttcttttttttctttttttttttttgagacagactcttgctctttcgccaggctggcgtgcaggagtgcagtggcgtgatctcagttcactgcaacctccaccacctggggtcaagtgattctcctgcctcagcctcccaagtagctgggactacaggcacccgccagcacacacagctaatttttgtatttttagtagagatggggtttcaccatgttggtcaggatggtctctatctcttgaccccgtgatccacccgcctaggcttctcaaagtgctgggattacaggcatgggccaccgcacctggccacaatttactcttttttttttctttttttctttttctttttttttttttttgagacagactcttgctctttcgccaggctggcgtgcaggagtgcagtggcgcgatctcagttcactgcaacctccaccacctggggtcaagtgattctcctgcctcagcctcccaagtagctgggactacaggcacccgccagcacacacagctaatttttgtatttttagtagagatggggtttcaccatgttggtcaggatggtctctatctcttgaccccgtgatccacccgcctaggcttctcaaagtgctgggattacaggcaagagccaccgcacccagcccacaatttactgttaagtgcactctacctcgtgggtcttcagaggccctggattggtgtctcatctctcaaggtttcaccccacgcgggagtgggtaggagctggaaagagcccccctgccggacccctgacactcgcagtgtactcagagctttacctcccagcccagacctgcaaattattaagccggaagagaatttcaaacctagcctgatcccttcacactgagtcccaggtgccacagcagcacagacccaaatgccttagcttccttctctgctgccggtgtctgacatcacatcaatttgcgtccagcaaccactgaagccagcaatgtgagaagcccagagagtacttaaaactctctccagctcctctccctccctccatccgaacctggcccactgccgggtggctgagccagaaagggatgggagtggagaaggggtcttcaggctgagctgggcgggggcgactgttgcattgtctgctctgcgaagcagaaaaggagaggagggagaggcacaaatggggcggggctggcttcgggcctttattttctaggctcaccactgccctctccctgtgagaagcagtcggaagggattgtccttcctgtactgcaggaggagaagctgagaaactcagctgtgagacgtgatcagactagtccaggacgacacccagacatacaggccaaagctggggtccctgagaaggcctcttgcctcctagagcttcactgctcgcctccactagaacacttcgaggaagctttgagggaacaagaagcagactgaattctggctttctgtaaggacagtgagactctatggctggacacagtgtctcactcctgtaatcccagcactttgggcattttgcttgagcccaagagttccagaccagcagagcaacatgatgaaaccctgtttctacaataatacaaaaattagccgggcatgttggcacatgcctgtagtcctagctactcaggagactgaggtgggaggttcacttgggccatgatcacaccattgcactccagcctgggccacacagcaagaccctgtctcaaatatatatataaatatatatatatacacacacacacactcatacacacacacacacacacacatttgcaaggccaaattttcagagaaaactaggaccccatgatacaaattaacccccaagttgcctttgcccacccaggaacttttccttgacagccctataaagcgaagaggacagaaatcaaatcttgaggcccccaacttgctgccccatcatactgagaggaaacccagaattgcaactgagccagggtgcaaattcccagggttcaaattcccagggttcaaattcccagggttcaagttcccagggttcaaattcccagggttgaccatggaaccttaagcctttcacttggcttaaggggtcctggatgggcagttccccaatgcagatggttctgcctgtctgacagaacccagagcaaaccctctcaggagagactccttcctcctacaggtactttttaaagcatgagggcaagcacatcatcagagataaccgggcgcaccaggaaacaacattgcaagagaaacaatgagcaatagcgacagatcgtgaggtcttcaggcgctggaattgttagccagacataaaataaccgtacttaaccagatctaatgaaataataagtcgtggtgggacagctgggtgcagtggctcatgcctgtaatcccagcactttgggagggatcaagcagacagattgcttgagcccaggggttctaggccagcctgggcaacatggtgagaccccacgtctacaaaaaatacaaaaactagccaggtgtggtgacgagtgcctgtagtcccatctactcaggaagctgagatgggagggtcgcttgaggccaggaagtggaggttgcagtgagccaagatcaagccactgcactccagcctgggcgacatagtgagaccctgtctcaaaaaaggtaaaatgtgagctagtaagtttaaaagtagatggactggtttagtggcaaattacgcaacatcaaagagagaatgcgggaaccaaaaactggctcagaagaatgtattcagaatacaacccagaaagacaagttcagggaagacactaaagacagaggaagaagccgcaaggagaatgagaaggtgttccatacatttaactgatttcacagaaacagaagacagcaagtatggcagaagcaaaacttgaagatataatgatggctggctgggcatgatggtcgctggccaggcgtggtggctcacacctgtgatcccagcactttgggaggccgaggtggccggatcacctgaggtcaggagttccagaccagcctagacaacatggtgaaaccccgtctgtaataaaaatacaaatattagccaggcatggtggcgcttgcctgtaatcccagctgcgtgggaggctgaagcagaatcacttgaacccgggaggcagaggttgtagtgagcctagattgtgccactgcactccagcctgggcaaaagagcgagactccgacttaaaaaaaaaaaaatctttcaagtatgatggtgaagt

SEQ ID NO: 96069 - DNA, 46669 bp, Homo sapiens
  misc_feature (1)...(46669): n = A,T,C or G
tcttttttttttaaattgaaatggagtcacactctgttgcctaggcggagtgccgtggcacaatctcggctcacggccgacctctgctgcccgggttcaagcacttctcgtgcctcagcctcccgagtagctgggactacaggcgcgtgccatcacagctagctaattcttttgtatttttagtagagatggggtttcatcatgttggcaagactgttctcgaactctcaacatcaggtgacccacccacctcggcctcccaaagtgctgggattacaggcatgagccactacgaccggccacagcagcaacattttaagagataactccctaagaactttccagaactgaagaaagacacaaattcacaaattcaagaagcccaataaatcctaagcagggaagacagaaataggtccacacctagacacgagatttttttttttttttttttttttgaaacagtgtttcgctcttgtcgcccaggctggagtacagtggcgtgatctcggctcactgcaacctctgcctcccgggttcaagcgattctcctgcgtcagcctcccaagtagctggtactacaggcgcccgccaccatgcccagctaatttttgtatttttagtagagacagtgtttcaccatgttggccaggctggtctggaactcctgacctcaaatgatccgcccacctcggcctcccaaagtgctgggattacaagcatgagccaccgcccgcggccgacacaagatgttaaaagcagccagaggaaaaaaagctgattacctttaaaaccatgacttttagactgcaggctgccttctcaatagcatcaatgcaatccagaagatagttgactgatatcttcgatacactgagagaataactgtcagagagaaaaaaataggtcacattcaaagaatcagaagtcagaatggcttcagacttcagcaacagcatggggaactagaagacaatgaagtgctggccgggcacggtggctcacacctgtaatctcagcactctgggaagcccaggcaggcggatcacttgaagtcaagagtttgagaccaggctggccaacatgaggaaactctgtctctactaaaaatacaaaaattagccagcattgtggtgggcgcctgtaatcccagctactcgggaggctgaggcaagagaatcgcttgaacccaagaggttgcagtgagccgaggatcactcccctgtactccagcctgggcgacagagcaagactctgtcccaaaaaaaaaaaaaaaaaaaaaaaaaaaagacaatgaagtgctgctttcgaaattctgagggaaaaatgatttcccagcctaaaattctacaccccaactgtcaactgtggggttagactaaagacatttttagacatgaaggagttcagtacaccactgacaaatgtaagaattcaacaactgtttaaaaagcaagtcttgccagggcagtggtgtgcacctgtggtcccagctactcaggatgctgaggcaggaggattacttgtgcccagcaagtagaggctgcagtgacctgtgactgtgctactgccctccaacctgggtgacagagtgagaccttgtctcaaaaaaaaaagagcggggggggggggccgggccgggcgtggtggctcacagctgtaatcccagcactttgggaagccaaggcgggtggatcacttgaggtcaggagtttgagaccatcatggtcaacactgcgaaacactgtccctactaaaaatacaaaaattagccgggcatggtggcacacacctgtaatcccagctactggggaggctgaggcaggagaattgcttgagccggggagacggaggttgcagtgagccgagactgcgccactgcactccagcctgactgacaagagtgagattgtctcaaaaaaaaaaaaaaaagtaatcactagaaaagaagctacatatgtacataacatccaaataaccaagaggagaaaaaaatgggacttgattaatcaaaacaaaaacaaaaaagaaagaaagaaagggggagaaaaaaaaacaagggctgggtgtgctggctcatgcctgtaatcccagcactttggaagccaaggtgggtggatctcttgagctcaggaggtcaagaccagcctgggcaacatggcgaaaccccgtctctattaaaaaaaaaattaatacaacaattatcctggagtggtggtgcacacctgtagtcccagctacccaggacgctgagacgggaggatcgcttgatcccggggatgtcgaggctgccrtgatcgcaccactgccctccagccagggtggcagactgagaccccatctcaaaaaataaataaataaaagcaaacaagaaaaaaaaaggcttgaaacatatctgatagataaagggctaatcaacacaatatataaagaactgcaaatcagtaaactaagagcaaataacccaatataaagacattaaagggtagccacggacatctcagacgacgaaaaacaaaagacagtaaacgtataataaaacatgtaattgcaaggtgatccgggaatagtaagcgaaaagcaacaattaaatactattttctcatccaccagaacgccaaaaattaaaaagcctaacaatgtccagggctggcgagaatgtggcagaaggtgatgtcacataccctgcaagtgggaatctaaacagattcagggttttggtttttttttaatcgcaattaggtggcctgttaaattttttttcttgagacagagttttgctcttgttgcccaggctggagtgcaatggctcgatcttggctcaccgcaacctcgannnnnnnnnnnnnnnnnnnnnnnnnnnnnnnnnnnnnnnnnnnnnnnnnnnnnnnnnnnnnnnnnnnnnnnnnnnnnnnnnnnnnnnnnnnnnnnnnnnnnnnnnnnnnnnnnnnnnnnnnnnnnnnnnnnnnnnnnnnnnnnnnnnnnnnnnnnnnnnnnnnnnnnnnnnnnnnnnnnnnnnnnnnnnnnnnnnnnnnnnnnnnnnnnnnnnnnnnnnnnnnnnnnnnnnnnnnnnnnnnnnnnnnnnnnnnnnnnnnnnnnnnnnnnnnnnnnnnnnnnnnnnnnnnnnnnnnnnnnnnnnnnnnnnnnnnnnnnnnnnnnnnnnnnnnnnnnnnnnnnnnnnnnnnnnnnnnnnnnnnnnnnnnnnnnnnnnnnnnnnnnnnnnnnnnnnnnnnnnnnnnnnnnnnnnnnnnnnnnnnnnnnnnnnnnnnnnnnnnnnnnnnnnnnnnnnnnnnnnnnnnnnnnnnnnnnnnnnnnnnnnnnnnnnnnnnnnnnnnnnnnnnnnnnnnnnnnnnnnnnnnnnnnnnnnnnnnnnnnnnnnnnnnnnnnnnnnnnnnnnnnnnnnnnnnnnnnnnnnnnnnnnnnnnnnnnnnnnnnnnnnnnnnnnnnnnnnnnnnnnnnnnnnnnnnnnnnnnnnnnnnnnnnnnnnnnnnnnnnnnnnnnnnnnnnnnnnnnnnnnnnnnnnnnnnnnnnnnnnnnnnnnnnnnnnnnnnnnnnnnnnnnnnnnnnnnnnnnnnnnnnnnnnnnnnnnnnnnnnnnnnnnnnnnnnnnnnnnnnnnnnnnnnnnnnnnnnnnnnnnnnnnnnnnnnnnnnnnnnnnnnnnnnnnnnnnnnnnnnnnnnnnnnnnnnnnnnnnnnnnnnnnnnnnnnnnnnnnnnnnnnnnnnnnnnnnnnnnnnnnnnnnnnnnnnnnnnnnnnnnnnnnnnnnnnnnnnnnnnnnnnnnnnnnnnnnnnnnnnnnnnnnnnnnnnnnnnnnnnnnnnnnnnnnnnnnnnnnnnnnnnnnnnnnnnnnnnnnnnnnnnnnnnnnnnnnnnnnnnnnnnnnnnnnnnnnnnnnnnnnnnnnnnnnnnnnnnnnnnnnnnnnnnnnnnnnnnnnnnnnnnnnnnnnnnnnnnnnnnnnnnnnnnnnnnnnnnnnnnnnnnnnnnnnnnnnnnnnnnnnnnnnnnnnnnnnnnnnnnnnnnnnnnnnnnaaaaaaaggcttgaaacatatctgatagataaagggctaatcaacacaatatataaagaactgcaaatcagtaaactaagagcaaataacccaatataaagacattaaagggtagccacggacatctcagacgacgaaaaacaaaagacagtaaacgtataataaaacatgtaattgcaaggtgatccgggaatagtaagcgaaaagcaacaattaaatactattttctcatccaccagaacgccaaaaattaaaaagcctaacaatgtccagggctggcgagaatgtggcagaaggtgatgtcacataccctgcaagtgggaatctaaacagattcagggttttggtttttttttaatcgcaattaggtggcctgttaaattttttttcttgagacagagttttgctcttgttgcccaggctggagtgcaatggctcgatcttggctcaccgcaacctcgacctcccaggtacaagcgattctcctgtctcagcctcccaagtagctgggagtacaggtatgtgccactacacccagctaatttttttgtatttagtagaaacggggtgtctccatgttaggctggtcaggaactcctgacctcaggtgatccacccaccttggcctcccaaagtgctgggattacaggagcgtgtgccactgtgcccagccactttttttttttttttagacggagtcttgctctgtcgcccaggctggagtacagtggcgccatctcagctcactgcaacctcgcttcccggattcaagtgattctcctgcctcagattcccattagctgggattacaggtgcccaccaccgcctggcatggtggctcacacctgtaatcccaacactttgggaggccgaggtgggcagatcacctgaggtcaggagttcgagaccaacctggccaacatggtgaaaacccgtctctactaaaaatacaaaaaattagccaggtgtggtggcggatgcctgtaatcccagctattcaggaggctgaggcaggagaatcgcttgaagccaggaggcagaggttgcaacgagctaagttcgagccactgcactccagcttgggcgacagggcgagactccgtctcaaaaaaaaaaaaaatgtaaacacacattccctttaacccagcagaacatgggaacccaagggcattcagcctgtggcgcgaccaggcggcctgacttgagctcacgtagaaattcggcatttttgaaccaagagacagcacttgggatccggaatgtctggacttgggcacggcgctgtggagctggcgccgttgggagccatgcgagttctgggtcggtaggtcacctcagaggtggggagaaggttctctgagaccgacatgggggctagtgctggcaccaccggacatggggcatttcagacacagggcgagcacattccctagttaccagggttcattcgagtcagtcacgtcacaggctggcaatgggctaactcctcctcaacaatcacacggggcttgcctcatagaatgttttaaaaaaggaaaggaggctggcgcaggcgccaaccgtctcagaaccctgagcactgccccacccccaccctgcccgccatagcctgggctgttgtgggggaggggtgaccatttatcacgaaacaaaaaattgcgccacagcagctccctccctcccccacctttacggttgcagctgcacgtcccacgtgcagcaccaccccctgacacgtgcggcaccaccccctgacacgtgcggcaccaccccctgacacgtgcggcaccaccccctgacacgtgcggcaccaccccctgacacgtgcggcaccacacagctagtgccggaactttttgtgcagagaaagaagaccctgcacccgcgcggagggagcccttttgagattgcaggagagaagatgagaatgggactattttcaataactgtgcacatgcaagtcacaaacattccagatcccttgacttgcttgcggagggagcggcyggcggagggagcggcaggtggagggagtggcacgaggcatgcggagggagctgcaccgacatcacataaackcactgggcagctcrcaggcgccrttcgctcttcagacgccggagacgtaggagtgggtcttcagactccaaaggggttggactaatggcggatgctgaggcgagggytgagttcccggaggaggccagacctgacaggggcaccttgcaggtgttgcaagatatggccagccgcttgcgaatccattccatcagggccacatgctccacgagctccgggtaagttctcctcattgaagtctgggtcatgcagggccacgggcccggtggcttcaggcctggtggccatgaggccgtgtggtgaagggagagccttcagaggcacaatgggctgtgtcgtaatgccctgtcttgggctgttggggcccggtcgagcaccctagatggcagcgaggcactattcccgccaacccaagggtcggtcggttggttggtcagccgcgggttctggagcccgcccctcaatttacccacggccaaagttctggaggtcgccaagatctccagttgggagacaaaggatccagactggactgaggtggcgggagaatgtcactgggatcagattgggctagctgtggttttcattttagcggggagcagggcttccctggtaagcagttgtactggatccccgagggtgaatgagcgactctaacccaggatgtgaggataaaaagcaattaaaattccagcctgggcaacatggcgaaaccccgtctcttaccaaaaaataaaaataaaaaatgagtcgggcatgggggcgcacacctgcactcccagctattcgggaggcttgcttgtgctgttgggtttgctggtatgcagttgatggtttttgcatcagtttgagggatattggtctctagttgtattgtagtatttggttttggtatcaaagtgtaatgctggcttcataggatgtttcaaagtgttccatcttaaattttttggagtggctgggtgtagtggctgccacctgtaatcccaagcactttgggaggccgaggcagacggatcgtgtgagcctagaaactagttcgagatcagcctgggcaagatggcgaacctctgtacaaaatgttacaaaaattagctgggcgtggtggcacgtgcctgtagtcccagctacgcgggaggctgagaggctcaggttacagtgaactgagattgcgccaccgcactccagcctgggcaagagcgagaccgtgcctcaaagaaaaaaaagttaaacccagctgagggcggtggctcacgcctgcagtctcagtacgtggggcctgaggagggaggatcrcttgagcccaggagttcgcattcagcttggcaaacagtgagaccctgtctctaaaaaaataaagtaaaagaaaccgggaattgagtacgaattggaacaaaaatgagctgttgaatttgctagtatgcggttgatggtttttgcatcagtataagggatattggtctacaggttttttttgttttttttttctttttttgttttgagacgaagtatcactgtcgcccaggctggagtgcagtggcacgattttggctcactacaagctccgcctcctgggttcacgccattctcctgcctcagcctccggagtagctgggactgcaggcgcccgccaccacgcctggctaattttttctgttttttagtggagacggggtttccccgtgttagccaggatggtctcgatctcctgacctcgtgatccgcccgcctcggcctcccaaagtgctgggattacaggcgtgagccaccgcgcctggcctggtctatagttttgttgtagtatttgcttttggtatcaaaagtgtaatgctggcttcataggatgagtttcaaagtgttccaccttaaattttttggagaggtcgggcgtggtggctccaacctgtaatcccaggactttgagaggccaaagcaggcggatcgtgtgagcctagaaagttcgagatcagcctgggcaagatggcaatcccctgtgcagaatgttacaaaaattagctgggcgtggtggcacgtgcctgtagtcccagctacgcgggggacagagtttgcagtgaactaagattgtgccactacggcctggggaacagaggaagcgagaccttgtagagaaaaaaaaatttttttttgaggagtttgaagaagactgttgttaatttttctttaaatgtttggcagtaattacgaatgaggcttttatttattgggcgttttttttattactgctttagtctccttactagttagttgtaggtctattcagattttcttgtcctgattaagttttgtgaggctttctgtttctaggaatttatccatttcttgtaggttagtccatttgttggcatgcagttattcatagtacactgtcactctttttatttctgtagaagcggtattaatgactccactttaacttgattgtactttttttttttaagcagggtcttgctctttcacccaggctggagtgcagtggtgcaatcatagttcactgcagcctcgaactctcgtgggctcaagcgactctccttcctctcagcctcttgagtagctggaactacaggtgcacaccaccatgccctgcccatctattaatagctagttttgttgaccttttataaagaaccagctttggctaggggaggtggctcacgcctgtaacctcagcactttaggaggccgaggcagctggatcacttgagctcaagagttcaggacaagcctgggcaacatggggaaaccccgtctctgccaaaaatacaacaattagctagacatggcgagcacctgtagtctcagctactcggaaggctgaggcggaaggattgcttgaggctgcagtgagccatgtttgtgccctacactccagcctgggtgacaaactgagaccctgtctcaaaaagaaaaaaaaattggtttcattaaattttttctattttcttagtctctgttttatttgtgctttgatcttttttatttcctttctcctgctagctttgggtttagtccttacgttgtaaagttaggttgttgatttgaagggttatttatttattattattttttgagacagagtcttgctgtgtcgcccaggctagagatggggtttctccttgttggccaggttggtttcagacccctggcctcaagtgatctgcccgcttcggctcccaaagtgctgggattacaagtgtgagccaccgcacccggccagatgtgaggggttttaaaaaatgtgtttacagctagaaatgtcccacttggcactgcttttgctacatcacataggttttggtattttgtacttctgttttcatttgtctctaagggatttttcattttctttttctttcttttttttttttttttttttttgagacggagttttgcttttgttgcccaggctggagtgcagtggcacaatctaggcttaccacaacctctgcctcccaggttcaagcaattctcctgcctcggcctcccaagtagctgggattacacgcatgcacctccacgcccagctaattttgtgtttttagtagagacggtgtttctccatgttggtcaggctggtctcaaactcccgacctcaggtgatccgcccacctcggcttcccaaagtgctgggattacaggcatgagccaccgcacccagcctctcattttctttttttaattttaatagtgttaggggtataagttgtttttgcttatgtgaataaattctatattggtgaattctgagattttagtgtacccatcacccaagcagtgtacattgtccccaatatgtagtcttttatccctcacctccttcctaccttcccccttcattctcctccccaaagtccgttatatcactccaaaacttagctccacttacaagtgaaaacatacagtatttggttttctattcctgagttacttcgcttaaaataatgacctccagctccacccaagttgctgcaaaatacattgttttttatggctgagcagtattccatgttgtatatacaccaccttctttatccactcattggttgatggacacttaggttggttccttatctttgcaattgtgaattgtgctgcctataaacatgtgtgtgcatgtacctttttcatataatgactttttttcctttgggtagatagccagtagtggaatttctggattgaatggtagatagatggtaatctactacttttagtatttttttttttttttttttgtcttgagacggagtcttgctctgtcgcccaggctggagggcagtggcgcaatgttggctcactgcaacctctgctgtccgggttcaagcrattctcgtgccttagcctcccgagtagctgggactacaggcacacgccaccactgccagctaatttttgtatttttagtagagacggggtttcaccatgttggccaggctgatctcggtctcttgacctggtgatcgcctgccttggcctcccaaagtgctgggattacaggcgtgagccaccgtgcccagcccgatggtgtattttgatgggaattgcattgaatctgtagattgctttgggcagtatggccattttcacaatattgattcttcctatccatgagcatgagatatctttgtttgtgtcatctgtgatgtctttcagtagtgttttgtagtttttcttgtagctgtctttcacctccttggttaagtatattcctagggtgggttttatttgttgtttttgctgtttacagctgttgtaaaagggattgagttcttgattctcaagcttggtcgttgttggtgtagtgctactgatttgtgtgcatttattttgtaacctgagactactgaatttgttcatcagatctaagagtcttttggatgagtctttaggattttgtttgtttgtgtttgtttgtttgcttgtttttgatggagtttctgtcacccaggctggagtgcagtggcatgatctcggctcgctgcaacctccacctcccgggttcaagcgattctcctgccttacccgagtagctgggactacaggtgtgtgccaccgcacccggcaaatttttgtatttttggtagagacaaagtttcaccagaccatggccaggctggtcttgaactcctaacctcaggtgatctgcccatctcggcctcccaaagtgctggaattacagatgtgagccaaccgcgcctggcctagggttttctagctgtatgatcgtatcatcagtgttacagcactagtttgacttcctcttctccaatttggatgccctttatttatttcgccattggcttttggttgtgtaagagtgtgttgcttaattttcacaaatttgtgaattttccagttttccatctattattgatttctaacctcatcccattgtggttagagaaaatacttagtgcaatatgtttttttaaatcttgttggccaggcgcggtggctcatgcctgtaatcccagcactttgggaggctgaggtggggtggatcacctgaggtcaggagtttgagaccagcttggccaacatggtgaaaccctgtctctactaaaaatgcaaaaattagccgggcgtggtggtgcacctctgtaatcccagatacttgggaggccgaggcaggaaaatcacttgaacccggaaggtggaggttgcagtgagccgagagagtgccactgtactccagcctgggcaacagagtgagactgtgtctcaaaaaataaataaataaatcttgytccagagcctgggctagatagtaagaggacagtgtggatgcagttaagaaccatatatgtctgaattttttgtacatgttcattttgttcccttcaccttcaaaattagtaacagatggctgcattttctcaagggatctgtgtggcttttaaatctaaatcatccacttacaggacatttgcaaagcaagaggttttagtccccattttctttctttttttttttttttttagtagagacggggtttctccatgttggtcaggctggtttcgaactcccgacctcaggtgatccgcccacctcggcctcccaagatgctgggattacaggcatgagccactgtgcccggcctaagtccccattttcttttttcttttttttttttaaatgagacaattatttattttaggcagatagtcaacttaaaaatcattcagcgtgggcactcctgaaactgtcaggatcatgttggtttcctcgctgtttgccggctattggcatttgtgtcatcacacacagtccgatgaggtgacaacagaaaagcatatctcacttctatcgtaggtttccattcactttcgggttctcaatcgccctgtgtttcctcagtgatactccagactttccagatgttctggttgacccattcctctttcttttttttttgcaaaacaaagcaaaaagcaagaagagaactttacattttgtccaatagtcctaagaaattttccctgtagagaatgtcatctaagtcaaaacaagggttgaataggggcacccaaatcagttatcacttagggctgttataagaaatgccaagactgggtggcttaaacagcagatattcgtctctcactgtctggaggctacaaatccaagatcaaggtgctagcatggtcagttctggcgaggacctgctactgggctcaagagcactaccttcccccccgtatcctcacatggtcggtctccagcctcttctcataaaggcgctgatcccattcatgagggctccactctcacagcgtaatcacctcccaaaggccctgcctccaaatactgtcacactggcattaggatttcagcataggaattctggggggacacattcagtccatggcctcccgtacctgtgaatgtgatcttatttggaaatagggttttgtaggtgaaattaagttaaggatcttgagataagatcatcctggacttagggtggaccctaaatccagtgactagtgtccttataagagaaagaaaagagagattggagacacacagacaccgtggagaaacgcaggagaaaaggtcctgtgaaggcagagaggcagggacgggagtgacccagctgcaagacgaagaacacctagggccagcagtagctggagaggcaggggcgagggcgatcctcccctaggacctagggagagagcgtggccctgctgccacctggattctggatttctgttttgagccatcacgtttgtggcaactcaccctggcaggcttaggaaacgaatgcgttaacccattgcattagcgcacaaaataacaccctgactcgtttcctgcgccagcctcctaccttgccttctacttattagaccctacctctcattccccattttttaaaatttttatttatttatttatttatttatttatttattttgaggcagggtttcactctgttgctcagcctagaggtgcagtggcgtgatcatggctcactacagccttgacctcctgggcttaagcaaccctcccacctcagcctcccaagtagcttgaactgcaggtgcatgccaccctgcccagctaatttttttttttttttttttttttttttttttttggaaagacgaggtttcaccatgttgcccatgctggtctcaaactcctgggctcaagcaatcctcctgcatcatcctccagaagagccgggattacaggtgtgagcccccacgcctggcctttccctcctttttatcattccctcttccctcgtcttccttggctttcctcctcacacctcctgcgtttggcccccttccattttcttttctgcttctctttcccaacttccccctcatcatgccagggggactcctgggctgcgtgccacccccctggaagtcccccataatgaagcaggatttatgcctcacacttcaccatgggagagcagaaacctctcacttgaagcaaaaggcactgaaaataagcaaatagttatgcatttgtcactaccgagtcctagctggcttccaccctaccccccgccccccaccatcttcttgctcattcaggtcatcgtgttctctgatacccagtaacttccatcattttctacatgcatttctgttggtcttctgagaattgtgattttccaaagtagaaagggcacatcgtctttttggagcctcaaaggtgcagacactgatgcgttgggggagatcacagtgtgacaaggatggggtgggagtgtgtcacccccctttctaccgaccctcagcagtggggagagagcagaggagatggaacctgagaggaagaagagatttccaattacttccttctcggtcccttctccactgaagcctgttactcctctgctgccggggcctcttgagttttctctcactgagccaggaaagagcttagtgaataaagaacaaggtatcccagcaatgcagggaagatgtccaggacagtgagtgtgaacgaggggtcctggagaatgtgcacgccagccctgcaggagaatgtccacgccagccctgcagcctggtgggctctgccatcagcaccccaaaaccattcatcagtcaccttcgacaattgcacgtgcaaaagccctctttttgtgtcctttgaagctttttttttatcaggctgggtgcgtggctcatgcctgtaatcccagcaccttgggaggccgaggcgggagaatcacttgagcccaggaggtcgaggctgcaatgagctatgatcatgccactgcactccagcctgggtgacagagtgagggcccatcccttcgcgggtccccattaagaaaatgggggagggacagtccccattttcttaatggggactttcttagtgaaatttgaaatgagagattattaatatgagctgggcctaacatctttttttacttgcagttggggcagagctccagggagttggttttgtcccctgctgtcttgtcccctccccctttttaattaattagggcctggctggactcacatgcaggccgctttctaagagcagcagttactttggcagcattcagaaagggcctcagttactctaccatgacaaatttctyagtctgtcaccgttcacttcctaaaagaaattcattgtasaaggtagaatgggatcttcatggcatttctgattcacaatgctcctgaaagttcctcggcatgtggaaaggccacagatgaatttaagcatgtgaaagaatactcatgtcagaggcacaaaggaaacttgccccgagtccacggtgctctgcggttaggagctggcctcactgtgcacagggggaggggtggtgagcttaccgggctttaaagcgcccttccaacctgtgagccctgcattccttacccttggttggattcttcccgggctgggagaaatgacsgcttctatgaggagaccatgtgccgaggtygtgtgctaggaagccagttgctgtgagaaatgaccagtgtcatgtctgtctttcagccaccctacatcatgtagcagttcttctgagatcatgtctgtgctgttcttctacatcatgaggtacaagcagtcagatccagagaatccggacaacgaccgatttgtcctcgcaaaggtatgccggtggggagcccagggctgctgtggcgcctgctggttaagcccagtttgaacagccacygtgtgggaacaaggcctgaaatgggcctcgtttattattttggttcttctttctttgcatcttaaagctcgagtgttctagtgagggccacttggagccctgtgatggcatggtaggaagggtggcttgggagagctgactgtccttcctttcctttggtcacaccctgcctcgccccacttagcacgaacgcttcccccatggcagggttatgctgctcccaccctctgtgctgcctgaggagaggcaggcagcctcagtgaatcccactcactgagcctgggggaacttgagtgtaaccgggagggacatcccacccctgtcagttagcttcctcttctatgtttctgcacatctgacctgaaactgatgggcacttctcatgagattgggcaaaataccagccacttcatgaagtatcatgggtgataggaaagaaaaagaaccttaaaaacaaggtcagtttgagaatgtgtggctggtttgatgccatctcaaagtacactgtgtcccgaagcaaattaaaacctggctaggggccgggtgcagtggctcacgcctgtactcccagcactttgggagactgaggtgggtggatcactggaggccaggagtccgagaccagcctggtcaacatagcaaaactccgtctccacttaaaaaaaaaaaaaattagctaggcatggtagcacatgcctctaatcccagcttttcgggaggctgaggcacaagaattgtttgaagctgggaggcagaggttacagtgagccgagatcgtgccactgcactccagcctgggcgatagagcaagactccatctcaaaagaaaaatctggctgggtagagtactgtgtccaaatagaaatgccagattagcacagtgggaagtgaagacaaaaactgggcatagctgaagtaagtgcctaaaggtcataattgtgacccttgtcttggtgtctgaaccataacatcaaatggtttggcaaaaaataaatagaatttacatgtgtacgcgcatgtgtggagagagggatgaagtaaatgccttccattgctttcagttggttattggaggtaagcagtatacaggaaggaaatcattgtgctaggctttaaacatgtctataaacttgaactttttttacatctttttttgttctttttttggggaggtagagtctcgctcttgcccaggcttgagtgcagtggctcggtctcagctcaatgcacccctgacctcctggcctcaagcgatcttcccatttcagcctcttgagtagatggcattacaggcatgtgccacyacgaccggctaatttttgtattttttgtagagacatggtctcactatgttgcccaggctggcctcaaactcctgggcccaagcgcccacctctgcctcccaaagtgctgggattacaggcaacaagccaccgcttccagccctctttacaatgaaaattgaaaaaaaaatagatatataaacgcaatatgggtgtttagatttctggtttaaaataaggaaaggctgggtacagtggctcacaccagtgctttgggggctccagcaggaggatctcttgagaccagcctgggcaacatagcaagaccccagtgtctacaaaaaatacgaaaattagctgggcgtggtggtgcgtgcctgcagctactcaggaggctaaggtgggaggatcacttgagccttgggagatagagcaagaccctgtctcaaaaaaaaagaaaaatctagactgtcatataacagctgctatcagagccattggccttaggggatgaagaggctttctatcgggcagcagcacaccaggccctgttcggctgccagaatttgtgtgttcatcagatttagctggctgatgaaattggaacaaaagagaaaacacatgaagcatagtccattgtggtttgcctgggaacggggtaaacagctatactccaggcagagcagatctttattctagcctttcacctccctgaatcgtctgccccgcagcataagggttcttgagaaagacagcacccatgtgggagcacttctgccataacgggcatcatactgatgcctcaccattttctcaatctatcctcactttatccttgacctcctgtcacctaagggggctctggtctccattgcacccataaagtctttgagatgggcccactggcctcacacttcacagccagagggaagcagagttggtctgactgctgagcccaggctcggtccattatgttataggacttccaagggcrtgcaaggcgactgggagccagagcttgttacgtgagtgtggtgggtgccatagggagggagatgtggctagaggcatagtcaaaagagacttgagttgagtggggcagttctgctgggctggaaatgcagaaccaaaagggagtctctggggggcacaaagcatgcagagaattccggggaaggtcaagagcaaccagagagtagcagagggtaggaagcaagaagcaggagatcagagaatcgtaaataccatccatccatctacagtagtgatgacctcgctcatctctgctcgaatggcgctgacgtttgagcagaggagggtgacaggcaggaaacaaacttttaagtcaatagatggagtgtcaggtggggccaagcatctggaatcaagtaaaagtggaggaggtaggaggcactggttgaaaaagagtggtccagaaagacctcagtgctgacgcttgagcagggatttggaagaggcaggagagtgagctgtgcccacatccacgcacaagcactccggtagtgggtgccatgagtgctaaggccctgaggcaggtgtatgcccactgtgttcaaggagcagcaaggaggccagggtgccagagcagtggaagggagaaatggaggtgatgggggctggggtgggcagacaggtgcaaacagttgagctctacttggtgggaggtcggaagaccttagaaagttgagcgatgtgatcagtcaacttcagttttaacaggctcccccttgtggctagattgagaatggctgtgggggaggctgggaggccactgcagtgacagaggcaagggatgtttaagaccaggtcgaaatggtggctgcagaagctgttgggtaaattcagtatgcttgcaagttgggcctctccagtcagtgcagcagctctttggcatgaccttgtggcccacagagggccacattttctgcttgggatagtgatgaccctgtgcctgcaaacaggatgttgggggtggggtagatgctagtagaaagggattcatttctagcgtgggcacttctagatgagcacgtgtaagatctcagttgacctgagttttataaaccagggaaccagagtattctctttctggtttctgttttaagaatccatatcctccataggattgaacatgtgatttgtgcatgaccgggaagggccatgggaaaatgtcaagaatcatactttacgttttctgctttgtacttgggctccccgtctctattcccaaagctccagccacccttgccatactgtatggattacctatgactccctgggcagggacagtggatgtcttcgtcaccttagtcacctgagtttccagcccaggctgagccctgggcttgacccattttccacttgtaacgttgatyggaagcttggggtgcatatgggtgtggggaagaggaattcacccagcagggcgggaggggctgttcggatgggacgctgctrcagagctgacaggagcagcctgcactcagtgcgtgagtccacctgataccatgtcctgcagctgcgtctgggctcactgggtcccttctcttacagagactgtcgtttgtggatgtggcaacaggatggctcggacaaggactgggagttgcatgtggaatggcatatactggcaagtacttcgacagggccaggtgaggttcttccccagaagccatttaactgccctacatctacatccccttcctagagtctcggggggcagccacctatctccgtgatgtggagagccctgaagggccagtccccatcacatcccgtggtgacccctctggaaggccttccctgtgccttttccccacctcgggcggctgccccactttctctcccacaggtctgttgaaaggtttcagctgctgttgcctttccattcttatcctagggttgatagcttttttaaaacttccagcactttagtggggtctgggatgtgtggtttgtttttgagactgagtctcactctgtggccaggctggagtgcagtggcatgatctcggctcactgcaacctctgcctcccagtttcaagtgattctcctgcctcagcctcctgagtagctgggattacaggcatgcaccaccatgcccagctaatttttgtatttttggtagagatggggtttcgccatgttggccaggctggtttcaaactcctgacctcaggtgatccacctgccttggcctcccaaagtgctgggattacagatgtgagccactgtgcctggccagatgtgttttcttgatgcgaacactcacgtcgttggttgtggaggaatttacttcacagcagaacacgtttccaaggtggggtgttttgattgttgtgattattgtaaataagttgtaagaacagaactagcaggtggcggcgggaggcggtggctcacgcctgtaatcccagcactttgggaggccgaggtgggcggatcgcctgaggtcaggagttcgagaccagcctggccaacatggcgaaaccgcctctctactaaaaaatacaaaaactagctgggcatggtggcgtgggcctgtaggcaggagaattgcttgaacccgggaggtggaggttgcagtgagccaagatcacgccactgcactccagcctgggtgatggaaactctgcctcaaacaaacaaacaaaaaaattagaaggtggcaatgctttaaaagggaacttaccagaaaaatgaatgtgtaaatgtttggggaacttaaggatgctgctttcttccccttcccctctggcyctgtttgcttattgataaggaaatgtggcagaagaacctaaaagttgctttacagctagaacagaaaactagccagaggtaaagcctgcttgtgagcccccaggcttttcaagctcggctttcttagctgctgggctggggcagagttgatgagggagattgtgggaagcgaatggtctggagcagcagctccagttgcgtccgtttctcctcctgaaatgcatttgtttggttggcccagatgatccccsacagggtcctaaacctctcttgtcttgctccagctaccgggtgttctgcctcatgagtgatggcgagtcctcagaaggctctgtctgggaggcaatggcctttgcttcctactacagtctggacaatcttgtggcaatctttgatgtgaaccgcctgggacacagtggtgcattgcccgccgagcactgcataaacatctatcagaggcgctgcgaagcctttgggtaactgtattctcttgtrcttgatttccattctgtcctgcccccttcatctcttgtaacccagcctgctcctctgttggcaggtggaacacttatgtggtggacggccgggacgtggaggcactgtgccaggtattctggcaggcttctcaggtgaagcacaagcccactgctgtggtggccaagaccttcaagggccggggcaccccaagtaagcaagcactttcctcctgctcctggttgttaaaagcatctgtccgctcagcagcagaggcgggagaggcttagaggggcctaggcagatgactcatttagtgaatagcagttctgcctggagtatatgttggaggctcctgctctcttattttcactagctagtgtctgcttaggataggagatatcaaaagccctagcaggtgaacagtgatgtgctgcctgcacaagggagtggctaggagtacagcccatcggaggactgacagggaacaatctctacggttagtagaatcagaaagcgtgctgtgtgtatgagcaggtgcaagaaataagagtgcatacctacacacgtgcctaggcccacactcttctggaagaaccctgggaattggggaagacgggagcttggaatcaccaactatcacatttcaaggctgacagctgaaattgtttatctcaggtttaactcatcacaaagagtgcggctcctggatttttttaaaagactatagacattttagaataaaactgttctgtgactcctaccgaaaatatagttttactctggtaccctccgttcagtaaattattttaccagtgtgctcctggcaggaccctgggtgttgtccttgcctctgcctccccctcatatgcccacacatagacccagtcccctagattacatcttggacccattcactcctccccatctctactaccatgactgttgccacacccatcatctctcccaaagttccagctggcctccctccacaccagtctctacactgctgccacagtgatctttctacagtggatctgatcagtcactttccccactccaaacccttcaatggtttccaatcttgctttggataaaactcaaacttctcatacccacaagacccaccctccatggtctgccctacctgtctctccagccttattctcattctcccttccactcaccagtggccctcaggggcatagctaggtgcaatggcttgcacctgtaatcccagctacttaggaggcggaggcgggaggatcactcgagcccgaggagttggaagctgtggtgagttatgatcacccactgcactccagcttggggaggagtcatagcgtgagacccctgtctcaaaacaaaaagcctcagggcctttgtccaagctgttctctctggctgcagcagcgtcccaggccctctgtgccaggtgttcctcctgtgagtcctagggtgacatctttttcatcggggtctgtttttcaggtgacctcataggcactcactaaatatttatggaatggatgtcttttgtttgtttcattacaggtattgaggatgcagaaagttggcatgcaaagccaatgccgagagaaagagcagatgccattatcaaattaattgagagccagatacagaccagcaggaatcttgacccacagccccccattgaggactcacctgaagtcaacatcacagatgtaaggatgacctctccacctgattacagagttggtgacaaggtaggcagaaaggtggataattgaataaatcagatacgtcaactgctttgttctctaatgttgttcgtatgtacacaggattcttcatttattctggtctccatggacgaaccaattactagagtgacatgtaactaacagttcgtaggcaataaagagaggtttgccatttttaaaaaatacatttaggggtccaaagtgcagctgtgtcacgtggatagatactgtgtagtggtgaggtctgggctttcagtgcacccagcatcggagtagtggacattgcacccagtaggtacttgatctttcaccactcctggctccccttctcttttattaggtctgatttttatttttggctttcacatgtgtgtctgaattttctgattggtcaattgctatttattagctcctggtgtggtgtgcctttttctagcttcctaactttggtttgtgcatgaaactgccacgactctgtgtctccgctaagaagactggccccaggcgggctgaccttttgaacttactctctgaattacacagaggagcaggccaattcatcagaaacctcaaaaaggaatcaaatgatgcacaaaactcttgagtatcaagtccttttggtttttagcacctttacatcctgccttctggtatatcatagcagacctgacataggcaagttctttatggcctagaggaagtaaggcggcgagcctagggaggaaggacacactttctgatccttctttatttggagaaattttgagtgttgctcatgttttcttagcctggtaatgagggttaaaaataaatgaattttgaatacttgagaaatcaaaagacaaaaaccagaagaaaggagacggtatatcaacaaagggtgggccaggcacagtggctcactcctgtaatcccagcactatcaggaggccaagacaggaagaccacttgagcccaggagttcaacactagcctgggcaaagtagtgagaccccatctctacatagaatttaaaaattatccaggcatggtgccataatatggttccaggtactctggaggctgaggcaggagaatcacctgagtccaggagtttgaggggatagtgagctatgattgggccactgcactccagcctgggcaacggagcgagactctgtctcaaaaaaaaaaaaaaagtttgagaaaactatataactccatagttgcataattggtatgaaaatgtgtaaaaagcggggggaccatttttaggaatacataaaatatcaaaattgactaaaagaggtataaaaaccttaaatggatcaatagccctagaaaaaaatggagaaaattatccaagtgctatacccccaaagcaccaggctcaccaggttatataagactgactcatttttaacctttatgaaaagagtaatttctaaactgtttcaaatttttccaaatacggaggaagatgaaaatgtcatcccgatttacttatgaagcgaaaatgtgacaaagctagcctaaagaaaactgcagagcaactttctttatgaataccaatataaaaattctaaatagaacattagcccatctcaacttcattagtacattaaaaaaattaaatgaatcagtgagctcaaattagtaatgcagatgactcatgccaggagatgtaggaatagaattcagtgttctagtgttaggttaaaggaaggagggaagtgtgatcatcatcatacacactaaacaaaagcaattcataaaactcaacattttttttttgagatggagtctcgctcagtcacccaggctggagtgcagtggtgcaatctcggctcactgcaacctctgcccccggattcaagcgattctcctgcctcagcctcccaagtagctaggattacaggctcccgccatcatgcccagctaatttttgtatttttagtagagacggggtttcaccttgttagccaggctggtctcgaactcctgacctcaggtggtccacctgcctcagcctcccaaaatgctgggattacagatgtgagccagcacacctggccaagtaatttgaaaaatataatgagaaccattaatgtcggaaatctcactcttgagctgtggagtgtttacctgcttaggaagtgggggttgggggagcgggggatgttaactaaaaagagcacaatttgagaaaaacttgggtgccacatcagccatttagtatggatttaagattggctagcagtccatgtttatgacattaaaggaaatttttggtgagtcacgaatttactttcttcaagatagatgataatttgtcattctacaatatggtaccttccttctgtagtcgttccttctaaatgcatttgaagaaactctaccacctgattgtctctgtcttctagatagctactcggaaagcatgcggtctggctctggctaagctgggctacgcgaacaacagagtcgttgtgctggatggtgacaccaggtactctactttctctgagatattcaacaaggagtaccctgagcgcttcatcgagtgctttatggctgaacaaaacatggtgagtgtgtagtgtctctcagggcttcttagaatcaatggcccactggacacaggaggcccagcctgtgctagtttttctttccatttatgaaagcaaaaggactggaaaaaaatttcctgggaagcaggaggcaagtagccaggtggagtctgagaggtggcttctaggtctgctaggagggccgtaatagactactcggcacttggagtctccaagttggctgagggcagcaggcccaaggccacagacagtgggtcctctgagcctcgaaccatctgaacccagggctctgggcctgaagcatcccaggctccctagtagctccttctgcccaattctgcaaccacccagaggcacactggctgaggagtcacagggaatgcagagtttccttctctccactgtagaggggcctaatatagcacagaaatgcaaatgttgcacttacttcaatcacaagaatatcaatgcttagagctggtgccttaggcaaagccattctgcttatctatgcctcagtctctccccagagtgatattaatgcagggagtatctcaagcacatgcacacaagcgcacccctctggagaggaaggagttatggccagtaaaccctttgaactctaaagctctgcgcgtcatagaagatgatgcccagctcctgtcattaggccagaaaaccacaggccagcaggtcttatgtgaccaccagtgactttatttataacaagtagtatttttaaaaaaaatttttttagacgaagtctcgctctgtcgcccaggctggagtggagtgctcagctcactgcaagctcygcctcctgggttcacgacattctcctgcctcagcctcccaagtagctaggactacaggtgcccaccaccacacccggctaattttttgtattttttagtagagacggggtttcactgtgttagccagagtggtctcaatctcctgacctcgtgatccgtccgcctcggcctcccaaagtgctgggattacagacatgagccaccgcgcccagccagtattttaaattttttaaaaattagttgccagcatttaaaaatcagattataggtgtagtggcaccagcctgcagtcccagctactcgggactctaaggcaggaggatgcttgatcccaggacttaaacgctgcaatgtaccactgcattccagcctgtgaaacagcgagaccccatctcaaaaaagaaaaagaatcaggaggtcttatatagaatacatatttctggattcttttgaaaaatgggaagaactactaccatagggtggcattccctcctgacgccagttgactgaagccaaacagcacccctgttgagatgggtgtccccacagctccccatgctctgctgggccatttgggttttttgttgttttgtggtttttggttttttttttggggtttttttttttttgagatggagtctctctctctctctcaccgaggctggagtgcagtggcacgatcacagctcactgcaacctctgcctcccaggttcaagcgattcccttgcctcagcctcgcaggtagctgggattacagacatgcgccaccatgcctggctaatttttgtgtttttagtggagacagggtttcaccatgttggtcaggctggtctccaactcctgacctcaggtgatctgcctgcctcagcctcccaaagtgctgggattacaggtgtgagcccccgagcctggctcattaagctgttttcattttgaatagaaaacaatgcgatccgtaattttctggattaatgctcctgtcaaaaattttgctccccacctcactgattgcctcagcacgcagccatgtagtctactccgtccctgctgatatgttctcacagttggaaaaaagttgtaaagaaaaggcgagcaggtggtatttagtgccatgttgaaagaggtggctacaatgtagagcttgaccaggggcagtcagggacaacctctcagaaaaggtgatacttaagctgagtctcaggtgacgaggggtcagccgtgtacagatgtgggagacagcatttcaagcaaggggcatggccaactgtaggcaggcccaggcttggaatgtttggagagcagaggaagggccaagtggtaggagcatggtgaacgcagaaaactctccagggcccaggtcatacggggtcttataggcgcccttttcagtatctctggttctcttgcagtttgctgggaagccactggagggctttaagcaggaaagcaacagcctgcgttttccaaaactctgaagactggagaatggcttcacgtaggaaagggaggagaaggagagggtgacttggaccagggcagtagctgtggagtcggagggaagcagacttgtcacatattgccttggcaggagagtcagcaggatgccaacggcaggtgtcaggacaggacccaaggctggtgcttgagtgtgggtggcagcacctgggggaaggtggtgtcacctcttgagattgacaagactgggggagaagtggactggagggcaccatcaggagctctgtgtgggcctggggggttggggcacctgttagatgtacagaggggagacagtggtatcagatggctgggcagtagatcagtcagtcattttcacatgtggccgctccacaccactaaatgcagttttctaaactacatattcgttggcctagttttaagctaacatcttttttttatttttattttttgtagagatggagtcttgctctgtcacccaggctggaatgcagtggcacaatcatggctccctgcagcctcaaactcctgggctcaaggggtcctctggcctcggcctcttgaggagctgggagccgccatgcttggccacatctacatttttaatcataaatttaagtcgttgcaaaggatgtagttgttcatatattgacatttttgatactttaatactcaaatcatgccattaatgatgacactggctgggcatagtggctcacacctgtaatcccggcactttgggaggctgaagctggaggattgctggagttcaagagttcgagaccaggccgggtgcggtggctcacgcctgtaatcccagcactttgggaggccgaggcggacggatcacgaggtcaggagatggagaccatcctggctaacatggtgaaaccccttctctactaaaaatacaaaaaaaaaaaaaaattagccgggcgtggtggtgggtgcctgtagtcccagctactcgggaggctgaggcaggagaatggcgtgaacccgggaggcagagcttgcagtgagctgagattgcgccactgcagtccagcctgggcgacagagcgagcctccgtctcaaaaaaaaaaaaaaaaaaaaaagttcaagaccagcctgaacaacatagtgagacctggtctgtaattaaaaaaaaaaaattcatgccaagccacttttctttgtcagaaattaaaaccctttttctacttgatttccaatttccattccattcatttccccaatatatctttatgcatgaaagccttttattgattgtcctatcatttttctctgcaacaaaaatatgcatataaattgataggtttttaaaaaattataatataggcttctgagcattaggtttttttttctggactgagatagaattttgattattattagctggtatgttagtggatgagtatacttgtagtttgaatgtgatagcattgagaacagattctattcctgtttttcatcttcatgatgtgctatgaaaccttacttacatgaataagtagatgggaagggaagttttgttagaggaatgtcactcagttctttgaattccttcccagttgtaagtcaaaaaatcacatagtgatctttcatgtaaagttgtttataaaagttatttacagagttgacagtttcattaattaagttcttcactttctctccaccagcatagttatttcaaattgtcctctttacttgggtctggaggttctgcactccaggatgatccccctgtaagagtcaggtggctgagagcatgccctttggggatcaggttgctagaaggtgattgttaaaagagacagttgggagacccaggggcagyggctcacgcccgtaatcccagaactttgggaggccggccgaggtgggtggatcacctgtcagttcgagaccagcctgaccaatatggtgaaacctcgtccctactaaaaatacaaaaattagccagacgtggtggcgggtgcctgtaatcccagctactcgggaggcagagacaggagaatcgcttgaacccaggaggtggaggttgcagtgagccaagattgcaccagtgcaccccagcctgggcaacagagcaagaccctgtctaaaaaaaaaaaaaaagaccatgaggggagcacagaccctccttttggcagatgaatgtagacagagttgatctggagtttgggatcttgagtgtaacacccacagccacatcccctttggaaagcctgtgtgtatccgcagagaggtttgtattctagtttgaagccttctggggtatttgagcccggacttctggggaaggggggtaaggaatggcaatgtaaagtggggatcattaccagaatgcacatcaggggagcattgggccagatgcgacttcccgagggtgcacagggccctgaggacttgccccagcagcgcccatgaggcgacagcagtgggccactgccacactgcagaaaccgagaggaggaaatgccttgagatcaggggccaagtcaagtcacaggccacccaaggtcaggcagcctcttggttttgtggcttcgaggtcccttgtggggatggtggcctagatgaagtaggctgggaagagcgtggaaaatgagaaagcaggggcaatgactataggcaagttttgagaagtttgctgcgaaggagaacacagatgtaaaagcaggacaaggcggagatggggctgtgaagataaaaggtgctggcgcacacctgaatggaaatagaatgatccaagagaaagggaagtagcacaagaggggaggaggagctgcatggctggagacccctgtgagaaagcaggaacaggacagattcaggatgtcctgtcggggcatggaccctggaaagctgcggacaccaggagggcaggcaagagagtctcatctcttgctcyctaggagctatgagttgagggcgccgtctgagcaggagggacggacgggtgcccagggtttgaggaaagaggggtgtgggaaggacgcatgctagaacttcagagcagttcagcaggtgcagaatgggagttatcatggggactgtgggagaaggggcggtgggggcaatgcccagggatgttctgattcatgttctctgtgctgcaggtgagcgtggctctgggctgtgcctcccgtggacggaccattgcttttgctagcacctttgctgcctttctgactcgagcatttgatcacatccggataggaggcctcgctgagagcaacatcaacattattggttcccactgtggggtatctgttggtaagggttctaaatgccatcatcttggtagccttcctccttcacagagaaagattagcatgtgattggttaaaccacgaatttccttatggttccatgaagtttgattattcaagcctttttcttgaaaaagccatattgtactttaaaagtgtcagactctcagggcaacttttgaagtgcatctctcggtggtactgttgtttcagacagtgagaaacagttgcttatcccgagtgccccttgtgtgttgagctgcgtgcaggttatggacaggactggcagagtcatggagccttttctgccctcgctgtggttgcagtctaactgagggtgaacagcatcacagaggacgaggagcattctggctggctgcacagcctgctcaggtgggaggggggctgggaccaccatcaccaccttcctgcctggggcagcgagaaccctggagcgtgacacgaggcaggaactcttacaaacacacccttctcagagtagtagtcacctggcaggtgggctagaaggaaaccacaggaaacgggaagccagagaggggattgaaacaaggtgtgcaaggtggtgggggagaaaaccaggggggtggggggggacctgagagtgaagaaagaggtgagtgtgcctaacagatggagcactctgcaatggcgtgaagagcaaaacacacgagtctccgggattcctcacttgggaaacgtcagagagtcattttcgygaatgacagaaatgacatgggaaagatgagccagctggcgtgcctgtggcaggcagatgggcttactagatgtggctgcacacacttgcttctagaatgccagagatgcacgctggaaagccatctcagggactccctgggagaatgaggctggacgagatggctctagatggagctagagtcacggctgtctgggtgaagctggaggcacaggtggtggccagagagaggaggcgcggcagtgttgcaggggcagaggggcctaggaaagggtccttgagcccacctgtggctgtgctcagtttcagttttgaaatagtcacatggagaaagtgactctaggttccatccaaagaagaactggaaggctgggcgcagtggctcatgcctgtaatcccagcacttggtgaaaccccatctctactgaaaatagaaaaattagccaggtgtggtggcacgcacctgtattccagctactcaggacgctgagacaggagaattgcttgaacccaggaggcagaggctgcagtgagccaagatcacaccactgcactccagcctggcgacagagagaggctttgtcaaaaaaaaaaaaaaaaaaaaaagccagagcggtggctcacacctgtaatcccagcattttgggaggccgaggcaggtggatcatctgtggtcaggagtttgagaccagcctgaccaatatggtgaaaccccatctctactaaaaatacaaaacttagccagacatgttggcacatgactgtaatcccagctacttgggaggctgaggcaggagaattgcttgaacctgggaggtagaggctgcggtgagccaagatgacctagtgcgctcaagcctgggcaacagagcgagactctgtctcaaaataataatagttaatttttttaaaaaaagagctgggctgttgaggttagacagtggtcctaggcaaggcagtgtgcatggtgacaatccccttcctagctgagaaaagctaagctgcccagtgcacattaagatttctctttcacatttctggtgagaaactacgttcccagatacaccctaaagtaccctgtagcaccctcagcatgctttgaaggtgtgttaactacttggaaggcctggagaaatgaaaaagaccactttggtatgcaaaacccggtctctggatatagaaaagatagagcagaaaagggagaacaaagcctgaggaccttcctaaagagaacgggttcagagacttagcaggccaaactcaggccaccaatgctcagccatcgtggacagtaacttggagtgatccatctgaaaagtcagctgagacttttcagttgactaacccgaggtgtcacagtgtgatctcaagggagacaggcgtgcaagaacacaatgtaaatgagttgtgaggatgcagcgggaccatttatggggctctgctacagctcgggacaccccgtggcaataggaataattgcttcttcagagctagaagtgggtggagggcaggttcctaatggggttatgctcctgttttcatcgggctctggttctctcaggtgacgatggtgcttcccagatggccctggaggatatagccatgttccgaaccattcccaagtgcacgatcttctacccaactgatgccgtctccacggagcatgctgttgctctggcagccaatgccaaggtatttttaaggggacactagtttcagacagaaaatgcttctggactctgctagtttcatactgatgattggacttttttttctcaacataaaagtgatattcattatagaaaatttggtgatagaattctttacaaaaaaaacaggagattatgcacacaaacacatttgccttgtaaaagagtccaacagtacaggatactgaacaaaacctgacagcctgtctcagtcagggtttagcagaagaaacagggaccattctgggtgttgtaaacaggagaaggtgtttaacaaagggtgcttaagaagccgcaggagcaagcttcaggcagagtcccagactatagtgttagtctccagtggctgcagccagaggccaagaagctcctgctgtgtcctgacatccaggaagctggagagcgggtggtaggctaccactacaaacgaacccgggttccctggccctggcttgcctttggaacagcttagggcgccaagagtgtgtgggacctcatgcaagggcatcagatggacagaatcaaattcctgttcagaacctagctgcacgggagacgaggcagtgtggtcttgatctttccagcctttcccactaacgttcagcaggtttcccttgccaccctggacctcgcccatgcgccacacaggtaacccctggcacagtcgggatggggactgtatgttccctttccaagcactcatgggcgtttctttgatttttttttttataagtgggctcccgctttacatattattaggtacttttttgtgtggtttttgtgttttgttttttgggttttttttctttggagacagagtctcactctgtcgcccaggctggagtgcagtggcacaatctcggctcactgcagcctccgcctcccagattctcctgcctcagcctcctgagtagctgcgactagaggtgcactccaccacggccggctaatttttgtatttttggggagagacagggtttcgccatgttggccaggctagtcgcaaaactcctggcctcaagtgatccacccaccttggcctcccaaagtgcagggattataggcatgagccaccgcacctggccaattgtgtacttttaaaattagtttatcttggagattgttctgtgatttcacacgttatagggtttcatttctagaaaggtcaagagaggcgcaaaacaagattaggtgatagaaattagagtagaggttgcttcatagtggggggagactgactggaaggaggcacaagggaactctgctggcggaagcgctgctgggcttggatgagggctccacggcggatgcagcattcaggaagggctgaacttaggatgtatgcatttcactgcagctgagttatgcctcggtgaagacactgaataaagatggatcatagcgtatgaacgaacagtagcgacgtttcttgctatattcgtttataatgcatccattaatatgtatgtaaattaacaaatactttagacatacaagtgttcatttatactggtaaatgtttatgtgctcaaattggtcataaaaatgtatttacattttattgggaaaggggccagtcgtcttgtattcagatagatgtttatggtctttctaaggatgaagcattacaagttattgtggcaaaagttaatgttttaacattctattcgggctttctagtcaatgtgagtcagtgctcctgccgtgagttaatgttctgtctgcacagaacaagtcagtgagtattggggaatcttccaaggggattggtgtgatggcatgggggagcttgtccttcagggcagccccaaggtcctgctgggacctgtcgtccactggttgtagatgctcacccctttctccaaagcctgtgtttttagtagaaagagctgtcctcttcacacccctccttcacttctttcaacgtctgttgttggaaattcattgtttgcttttctaaaccatggctccatttatgccctaggggatgtgcttcattcggaccacccgaccagaaactatggttatttacaccccacaagaacgctttgagatcggacaggccaaggtaagggcttacgcgctcctgcgttattcagtatcatctcctgtaaaaagaacacttctgaatctatcaccagctatcttcagagttgagacatcatcctttctttgctctcatttttttaaaaaacagttgtgacctttacctgcttttccttgggaaggaacattctatgaatttcagcttagcctgaacttttctgctttccaaatggagtcttttgttgttgttgagttcaaagatagtaacatgaagccacttgagcggtcgtggctataatttatcttggccgcaagctaaacaaaacagaagccagcgctttgggaggccaaggcgggaagattgcttgaggccaggaattccagagcagcctgggaaacatagcgagattcccatctttacaaaaattttttaaactagccgggtgtggtggcatccacctgtggtctcagctactcaggaggctgaggaaggaggatagaggagcgcaggaattcaaggcagcagtgagctatgatggatcacaccactgtactccagcctgggtgacaagagtaagaccctatctctaaaaacaagacaaaaaataatagaaatcacttgaaatgaataatctgttaggttcagattttacagatstaaggccaggaataaaagggaacatgatctctggtattctcacaaaagccctgagaagttcagattatcagtcctatctgtagatgaggattggagaaagtaagtgtcttacttaagggtttacagcttgtgagtaccaagaccagaatccaggcctgagtagtgagcccagtctccccaggtctgcccaccacgctgaccatcccctgctcagcctgcctgtcagggccatgcatagagaaaagcagaaacgtctrtggagaaaataagtgactctgctcatcacctagggagtggggcttgtagacattttggcatgcttccttcctgtctttgttctaggcatacatgtatattttacacagttgagatcatmctgaatagaaaggtttgcccatagccactcttgaaagagcagcaggtaacatccaatttggttgctaaggactaggctgctccagaattcacagttgcaagtrctcagaatggccagagtgctgccataaagcaggtgtttccagaactgtccactgtgtgccataacgtagctggaaaacgccaccaaatggaaaagttagtgttcacctttggtgttaactacaggttctgtttctatggggagggtctcttgacattcacatggtttgcagagcttgcttatttctgtcgtctcttttctaataattttcctgtcctgacaaaagcaagtaaatttactgatagtaaaggatgtgagataaatgtgtgtgataacatgcatggcatggatcgttaaagggctgggctttgaaaagaggacatggatatgtgtgcatgcgtgtataagtattttaagaggccaggacatccttaaagaatggggtggctcagaaaccctttctgtactatcrgcaatggttcttaagctacagggaaacctatacagaggggaagtggagaataattccagatgcctccgatgggtagctttggaggcaacaawctatgaaagaagcccaggaactctgtctttgcttgcagaatagtacgttgtcgagagcgagggctttgatgtcagccccgcctggctgtgggtcccagccctgccctgggccacttcctcctgctctgagatttgctttcctcagctgcagaacggttgtgccactgaacagatcttacagggaggctgtgagggttctcagagttcaggcacacaagatcttagcactcagcgtgttgccaatgcccagaatgttctcattaacatgttagtcactggagtccaatctttgcatgccatagtgagctctcaaaccagactcctgatgggtatgtggcgtatccatgctccaggacagctggagcagtgtaatttcctatcaaaaagtatgtgtcctggcttgtaaatgcatctgatttttttagtagtgagttattaaggagtgaaattgttagaattgggggatagcggcatagcaaagtgccttccactttgacatgcattctgtgtgtagtaaccacggcattctgttttgctggcactataccaggtcctccgccactgtgtcagtgacaaggtcacagttattggagctggaattactgtgtatgaagccttagcagctgctgatgagctttcgaaacaaggtcagttggttgagtatgagcattgaagttcaagctgggaagaggtaggacttcagctacctcctgtgccctgagtgctctttttatttttatccctgcatgttattctgagtctctttcttgtaccaagctggtttttgctgttctgcagatatttttatccgtgtcatcgacctgtttaccattaaacctctggatgtcgccaccatcgtctccagtgcaaaagccacagagggccggatcattacagtggaggatcactacccgcaaggtgtgtgtgggcattgagaatgctttggaaggttttggtgtttttgtttccttgattggccacatggcatgctctcaggcatcacctatagtctacctctcacccagcatggctttgttatttgatgttcactaagcgtggggccatactcatacacatctgtgtgtccccaacagagtgcacagtgcccagtcaccagggcgggtcagtggcaacacagaggagtggctattgcaggcaagcgaggtgtcatgaaaagcatcgcagtttctttgggtttggaatgatgaatagtatgccccaggccaggcgtggtggcttacacctgtcatcccagcactttgggaggccgaggcaggtagagatcacttgaggccagaagctcaagaccagcctggtcaacatggtgaaaccccatctctactaaaaatacaaaaattagctgggtgtggtggtgcatgcctgtagtcccagctacttgggaggttgaggcaggagaatcacttgaacccaggaggtggaggttgcagtgagccaggatcataccattgcactccagcttgggaaacagagtgagactctgcctcaaaaaaaaaaaaaaaaaaaaaaaaaaaaaaaaaaaaaaaaaaaaaaagtgtgccccgacgaaagcaggtatagcagagaacacagcaaatgcagaaaacagtgtgtcagggagaatgggctgggcagtgtttgcgcctggaaaggttaggtgggacagatgatgtgatacaaggagcattgagtgttcatgcggcaggggccctctgagcctgcacaagcggtgcctgatctctcgaaggactcctgggacccagcacacagttgctctcacacctgaggttgatgacagggaaagggtgcagggggggatccaccagggcaggaaccatgggccaggtggagttgaaagaagtcctgccccagcctccccttggccccacaaggggcatactgagaagtgcctcccacgcaggctgtgttcctgcctaagggatgcctgctagagacttggcacctcaagtgtgtactgggggcaggtcctgttggcaccctctgccaggcaggtacccaaatccctggctcccagcaggaaagcaggtgctcatgtcaaccacattgttcctacagacagtccaggtgcatgaccgccctgtctagtggggaaagtgttagagtagcaagggaaccttcacgagccaagagctaaccttgccaaccaacagcctcaagccagctagtcacttttctgcactgttaattcattagttctaaccattttcaggtccccaacagctttgagaatcagagtgccacagacccccacactcaggcagcccttactgtaggttgaggcagagcagtttggaaactggcagtttagaatgagaactccgcaggcccatcggagtggctgttcacatgaatcagattttcccctgggaagctgcagattcaaaggcctctatgtggtgaggctttaaggctgacgagctgctttcacaaaagggcctaacatccttgtttccccaggtggcatcggggaagctgtctgcgcagccgtctccatggatcctgacattcaggttcattcgctggcagtgtcgggagtgccccagagtgggaagtccgaggaattgctggatatgtatggaattagtgccagacatatcatagtggccgtgaaatgcatgttgctgaactaaaatagctgttagctttggtcttttggcctctttaccctgtgtttatgtttgttccaaaaccatcatttaaatctctactgtcacattttgtttcttaaaagcaaagccagctaacaccttcmttcatccctagttcggaaattcaagctaactacttaccctttaaactgtcactgcatatgcaagtaccgctctaatttttggatcattaaagggagttacacaacttttaagtgaaaaaaataggtaacaaaacaaccacctgatagtaagttttctgataagactatagataagtggtagaggtaatcaattcttccraagtgtttccttcgtgaataactggtagaggtaatagttttttcaatgtatttccttcrtgagtaaagaaaatgtggattgaagtatagattccagtagcctagtttccacagcacgataacaccatgacgcctactgctgttcccaccttgggattctgtgtgctgccatcccacctgcagctgccctggaattcccttcgctgtttgccttcatctccctccacgtttgagaggctgtcaggcagcagcgaaagcttgttaggatgtcctgtgctgcttgtgatgagagcctccacactgtactgttcaagtcaatgttaataaagcatttcaaaaccagctgctttattcagcacgtgccttctgtgtgaatcagtttctcagtggtcagttcctaaataaggaaagagcttttatccaaaccagaaagagtgagccatggcccccaccagtaaacctgggaaagaataatgggctgcagaggaagcactcgctcgaggacagcacctggcctgaaaagctgtccctgagctgacgccttcctgtcagctataagcacataaagtatgtggctagaggccaggcgttgtggctcacgcttgtaatcccagcactttgggaggccaaggcaggtggatcacctgaggtcaggagttcaagaccagcctggacaacatggtgaaaccccctctctactaaaaaagacaaaaattagccagacatggtggtgcacacttacaatcccagctactcgggaggctgaggcaggagaattgtttgaacccaggaagcggaggttgcagtgagccgagatcctgccattgtacgccagcctaggagacagagcgagactctacctccaaaaaaaaatttaagaagtatgtatctagaatcaaagtgtcaaccagaaaaagatgaacctgagcttcaaaactagatttaaaattctactagatgtgtctgctgtgtcacattcctgttttggctttggttttgttttgagacagggtctcactatgttgcccaggctggtctcaaactcctggcctcaagtgatcctcacgcctggaccttccaaggtgctggggttagaattacaggcgtgagccactatacccagcccattccttatttttattgcccaaattaagtggtcagagatctttggagtcatgaccagtgtgactgaggaattgttctagaatgtgcgggatagagatggaagcactggcctggggcttggagtcctcaggacctcctcctactcctgcccttgtaagtcactgagctggtttcctggcctgtaaaatgagcatgatgatggctctgcttatttcataagatttcaaaatttattttgtaaaaatagtttctatagggtgattgcagaaaatttagaaaatgcaaagaggcaaaaatgttttacctcacttatctcactacttcgaggtaatcacagcttctcacactccagacaattttactcatttaaggtatacaattcagtggttttcattctttttatggccacatactattctattgtatggagataacacattttattcttccattcagttgatgaatgtggattagttccacttttgtctcttgtgaatagcgttctgacaattcacatattttgtgaagatgtaggtttcacaaaatatgtgaaagattttgtgtagatgtagattttcccttcttatggacatgtatactaggagtggaattgaattgctgtgtcgtaggataattctgtgtaccctttcaagagtgtggtggggggtggtgtttaaataccgttttgtgaggagtagatgcagtgacactgaaggtggctgtaaagcattactttagaggaaggcattctaacagacaagccacgcttgcttgtattcaggtgcaaaatgtcaggtttggtgagaccacaggacacataagcgcacggtggcaacaaatggagcaacagattccatgattaaaatgtgcaatttctaaacacaggaaagagcccccaaagcctcacttcagtcccctagaaggttctaggcagaaacagtagggcagatcaaaggaatgagagcataggagccatgatcacccagcgaggggagtgagccctgttgccagcttggcctggctgtggcttctgagtaaacacgtgtgtttgttaactgttaagaacctggtaatgaatactccctggaagatgccatggaccctggcctctggccagtcccctcgcccttgagtcctcctaacatcttattgctctgattacttcccatggagaagccagccagcagggactcgggaaccatgtgtcccaaaacctggcttgaatccccaaatctgcttcttgactgtggggccttgggtagctgtagaaggggatgatggtgctgatgacggggacagcatgtatcccacaaagctgtggtcaggatgttagtgccatcttttcgaaacacccatgcaggcccaccctgcatacctggcagcttcctactccccagcacccccagcacgccctcggctggccagccccatcggcccctcagcacgatccttccccgccttgctgggattatgttggggctggcagcaaccaacccgcctgcccgcttctgggccaggcagccctgtgcaacccgagctgctcccctgtccccgctgtcccaccgccctccctggacgcctgctacccaccatcaaacaccgcctcgtgccggccccgcgcaccctcccgccccgtcggccccacgcttcaggcgctacctggagggcatggctcctacccgtgggcactcgccttcacccttggagcccggccttccccgggcagccgggagaggttctaccacttcacgaggcctcctcgccctgccaggccgaggtcagggttagagaagctgggtcgttagattcgggagagctggaatgatctgatgtgtcattccgtacttgggtgaggaagccgagcacgcagagttaccgctcagggcaggacctgggctgcacctggtatcagggcccacgtgagagataccctccctccctaagtgtgtacctgacgctagttctgggtctaacggcaacattctagttctaggtctagttctaggtctagttgtagagggtctcctggatgatacaagtgagtgtccactggcaaggctcctccccaggtaaacttgtgacagagttctccagcaaagaaacaccagtcccccagacacgggaggtcgagccgccgccactaccaagggaggtgcagagggactgggggcttctcgagtctcagcttcaaccaaggccaaccagatggccccattccgggtttcagggtcccattcttcccacatcactgcccacgattcacgtgtgaaatgtggcgaggctggaaattcatcactttgggaatctgtaactggcacaataaaatgtgtttgattgtcagaactgtcagccctgcaagtacaaggagtaagggaactttgaggcctttcctggaagcaccctggttctgttactgtggcttgagctgagagttagggagcctgagcccattgtgtcttcatggtacatagtcagggccactaaggatcatcccataccacagccctcatagccatccgtgaccaccatgacaagtcaggtgcagcaaggacttgagctccctggtgcttgtttcagttggcccatcatcccaagcaaccgaagtgacagctagattaattgtgaagccactgcaggccatggatggctcatgccccacttcccactgggaaaatgctcaaccctgcactccagcccaaaggcaggaccagaccaatcgccagattccatgtgcataggccttttcttccagaaccttacccagggccagttctggattagtcaggaaccagttaggagacaaaaatacatacctagtatctcaagaaagggaagtgaaagcgtatttacttggggtttgagggctgaaagtgcaaaagggatactgaagtaacagagttggtgaaggaagaagctacaacccccagagcagggaggcaaaaataaagatgttggggtgaccaggagtctagtactgagcctgggagcatggaaggcctagggctctggacctcgaggaggggctgctgcagtgcgtcacagaaggaggaagccacatcatctgctaagaacggggcaggaggaagtgtctttggcatcgtcttccaggtcactcattctgtgttcaggggcatcaatttgctgttgagtccattggatgagattttcattgcaatgactaggcttatgtacgtgctgcttttcaaatctccctggatttctaactcttctcttttgtatctctttctttctacccttaggttgttgtgtcagagagactattagagatctgagaagtcagtagctttacatcacaataatgcaaacatctatgagaactgctctgtgatctgctgagaattctaagctggtcagtctgtgcttgcagagttcagccgatcaggcccgagaggagaacagcggttctcattttaccctcctctgtttttcgcgtgatgacccgaggcctgggagatactgagccagacttgcctccgactccttccttccacatgcatcacactccacacaccacacaccacacaccacggggaatctccaaagggcaggagtgggagggagtgcagcaaagccgagaaagggctcaggctctggagcccaacttcatgagtcacatttccctcctgtttttgtctgaaaatgggggtaacactggcaccgacatcctagggctgctgtgaggagggggtggatgctcccagccattgctgacaatgatgtgattggggatctttgaggattccaccccggaaccctgacaggtccagccttactctttgacctgcccactgactctactctccatgacggtggccagtgctgtcatcgtgaggctgtgggccccacttcagctttacctccaaaagtcctgtggcagaatcctggggtgacgtgtcccctctatggaaggtaggttgtctctgccaggatcccagcagtatgaccgcactaaggaggcaaggtgatctatcagccagggctcacagagacctgagccttttccccgtgcctgtgggcaggcaggccgtgctggagggtgctcagggcacctgctgggaggcaggcagattccttctcacctgctcacgcagacccaggctgacatggacctgctatccctgagctccctgtgctgaggcagcgctcacctcatctttcctttatcccggaagtaaccttgcaaaaacactgggttgagctgaggggttccgttcggcacactcacctgaaggcacaaggcctcctgacccagaggccatcaagaccaagtgcagcaagctgcttctgcacggccccagcgtcaggtcctgcttaggcctgtttttttttggttgtttctatttttttctctgtatttagagatggggtctcacctcgttgcccaggctggtctccagtgatcctcctgcctcagcctccaaaaattctgggattacaggtgtgatccaccgagtcccgacccctctgtgttttcatttgctctttgtttccacccagggacggccctcactcacctgtggcccaggtatgcttgaaatgacacaactacaagttgtatcattgctcctttccttgccttctcccaaactccactaaggatgcatggaggacaggcgatggggtctaacaggtgtgatgctcatcccagcctagttagcactggctcatgtaacctagaccacaggccatagctggacaggggtggcggggcgacctgcccagcttgggtcaatcaggaatttgtaacgggcactcagaaatctcacctacagctgggtgaggtggctcacgcctgtaatcccaagactttgggaggccaaggtgggcagatcacgaggtcaggagttcgagaccagcctggccaacatggtgaaaccacgtctactaaaaatacagaaattagccgggcatggtggaacgtgcctgtaatctcagctacccagggggctgaggcaggagaatctggcttgaacctgggaggtggaggtttgagtgagccaagatcacaccactgcactccagcctgggaccacagagcaagactcttctgtctcagaaaaaagaaaaacaacaaagaaattgcacctacagtctcctcactctctagtgggcattaaaatgaactttctgtagccagtttgggcagagggaggatacagcctaatcctgggtgccctagaaggtcgtgcaggctgtt

SEQ ID NO: 96070 - DNA, 69922 bp, Homo sapiens
ggtctaactagtccaaagatgccacattaaactgccctgtctgataactctgtactggcaagccacctgccagaaaggacaggccgcaccatgtgaacaaagaaaccctttgctgtagaggatgcttcttcccttggtggcccttcagctatcaactgaaatgtgtgatgatgcctccatggatcaccttctgctcggccgggactcacagctgcagggccactcctgatgggacagcagtgcacagcggctgtgtgctccaaggaagcaggtccactggcagctcagtccctctgtgctatgaccctgggcaggtcaccctaactccctgggacccgtttttttcttctgtaagtgggggaaacgacaacctcatgaagtcataaatactaaatgacttcacacacggcgagtgctgaacacgtcacccgggacgccagaagatgacagaatggccaggtttctattaggcactggttagctccccaacaaagggaatagcagctctctatttgtgacccaccaccctgaggagcttctggggaacgcaggacccttagaggccaggagcacgagctctgcatgcctgctggcatccatgcctctcagtgacatcatggtccctgccccttcaccccaattgatcctcatcctcagacaccaggacccaggctccgccaggaaggagcagtgaggtggctgctgttaaatgagcacaaggccctgcaggtcaagctggggaaccatggccgccctctcagtgaggacgcagcactcaacgtttccgagagtaagcagctacctgcaaaaaccagtgagtggggcctggggtggctgtgtgtgtgtccgcgactgtgtgtgaatgaggaaatggggacaacaggggaccaggaatggaaatcctgagtagaatgcagatagtcccaccttatccatggtttcactttctgctgtgttaattaccagcagtcagttgaggtctgaaattattacacggaagatttcagaaataaagaattcatgggttttaaactggctgggcgcagtggctcatgcctgtaatcccagcactctgggagagtgaggcgggaggatcacctgaggttggttgtttgagaccagcctcaccaacatggcgaaatcctgtctctactaaaagtacaaaaattagctgggcatagtggcatgcacctgtaatcccagctactcaggaggctgaggcagaagaatcgcttgaacctgggaggcagaggctgcagtaagccaaggtcgcaccactgcacactggcctgggcgacagagccaaaaacaaacaaacaaaaaaactgcatgccatcctgagtagcaggatgaactctggctccatcccgcccaggacaggggtcaaccctttgcccagcatacccatgcgtctacaccacctgcctgagtcacttaggagccattttggttatcagatcagctgttgagggatcatgatgcttgtgttccagttgccttattttactttacaatggccccaaagcgcaagagtagtgatgctggcaatttggagaaacagaaaccagagaagccattaagtacttcccttaagcgagaaggtggaagttcctgactaaagggaaagaaataacttttattatagtatcttgttgtgattgttttactatgagttgttgttgttaatctcttactgtgcctagtttatgcattaacttatcacaggtgtgcatgcctaggaaaacacatggtatatacagggttcagtatacacatggtatatacagggttcagggttcaggcacctactgggctcttggaacatacttttccggctaagtaggagctactgtgtcaaaaagggaatcaagagaccaccacaatcacggctgaaaggagccttgagaatggacttctcttcaggtggggaaactaaagcagagagagacgtggtctgcccacagcacaaggctggctgtgacaaccctcattcagttcatgctggaaggagtccttaggaagtgcacggacgggcctctgcttagtgcacccgacctctccatttcagccccttcatctgtgtatccccccatccccccagcacatcagcagcctttgctgcaaaccgtgagcttttcacgcactgtcagcacctaaacacctgccatagctgcaagagccgggtgctgccacactcacyggattggcaatgacgcagatcatggcttcmgggcagtgctgggcacaggcagcggtcagggtggccacaatcgtggcattggtgttgaacaggtcgtcccgggtcatgcctggaaatgatccaatatgagatgttaacagagaacaccacaaatttccagacaggcagcatgtgctgagcgccagctgttacaggaaatttagccactcaaggtccccgtttcaagtcagtccctcttgcagggtaaatgatccagcatgatgagtgccagaagcgaggtctgcatgggtggagcaggggaggacaacatctgagaaggaccgtcgaggtttattaagaacccccaaggtagagtgggactgagaagagggaagggcgtccgtgcacagaggcacaggggaacggcaagacgactttgatcccaggccaacaaagagatgtgacctttaccccacaggaaaggggagctggtgacatttttcctacaacaaagcaaccagattaaatccatttttaataggaaatggatttaatccccacatcttcacgtggggaggtaccagacaaggctttcaaacacaaacctggctttctggggactccagccggaataactaccacatcacaacctttcaggcagtcaggcagctgttcaggtccgaggtagcctagaacaaacaccccacaagagaaatgtcaccgtttctgattcagagaggcctggaaagttcagccctggccttaaggccaactaatggcctcgagaaaggctagaagccctgcctgtaacgtgacttccttctgttgacgactactgccctgcgagctgacaattcccgtggcaggaaccctccccttctaccctgctttccccagcctctccttgcccaggccccagctagaatgggtcagccctccaggtttccacaaaagcgaactgagccactgcttgtcttcatcctactcgtgagcattgtaagtcacacttggcctccagttagaatgagaggagctgctcattccccatcaccacaatcctgatgaaaactcctttttttttttttgagagggagtcttgctctgtcacccaggctggagtgcagtggtgtgatcttggctcactgcaacctccacctcccggcttcatgtgattctcctgtttcagcctcctcagtagctgggattacaggcatggtccaccacatttggctaatttttgtatttttagtagagaaggggtttcaccaggttggcaaggctggttttgaactcttgaactcaagtgatccacccaccttggcctcccaaagtactgggattacaggagtgacccactgtgccagcccaaactccttgatcagaaggcactgaaggccaggaaagaaaacgtcctgtgctgaaagactctaaatattactatttcgtttactcctatcatctgaaggaaaaagtatgttttcaaagatttcagggaaatttgctacaatatccaaaatctgcttcgatcttgactttttccttaatgcaggagccttcttaacccgaatatacagcccaaaagaaaatgggcaacccattcagagaactctggaaggtgcacgaacataaaatttgccaggcagcctccccagctgttcacaccaacttaagactcatgtaaacaccatcagacacggtawcgcatacgctgtcagaggggaaagaaatcagtagaatctttctggacagcaatttggaactttatagtaaaagctttgaaatattcatacctactaattctgtgtttagaactctaagacttcaacaagatgtaaagataaagatacgtactgcaacttacattaatatatttatatttacagaagcaaacaggaaacagccaatggtcaacagcagagctatcataaatgataaattacagctttaagaataattttatcaagaattcgggctgggcgcagttgctcatgcctgtaatcccagcactttgggaggccgaggtaggtggatcatttgaggtcaggagttctagaccagcctggccaacatggtgaaaccccatctctactaaaaacacaaaaattagctgggcatggtgttgcacacctgtggtcccagctactcgggaggttgaggcaggagaatcacttgaacccaagatggggaggttgcagtaagccaagattgtgccactgtattccatctgggacacagaggaagacatggtctcaaaaaaaaaaaaaaaatttggtgacatgcaaaaatgttgatacattgtgaaggttaaataagcagcatatataaatatgcatatttatgaaatttttttttttttttttggaaacagtgtctcactatctcacctaggctgaagtgcagtggtgtaatcagggctcactgtagcctcaacctcctgagctcaagtaatcctcccacctcagcctcccaagtagctgggaccacaggtgtgcactatcacgcccagctaatttttggactttttgttgagataggggtctcgccatgttgcctgggctggtcttgaactcctggactcaagcaatcctcctgacttggcctcccaaagtgctgggattacaggtataagccactgcactaagtccagtgaatcattttccagacaacatttactgaatatccgacactgccttccacagacggggaggtttcccaaagaggccgtgctttttgagaagctggcaagataaccctggggtggagggaaggtggcccgcagctgagaccaccaccttactgtccccaaatcctcaccagaggttgctgacacttccctcttccccatcctcatactacttttcaaattagaaaaagtagaaaatgggatgattaggctacctcacatttctaaaagacaccgctgtttcaatttttatagacgccaagtctaaaagggtgtaatcacttgtaaaatttaaatttaaaacagagaaacccccgtctctaaacatttagtttcatctaagaatcttactcaaaactcgaatcctggcctactggggacaggaarcaagtctccagggtcagcgygcccagtacctttcacagcggctttggtctcgatgtggctcagatctgcggccactccgggtgtgtgcgcgatatcatagagggtcaggcggctcaccaaggggctgttcttcaggagaagtgaaagtggctgcccgatgcctccagaggcccctagcacagctactttagcattgttctaaaaagaggcacagagaaaggactcttaggaggaaatgagcatgaaaaggattcacatggtatcctataatgttgcactgggcctctttttactgcagttgccaaagcaagatacaatcattgtatttgtaacagtctcattctggaagaattcaggaccttcattccaaaggtccactttcaaatggggagaatttatgtctgtagagtctgtgatactcagggtacttcaaaaccctcctgaaagatgaagaacaagctggactccatcaggcagctggactggtaacagcagccttcccttcaacctgcagctttataaactataaacacacactgagtgcctagcaacaggccctcccggtaactgaggttgcaggaagatccctgctggctctgtaggagacaggtaatgagatgcattaggagcagggagaacactgtcacagaagccccttgtgcaagagggcagatggggttgcggcaatcaactccctgcaggggtggggaatcagagaagattcatccaggcagcaaacttgtggctggagcctcaggcaggacraggagctgcctaacaagaggtggaaggggttacgtacgttgcgaaagactccaaccctcctggtgagtcagatctgtcatctcsggctccagtatctcacactggttctccagcctaggtgtgcatcagagccacctgctgagctaatgaagcccactcaggactaggctcctggaagcgggatggggcttaggccttggcatttttgccattttccccagatgattttgataccaaacagtttgagaatcactgtttcataccaggctaatcagaagaacaggcagcaaagtagcagctggccctgggcatttcagcttggaacagttaggaaagtgatggggtgaaagtgacccggccccgcatccagcaatcactcccgttattcgaaggcactcttcccctctaggtctcactcaaggtctgaccaaaattacagccatacccagggagcttgtttctgatctaaactcacaaatgagaagcacagccgatccctggcaggcaggcaggcaggcagctaccagtgagggaagaggcaaacaaagtggcagacacgggaactctcggcaccgtgtgtggtcatctggggcctgacagcatcactgcacagtcttctacagtagctgaggccagctaataacaggctttggttatcagaaaccaaaaccmaacaaaccaaaatccgaatcaagacgcttacccagtgggtttctgctcaggaaattaaactgtggaagcatatacaaccaacatttgaattcaaacaggtttttgagtttcaagttggtgctttaaaggtgaacccctggctgcctggaaacttgaacctgtcagacccgctcagaacctgaggtcgggcaggctcagcctcacccacttctggatcttcagctctcactcccacatcttgtgtgagtctcagggactcccaaatcccagctctgcattcccagttctgttaggcgttccatkggttccacaaactcaactgtccatttatcctgcccccctccctccatccctggtcccaaatggcacttgtgttsactaaatgtaaacttctagaaccatcttctgccacctccttcttatcagagacatcaagtcaggacatgaagaacttggcagctcaaccaccctcccaacccgctcctcctcttcattctattccgttatctaacttaggtactcagcaacacctccaaagcatgctttcccaaaatcaaagtcttaatcatttcactctcgtgctcaggctggcatggtggtatrcacctgtagtcccagctactcagaaggctgaggtgggaggatcacttgagcccaggagttgaggctgccgtgagccatgatggcgccattgcattccagcctgggaaacagagcaagattccatctctttaaaaaaatatcttctgggctgggcgtggtggctcacacctgtaatcccagcactctgagaggccgaggtggatcaccttaagtcaggactttgagaccagcttggccaacatggcaaaaccccatctctactaataataaaaaaaattagccagacatggtggcgcgcaccggtaatcctagctactcagaaggctgagacaggagaatcgcttgaacccaggaggagatcacaccactgcactccagcctgggtgacagaccaacagtctatctcaaaaaaaaaaaaaaaaaaatcttccaaagctttcatgcctccatcactcagccagggcagtggttccacaggggagtggccaagacaatcccaccagggtggaggatgaaactgctgcaatgagtgtatctttttttttttttgagatagggtctccctctctcacccaggctggagtgcagtggtgcgatcttggctcactgcaacctctgcattttcggttcaagccatcctccccaccttagctgtagctgggactacaggtacacaccactcattttgtagaaatgaggttttgccacactgcccaggctggtctcaaacttctgagctcaagtgctgggattataggtgtaagctaccatgcccagactgtctctatctttatctaacaaagaattaatctctaccaagaaatggaccgacctgtgccctcgctagsgtgcttaaatggatgggtcccatgtgtacataaggtgaacacaacatgggggagggaggggaagaagactgcctcactggtttctttgctttcactttgtcaaggtgatgtcactgtttgtatattacaggatgtcaccaacttaatttttacaaaaccacaatccttaagtagtataatctttacatgctttgcaatgagatgaaaatctttggtggcccggaggttagatcatgatctccttgtcaaagagctgtcttccagacccgctgacctttgctgggtggcagagtggctatcaacagcacactgcttggcaactgtgttgaaaaccgacatatgttaacactgccttyatttataagttttaacactttataacgtgttatggtttgttttaaaatttctacttgagtttatattgtaatgtatatattagtacatatacctataagtaaatacattggggctatgtgcttcctacgcttttactgttaaagatacaggatccagctaggcgtggtggctcacgcrtttaatcccagcactttgggaggctgagatgggcgcatcacctgaggtcgggagtttgagaccagcctgaccaacatggagaaaccctgtctctactaaaaatacaaaattagccaggcatggtggcgcatgcctgtaatcccagctactcggaaggctgaggcaggagaatggcttgaacctgggaggcggaggttgcggtgagctgagatcgcaccattgcactccagcctgggcaacaagagcggaactccgtctcaaaaaaaaaaaaaaaaaaaatccaaagtctggagaccactgcaccatgggctcaagcccatctttctttctgctttcatcagctgccttctcaacaatgtcgcttgtatgcccaacaggcattttaaattgaacatatcaaaaactgagatcctggccgggtgtggtggctcacgtctataatcccagtaccttgggaggccaagacaggtggatcacctgaggtcaggagtttgagaccagcctggccaacatggcgaaaccccatctctactgaaaatacaaaaaaaaattagttgggcgtggtggcagcacctgtaatcccagctactcaggaggctgaggtgagagaaccacttgaacccaggaggcggaggctgcagtgagccgagatcacgccactgtactccagcctgggcaacagagcgagactctcagtaaataaataaaaactgaactcctgatatcttctccctggttaaacccactctcttctataagtcttgcctatttcagcccaactccaaggcccaaaaccttggtgtcatccccgaccccttatctaatcacacatcagcaaatccttctggtaccatcaatgaatacccagaattcaatcatttcttaccacytgcacctagataaccacaatgaactcctaacctacctttctctcactcctaagaccatcttgttaaaatggaaggaagagcaagtcattacgcagctgaaaaccctcaactggccgccccatttctgagaaaataccaaagttttacaaggcctgttctgttacctccactgccttctctggaactaccctagcctcattttctcaaaccttcaaggcatgccccatgcttctccaagggctctcagctacatcctgagacatatcccttacctgcaatactctttccatatgatgtgatctctgcttccttcagactttactcaaacatctcactctgcgtgaggcctaccctggctgatgtaaaactgctaccctcggctgggagtggtggctcacgcctgtaatcccagcactttgggaggccaaggagggtggatcacttaaggccaggagtttgagaccagcctggccaacatggtgaaaccccatctctactaaaactacaaaaattacccagctgtcgtagcccttgcctgtgattcccacctactcgggaggatgaggcaggaggatagcttgagcccaagagttggttgcagtgagccaagatggcgccactgcactccatcctgggcaacagagtgggactctgtcaggtccatcctggccaacatggtgaaaccccatctctactaaaaacacaaaaattagctgggcacggtggtgcgcgcctgtagtcccagctattcgggaggctgaggcaggagaatcgctccaacctgggaggtggaggctgcagtgaaccgagatcacgccactgcactccagcctgtcgacagggcgaggcactgcatcaaaaaaagtaaataaaattggtaccctcttccctaacacaagcaccctacaatccccatttttcttgcatgttcatcactattttaagatactttataatgagtggggcaataagtaaaatatctagtaatttccgtgagagcagggacttctgtgttttgttcaccgctgtatttccagtacctagctcaataaatatgtcggatatctgaaggtcctaccaaaactcaacctctccctggacacccctgtcctctctttggttggctgcccctcccccacacctcatccctcctgtcctgtttactcattccctaagaccttcatcgcctccacctgtcctaagtttactcattccctaagaccttcatcgcttccacctgtcctaagtttactcattcctgtcccatatcaagtgtcacttctcacttatyttggtatcccctgcagcacccagcatagttgttggcaagcacaggtacttaatgtacttatctgtatacagctgggcccccacttcaccgyagcgcaaaagcatttggtacattcaacttacaatggggttgcctgtgggaacccattgcaagttgaaaatacacaaagttaaactcgccttttgacttaggatattaccaacttgcgatgggtatgggaagtagccatcaatccaggagcatttgtatttatttttcaaatgaactggatgtacaggaaactcgagaacttcgatgataaatttggattcccctttaaaattacctccctcttgggcgtcgtaattaaaaggcaatgcgagcacctcctgggttctcaaaattaggtttaattagattcacctggtaaaaatgcggacccccccccccccgcagtcttaagcttcttcaatgaacccagacgtctgttttttattagctttctggtgattctgacacactgcagagtttaagaaccaccattctagaagatggctaaaaatagcctaggctcctaggcttaagtggtcgcgggccaagtcaagcactgttaagacacctggcggcaggctcagtccgcccacagcaggagagatcctccaaaaaggttaagaggaagccgtcttcaggtcagaagcgctgaattctaatcctctggccaaatgactgtaaccctggcccagttctctagcctcggtttgtccatactatggaattaggaagtatacgatttcttttattcacgcacaactcacacggatgctgcaaggagattagctacgtcaaagcaatggaacgctgcagaaaaaaacstaagtttactttcagatgcagagccctggtttcccaaccttgaaggcgtgcaagccaagagcaggtcctctgggmaatctgggagacctgggggaaccctgacaaatggaccggccctggagcgggactacctcgccccyttttccccggctttctcccccgcacctccaggccagtgtcagggcctgccccgggcgccacagtctccagccagtgccgggcatccctgcggtccaggctggcctggagagggtcagagctgcccgcgaaccggggacgcacgtggcccgggccggggggmctccgcctgcaggccgcccctcgtctggcctacctgggccgaggtgctgaagctgcggcggagagcagcgctgrcaggccgggcgagggcggagagcatggctggagcgggaggggcaccgactggcaggcacaggagctggtgacggggaagtgactccaacgacctccacactgcccagcgcctgctctctggggcctcgcgagagtgaccggacttccggtcgcgctcgcctccgggatctcgtgagatcacggccacttccgggagtcggaaaggaaagctgtgggaccatcctggcaaccccggtgtttggctgggttctagcstagccgtctgtgtggccggtgggggacctgcgrtcggagtgggagggccagtctgcacccaagaggtggaagaggacgggctttaggctggaagcgccttagaggagccatttttccaggtggggccccaggcagaggctccgacagggagcctggccatagtcgcgcagccggggaggtggakcgcgtcccagacccragcccycgacctcagccaaacccattccttctgyccttggaggccagaggggactctgagcwycggaaaggtagggtcagggaggctgagagtccttaggcggggtgggaggaaggggccatctcctcagatccgggccgtcgtttcccaagttgcagagacccttgggttcaggtttagtgacaccactgctgataatggcgacctccagccctgcaagctttagaggaccactattctgtgttccagatgagcaaataggttgtagggacaacaacttccgtggtcatacagttcctgtcttctctcgcctgcccggcagtgctctgacggtcccactgtttctgctttacgaataaagacactgtggctgaggccaagtggatttgtagagtttacgcagacagaaagtcgagtagaattccttgctcacaatgagtttattacttaaatgtatgaatttatttatttttttgagacggagtctctctagcccaggctggagtgcagtggcgcgatcttggctcactgcaacctctgcctgtcaggttcaagtggttctcctgcctcattctcctgagtagctgggattagcgcaccactacacctggctaattttttgtattttttttagtagagacggggtttcaccacgttggtcaggctggtctcgaactcctgacctcgtgatccacccgcctcggcctcccaaagtgctgagattacaggcgtgagccaccgcgcccggcctgatacatatttttaaaattaaacaacacccccaggcaaggtggctcatgcctgtaatcccagcactctgggaggctgaggcgggccgatcacttgaggccaggagttcatgaccagcctggctaacatggtgaaaccccatctctactaaaaatacaaaaattagcccagcgtggtggtgtacacctgtagccccaactactccggaggctgaggcaggagaatcgcttgaacccgggaggtggagggaggttgcagtgagccgagataaccccactgtactccagcttgggcgacggagaaagactctgtctcaaaaaaaaaaaaaaaagccgggtgtggtggcttatgcctgtaatcccagcactttgggaggtcaaggcgggcagatcacctgaggtcaggagtttgagaccagactggctaatgtggcgaaaccccatctctactaaatatacaaaaattggctgggcatggtggcgtgtgcctgtagtcccagctactcaggaggctgaggcaggagaatcccttgaacccaggaggtggaggttgctgtgagccaagattgtgccattatactccatcctgggtgataagagctaaactccgtctcaaaagcgcgcgcgcgcgcgcrcacacacacacacacacacacacacacacacacacacacacacacacacacacacacacacacacacagcagataagctgagacatgctggaagagtaggtgtttctcaatggaacattcaactccagaggagggaaagatcccttgccttggaatcagaattctcaaaggaggggcactagggcctgagcatttaacaatgggaaatgtttagacaggaaaggaggagaaaaaaggccaaataaaatcctagcgggaaaaaataagcataggccagtattcargggacagtgaatagatcatttattttggagtggggacattagggcaagcagtgtcctttgtttatcttatcactgactgcatcttctggtaattatttactcctctgtcttgtaactgagagcacctcagagccaggtattaagtcttgccaggtactaagtctttcttctgttttttttgtccaacatgcgactgggctgaaagggcctcagtgaatttgtggagagttgagtggttttaggtacagctggaaacagcaggttgggaaaaactagattgtgccggtcccatgaatgttagctgagaagtttgtatttcatttcttgggaagcaagtgtttatcaaaggttgtttatttatttgagatggagcctcacgctgttgcccaggctgcagtgcagtggcgcgatctcggctcactgcaacctccacctccrggttcacgcagttctcctgcctcagcctcccaagtagctgggattacaggtgtgcaccaccacacctggctaatttttgtatttttagcagagacagggatttgtcatgttggccaggctggtctagaactcctaacctcaagtgatctgcccgagtcagcctctcaaagtgctgggattataggcgtgagccactgcacctggccaatcaggcttttgtgacactgccagaactgtgtttgaggaagattagactgaccttgtatgctaagaattcccaggaaaaaaaaaatggagattgtttaggaatctattcagggagattgtttaggaatctattttatggatgacaaaggtctgaattacggtggtggccatagaaatggagtgggtagggccagtgtgggagaagtctcatgggaagaatgggtaacagtctgtgctcatctgggtttgaggagtgaaagaaagaggtgtggaaaatacataaagagggaagtcgggttatacaaaggagaggagaaaaataaaggaggttataccaaaggagaggagaaaaaataaagagttccgttttagatgggcttaattgggagttatgctgagttgtccatatagacctttcagtggtatgggccgtgttcatgcctgtaatcccaacactttgagcagccaaggcggacgatcacttgagctcaggaattcaggaccagcctgggtaacatggcaaaaccccatctctacaaaaagtacgaaaattctctgggcgtgatggtgtgtgcttgtagtcccagctacccaagaggctgacatgaaacaatcgcttgagctcaggcgatcgggggaggtcaaggctgtagtgagccatgattgtgccactgcattctgacatgggtgacagagcaagatatgtctcatttaaggggggaaaaaaggaactgtgggattgaaactcaggccagggcggaagtcacctctgtagagggggagagttgagaccatgagcaataaactggaatcacagattgtcaggctccctcccacatctggaattcagtttcctccacatccctcccaagtcctcatctccacagaagaggaactcgctacctcccaagccttctacttgggccatcccaaacaacttgactgctagaaaagcctcacatttggcccagtgcagtggctcatgcctgtaattccacccctctggaaggccaaggtgggaggatcgcttgagcccaggagttcaataccagcctgggcaacacaggagaccctgtctacaaataataaaaattagccaagcatggtggtatgtgccagtggtcccagttactcaggaagctaaggcaggagaattgagcctgggagtttgaggctgcagtgagctgtgtttgcaccactgcaccccagtctgggtgacagaatgagaccttatctcaaaggaaaaaaacataaaaagcctcacactcagctcctatctgcctctctctaaggaaataccaaggtaattaacaacagtcttattggctgctgtatgaagcactgtgtggtaggcattgattttacttggtgttttgcaagtgaaacttatattaaacaagcagggtttccacagtcaagaagtagaattcaatcatgcagcagctttctgtctttaaatctttgcttgcccttggattgtgtctggttactaggacagacttactgtccagttcatgttaataatcaaaactaggaatttaattcaaaggtaaagctgcttctcttcccctctcaagctttctttgggctcccacatttgaggaggacagtagttgacttctgtttattttgtttcctcttccatcccaccccagcccaggccaactatggcttctgaggcatcctgtgttggtggagggggttataagagagtagagatggggcaagaaaagccccttcgacatctggccttgttactgtctcagcttgatgggaatttgtaactgactctcccatgcagtgcttctgggggtctttcttacctccagttcccatgatcaggtggccatctcagtcttgctgcttcaattcctccctcagcccctggcttctggaatcctccaccacatgccattggtccattttccctctcggtggccctcttgggcaaagttcctttaaaatggcttctcggctgggtgcggtgactcacgcctgtaatcccagcacttcgggaggcygaggtgggtggatcacctgaggtcaggagttttgagaccagcctgcccaacatggtgaaaccccatctctacaaatacaaaaaattagttgggcacggtggcgggcgcctgtaatcccagctactggagaggctgagacaggagaattgcttgaacccaggaggcagaggttgcagtgagccgagatcatgccactgcactccagcctgggcaacagagcgtgactccatctcagaaaagcaatactaataaaataaaaataaatgagtaaaatagctactagttggccttctcccctgcctggtccatatctgatcaacgggaaacacttaggtatcctttgccccaacaaattctgggggtgcaggccatttcaaatgcagctacctcttcttgctttgccaacagctcgccagcctcacgccagcctcagatttccagcccaaggcctattaccagcctctgtgcctgcacaagcttcagagggcacaggccaagctaccctaggggctggcttctggtttcattaattgttccaagaaagcagagacttgtgaatgtttggaatcagaaagatgctaatagggagagctttgagattctgaaaggagaacaagagagattaggtgaaattgtatgagatcagagggtgcttatcccttggactgtggagaaaagcacataagggccggctgcagtggctcatgactgtaaccccagcactttgggaggccgaggcagatggatcacctgaggtcaggagtttgagaccagcctcgccacatggtgaaaccccgtctctactaaaaatacaaaaaattagccgggagaggtggcagtgcgtgcctgtagacctagctacttggaaggctgaggcaggaaaattgcttgaaccctggaggcagggttgcagtgagctgagatcgcgccgctgtactccagcctgggtgacagaatgagactccatcttaaaaaaaaaaaaaaaaaaaaaaaaaaaaaaaaagcacataagggcacccagggagcagttggtggaggagggcgactcacagccagtggccttaactttcccaggcaagaatagaaaattagagaagttgctcccaaagaggatttggtttggataacagttgtgatcactgggaaaatgctggtcaaatgtggaaaaacaagagtgggattagctagtggctatgagggccaagctgaagttctgtaatgtgtacttgctgtgtgcccaagtccacatagttttctacagcccagaccccataccaaggtcacagacatatacacagactcacacacatgcgtacatgcacacacatgcacctgcagattcacatcctggaacacttaaacacatcaatctcgacaagggaattatttattgatctacggttttcatacagtgaagtatataggtctcaagtgttcagtttggttttgacaaattccacccttgtaacaaccacccaaaacaaackataaaacattgccattattccagaaagttctctcatgctcctttccattcatctgccaagacagctatttcctgatttctatgatcgtaaagttgctttgcctatttgtcatcggataggaaaatatacaaatacattgacagcctgtcttagtctcttttctgttgctgtcacagaatgcttgagattggktaatttatatagcaaagaagtttatttagcttactgttctggagkctaggaagttccagattgggtagctgcatctggtcggcttctggtgagggctgcatctgcatcataacatagtggtggagacagggaattaggcgtggaaaagggaaaatgcaagaggaaaccttgctttatmacarcctgctctcaagaactagtccattccctggagaagacattcatccatcttaatagccaaatcacctcttaaaggtaccacctcccaatactaccacattggggaccaagccttagcatgagttttgctggggacaaaccatattcaaaccataacacaccctcctcaccccacccctacacacccacatgtactgatcattttgtaccttacagtgggcttatatcacaatcatgtgctatcagattttggtattaggtgcacacattatatactaacctaccttctcttcaactctaaagtcatagatcaagtgaagtattttactattttaatttagttttttttttttttttggagatggggggaggttctcactatattgctcaggctggtcttgaattcctggcctcaagtgattctcccagctcagcctcccaaagtgctgggattacaagtgtgagccaccacgcctagccaagtgaagtattttaaaccgctccttttggatccctggagctaaaacaaagggttagaaaggtggttatcatcctgccttgcctgggagttttcctcatttttctgtagctgctctaggatattggaagttggggacatgtatttttaaaacagaaccatatttagataaatagctttttttttctttttcttttcattttcttttcttttttcttttttcttttttttttagctgtgttgcccaggctgaagtgcaatggcacgatttcagctcactgcaacctccgtctcccaggttcaagcgattttcctgcctcagcctccggagtagctgggattacaggtatgcgccaccacgcctggctaattttgtatttttagtagagactaggttttaccatgttggtcaggctggtcttgaactcctgacttcacaaacctcctgcctcggtctcccaaagcgctgggattgcaggcgtgagccaccgtgcccagccttagataaatagctttaacttttatttgggcctcctacctgctggaagtcaaaggagttggctttccaggataggtcccagcagaacaaccgggaggtgttggactggccacagcagagccaccaaggggcttccaagagctgagagtcgctgattgtggcagatctgagtctgcagtgaagccttctgtcaggcagaccagcctgaggcctgagaagggagagcaaagccaggtcacagcctggtcagggccattaactcatgtcagagaagtggaaggtggggcctgagcccaatcagggagcagaggaaaagcaggccccagagacagagtcggaggaagtgagccaaaggtggtggtcaccgtctttggagactgtgctgtagtttccagaccccaccaccgcctcctgacagcctagttgccgtatgagcagacctgttacccttacaggaccactagggcacctctcaggggtctagcaggcttaggtttggggacatggaattgatagcaagatctaaggcaaggagcagggatgtggacggctggatctaggcctctgatccatacctgctctccctaaaatatagaggtactagcgatggaggccaggcgccgtggctaatgcctgttatcccagcactttgggaagttgaggcaggtggatcacctgaggtcgggagtttgagactaagctggccaacgtggtgaaaccccgtctctataaaaatacaaaaattagcctgtcatggtggtgcatgcctgtagtccttgctactggggaggctggggcaggagaattgcttgaacttgggaggcgaaggttgcagtgaggtgagatcacgccactgcaccccagcctcagcaacagagacactgtcacaaaaagaaaaaaaggtgatagtagatactagtgatgatcaaggcaaagttaggaggttatgatggccctggtctcctcctcctcttccctctttctttcttctgtgccagtgggacctggtgtccctctgagttaagagacagatttcaggcccacttctgcagcctccacagctctgggggtgttgtgacctgggactgtattacccagctttgtcaaggttcaggccacagagaatgtgtcaagctgggattgaggaaagactgtaccaaatcccttaagatcctgacccttggctgggcgcagtggctcacgcctgtaatcccaccactttgggaggctgaggcgggaagatcacttgagcccaggagttcgaaaccagcctggaaaacatagtggaaccctgactctacagaaactaaaaaaaattagttggccgggtgcggtgactcacgcctgtaatcccagcacttcgggatgccaaggcgggtggatcacgaggtcaggagttcgagaccagcctggccaacatggtgaaaccccgtttctactaaaaatacaaaagttagctgggaatggtggcacatgcctgtagtcccagctacttggtaggagaatcgcttgaacctgggaggcggaggttgtggtgagccgagatcgcaccactgcagtacagcctaggcaacagggcaagattccgtctcaaaaaaaaaaaaaaaaaattaggcatgatggtgcacacttgtagtcccagctactcggaaggctgaggtgggaggctcacttgagcccaggagtttgaggctgcagtgagtgaygatcgcgccactgcactccagcctgggcaacagagtgagacgctgtctctaagagaaaacagcaaaacaaaatgtaacccaaatatgacaagagttagttagctcgccttgaggccattctcaagaatgtcattcaacggtggctcacgcctgtaatcccagcactttgggaggccgaggcaggtggatcatgaggtcaggagatcgagaccatcctggctaacacggtgaaaccccgtctctactaaaaaaaaatacaaaaaagccaggcgtggtggcagacgcctgtagtcccagctactcaggaggctgaggcaggagaatggcgggaacccaggaggcagagctcgcagtgagctgagatcgtgccactgcactccagcctggggtgacagagcaagattccgtctcaggaaaaaaaaaaaaaaaaaagaatgtcattcaattcccaaacataaagcaggtcctgacagcctcgaagtcacataacgagtagggaggtttttctgggacgacagaggagaggctcatgtcatcccacagaaccaaacacccccacattccttcagacctctctgttcttccccattgttctcttccggaagcgagaccctgtctctacaaaaaaataaaaacttagctaggtgtggtggcatgcacctgtagcctcagctactcaggaggctgaggtgggaggatcgcttgaggctgcagtgagccatgattgtgccactgcacgccagcctgggcaacagagtgagcccctgtttcaggaaaagaaactgagagggtaggagtaaaggaatttcctaagctactgccatgtgtcaggcccactgctaggcaatttatatcatttagctcttgaatgatcctatagctttgccagtgtgtattatctcagcttacaggtgagggcattgatgcctgtcactatgtttaagccttggtcatgctggcacagcctgagcttcccaccgcgaaccagaacagcggtggggattggctgtggaccctgacccttacctgggctggtcagcttgagccagagtctcaaagtgaagctcatggtctggcttctccaggatcatcaagtgttgtctcttcaccagaagcaaatgcccatcaattgtgtccacctggactgtctkgggggttagggtggcttggcagttgagcgctgggtcaagcctgcagtatcctcgaactcctacaagaagcctgtggtcaggcccagcctctgacacctccaccgtcagtcaggatggaagtcccctgggtgttgagcagacacagggaggcagggagatgagctggatctggctgggtccctgcttagtcacaggctctggcaacctctaatgaaacatcccttcccagttggctgttttccccaaatatagacacgtgctgtcactagaggggagcttcccagcccaacagcttctggaccatgctgggctgacttggggagagagccacccacgaacccctggtttgaaggccagactaggtggtcatatggaaggtgacagaccttccccctggtgggtgtactgtgtgcagggacaaagcctgtgctagcaccctgctgtcttgacagtaagtgtctttgggctgggcatggtggcttatgcctgtaatcccagcactttgggaggccgaggcggacagatcacctgaggtcgggagttccttctgccttggacacccaaaatgcagagattacaggtgtgagctaccacaccccaccaagggtctcttaagaagagctggccgggtgcggtggctcacgcctgtaatcctagcactttggtaggccgaggcgggcggatcacgaggtcaggagattgagaccatcctggctaacacggtgaaaacccatctctactaaaaatacaaaaaattagccgggtgtggtggcgggcgcctgtagtcccagctactcaggaggctgaggcaggagaatggcatgaacccgggaggcrgaggttgcagtgagcagagatcgcaccactgcactccagcctgggcaacagagtgggactccgtctcaaaaaaaaaaaaaaaaaaaagagctatactgtgttgaaagagtcctgtataaaggaggatgtcttaaatttgccattttgactctgttttgaacaggtcaccaggaaaatgagacttggtagcctggcgaggtggctcaaaaaaaaaaaaaaaaattcacatggaaaagacttgatcttgggataaataaatttaatcaaaattgaaagtgaaaaaaattgaaactggctaattgtgacatacagaaaatcaaggaattaaagtggcttaatggattcacaaaggaaaatacttttggcaaaaactcatctatattactttaatatttttatgtaaatgcacgatacatcagaatatccttgagggctcaaatggtggagctaaggacagctaaactctccagggaccaggcgtggtggctcacgcctgtaatcccagcactttgggaggccaaggcaggcagatcacctgaggtcaggagttcgaggccagcctggccaacatggtgaaaccccgtcactactaaaaatacaaaaattaactggacgtggtggtgggcacctgtaatcctagctactcaggaagctgaggtgagagaatcactcgaacccgggaggtggaggttacagtgagccgagatcatcccactgcactccagcctgggggacagagcaagactctgtctcaagaaaataagtaaataaataaactcttcagggttcagaatagcaccaaatgggatggttacttgtgctcagtcctcaacttacccaaggctagaggtgccctaatttcagttcacagggatgcatcttctcttggaatcatgctgttaggttcagggaccgatctcatccttccagcactttaccagtggatgaggggcagttcctgcttgaccaggtagagtgctttgagaaggagaaggatctgcagaaggagatccttggggctgggtttttatctataggaccagagatgattctttggctagtgagtaaggagatagagttagcaatgggggaaagtaggtagtagctgaggatgggtatgagccatagaccagatgggttaggagccagcttttagttttgcttaatgaggttgtaggactagacacaaagcccacttctctcctctatacttaccactgccaaagtggcctggctttcagaggcagaggatgtggaacctgacttggsgggtgggagtgaggagatccttaagaggaatccacacgtggaaaaagtatgatggcaggtccagatggcggtgttgggaaaggccataatggtaactgacaataatgtattcattccacatgtgttcattgactattactttgcagcatgtaaatctggggtattgggtgaggacctagcagtggacaagacaggcaagaccttccctcagaaaccaggagacaataaacaagcaaataagcacaataacttcaggtgatagtgaggtgaagacaaggccctactcagattttaaagatttcccggactattatgtgaagatgaaactggagggaggaaggaggaagcaagaaatccagttgggcactactgcctcatcaggagagagattgtagtgtcctggaccaagatggtacccctggagatggagagaagtggatggacttggaatacatgaaggaggcagagctcagagactggatgtgagggaaaggggaatgaggtcatcgggcccaagcaactgggtggatcatggtgctgttgattgagactgagaaggctaaatgaggagcaggtactggaggtgtgggcacgagagcattgaagttgtatttcggccatgctgtatttacgatgtctaccaggcacccttctagagtctgcagctcagtagacaggtcaaggtgggataaaatttgggaatcattggtatgtgtgtggtattcagggaactggatgaatcactgtgactctaggtcttagagtgttggtcctcagctacgggtgatcttgcccccttcttccaggggacccttagtgatgtctggagatactttctgttactggtgatgggaagaggtacagtttgcttccggcatccactaggcagaggccagggatgccactcaacatagcagtgcacaggccagctccccacacatagagttacctggccccggacgtcagtggtgtcaaggttgagaaaccccctaccctagagtgagtgtagataaagcagaaaaaaaggaaagtaagcccgggggcattcttccatgcagagctggagaggaacagtctgcaaggaagaagggaagcttggagagtgctttttcttgggaggggagagtgtctggggaagaaacaatgctcagccgtgttacatgctcctaagaggctgaggcgtttgagcccagagggaagtgaccaatggcttaggcaagatggacattgttgatgactttgatacagagcagtctttgtggtttggtagggttggaagctccaggggaaccagcctgggcaacatagtgagaccccatctcttaaaaaaaaaattagccggccatggtggcatgtgcctgtagttccaattacgtaggagtctgaggtaggaggatcacttgagcccaggaggttgaggctgcagcaagctatgatagtgccactgcactccaacatgggcaacagagcaagaccttgtctcaaaaaaaggcagcagctccaaagaagtaggttatgcccatggccagtactcactgagtatttcctccctgcttagaatgcctgacaaatgtgacttcatgaatccacatacaccaggcaggtactgtcaccctcattatatagaagtggcaatattattctcacccccattttacagaggtggggactgaggcacagagaagctaaccactccttagggccaggcagctgatagtraatcgcagagccaggattcagacctaaaagagtttgactccagggacagcataattggaggtgaagaagtggaggcggtaaatgaaacaccacgcttttgagagatggtgtttctctttccacgcttctgctggaaagaagaacagataggtacaagaggatgtttgcatgtcaacaggaaggacccatgtggaggctgaaactgatgatgctgtggagggggtgctgagaactgaagtctttgaggaggtgagaaggatctgaggtttaagttgaggtgctggcatttcccaggagcatcgtctggtaactctgaagtggagcctaaccgtttagagcaagattacccctggactcaacttctccccttcgccatcccccactggcctccagaggctccactctgctctccttctagccctcttgctaaaagatagctggccaggtgcagtggctcacacctgtcatgccagcactttgggaggccgaggagggaggatcacttgtggacaggagtttgagaccagactgggcaacatagtgtgagacccccatctccacaaaattcaaaacttagccgggcatgatggcatacgcttgtagtcccagctactcaggaggctgaggccagaggattgcttgagcctgggagtttgtggccgcagtcagccatgatcacaccaccgtactcaagcctggatgacagaaaaagaccctgtctcaaaaataaataaaataaaagccttcctacaggaagctcctgcacaggcctgacccttccagaaacaattgggcccaggagccagtgtcccaagagcagctctgccaactggagcccgagcctagctctggacacatcagtgattctccacccaacaatgactgtcgggatccttaacgtagaggccatctgtgttggcctctgcagtgtcatcaaaggagccacaccaggctcctttgaactctcttaggtactgcacttgcccctgctccaagcagaatgttcttatcctttgtttcgtcctctctccccctccctcttcctcttgcccaaccttctgtctcagtttagcagtcacatcctcagacaacccttttcccattcccccaactaggtgagaacctcctgttaggtactcctgtcacaatggatcctacttgtttttgtttgtttgtttgtttttttgagacaaagttactctgtcacccaggctggagtgcagtagtgcagtctcagctcactgcaacctctgcctcccaggttcaagaaattctcctgcctcagcctcccgagtagctgggactacaggcatgcaccaccacacccagctaatttttgtatttttagtagagacggagttttgccatgttggtcttgaactcctgaccaaaggtgatctgcctgcctcagcctcgaaaagtgctgggattacagatgtgagccaccacgcccagctgatcctcctcctyctttttttttttttttttcaagacagggtctcactctgttgcccagacgggattgtggtggtgtgatcacggcttactgcagccccacctcccagcctcaagtgattctcccacctcagcctcctgagttgctggggccacaggcatgtgccaccacacctggctagtttaagaatttttttttttttttagagatggggtctcactatgttgtccaggctggtcttgaacccccagcctcaagcaatcccccctaccttggcctcctgaatagctgggactataggtgtataccaccatgcccagctaatttgtattacagggtcttgctatgtggtccaggctggtcttgaattcctgggatcaagtgatcctcctgcctaggcctccccaagtgctgagattgcaggcatgagtcactatgcatggccctgagatcttttatagtgctcttgcatcttgcaattctttctgcaagtgtctgcattccatgctagactataaccttcatgaaggcaggttttgtttaccacagttatttccagtgcctgggacatagtaggtgctcagtaattatttgctaaataagcaaatgaactggcagctgttttacagcccatgtggtatgtatatggctcagataacgttgtattcaagattttattctctgcccacatttcactacacatttttttttttttttgagatggagtcttattctgtagcccaggctggagtgcagtggtgcaatcttggctcacttcaacctccgcctcccgggttcaagtgattctcctgcctcagcctcccaagtagctgggattacaggtgcctgccaccattcccaggtaatttttgtatttttagtagagatggggtttcaccatgttggccaggctggtctcaaactcctgacctcaggtgatccacctacctcggcctcccaaagtgttgggattacaggcgtgagctactgcgcccagccaactatacatttttgaagccctcctgatcacttccttggttactctcatctttgtttgaagttcaatatattacttttttttttttttttttttttttttggagacagagtctcactctgtcccccaggctggagtgcaatggcatgattccggctcactgcaacctctgcctcccaggttcaagtgattcttttgcctcagtctcccgagtagctgggattacaggtgtgcaccaccatgcctggctaattattattattattattattttagacagagtctcgctctgtcacccaggctggagtgcaatggcatgatttcagctcactgcagcctccgcctcctgggttcaagcgactctcctacctcagccccctgagtagctgggactatagatgtgcaccaccatgcctgactaatttttgtatttttagcagaaacagggtttcaccatgttggccaggcttctcttgaactcctgaccttaggtgatccacctgcctcggcctcctaaagtgctgggattacaggtgtgagccaccactcttggccaattttttttttttttttttttttttttagtagagatggggtcttgccattgttggccgggctggtcttgaactcctggcctcaagtgatccacccgcctcggcctcccaaagtcctgggattacaggcgtgagccaccacgcctggctagatatgttgtatttaagattttattctcctctgygcactatatttcactatacagttttgaagcattcctgatcatttacatgattactgtcatctttgcttgaaggtatgttaaaaaagagtttaattcattatattactttgtggtcattcatctaaaatagagttatgttacccttgtgtgttattgattcttcccagcaggatgcctggtttgcttttatgtgaaccracagagctttacaacatcctgaatcaggccacaaaactctccagattaacagaccccaactatctctgtttattgggtaagtacttggaaaaaagcggaggaggtcaaacacagtgtccttcaaacattatttttgatgagttaacaaacttttggcggggtggggggcagtgaatgactttagaacagggatccctgggctgggtgtggtggcacacgcctgtaatcccagcacttgggaaggccaaggtgggcgaatcacttgaagccaggagatcaagaccagccaggccaacagggcaaaaccccatctctactaaaaatacaaaaaaattagctgcagtggtgcatgcctgtaatcccagctactcaggaggctgaggcatgagaattgcttgaacctggaaggtggaggttggagtgagccgagatttgggccactgcattccagcctgggtgacagagtgagaccctgtctcaaaaaagaaaaaaawaaakaaaaaagaagtccgcaacccccaacccccagtaccagtctgtggtctgttaggaaccaggcagcacagcaggaggtgagcagcaggtgagcaggtgaagcagaagcttcatctgtatttacagccactccccatcgcttgcattaccgcctgagctccacctgctgtcagatcagcagcagcattagattctcacaggagcgcaaaccctactgtgaagtgtgcattcaagggatctaagttgcgctctccttgtgagaatctaatgcctgatgatctgtcactatctcctgtcacmcccagaagggaccgtctagtcacaggaaaacaagttcagggtttccactgattctacatgatggtagaattatttcattatatattacaatgtaataataatagaaatgcacaaaaaatgtaatgggcttgagtcatccccaaaccatccccgccccccagcccactgccctgttccgtggaaaaattgtcttccatgaaaccagtccctggtgccaaaaagattggggatcgctgctttagaaagctgttaagaggccaggtgtggtggcttgtgcctgtaatcccagtgttttgggaggccgaggtgggcggatcaactgaggtcaggagtttgagaccagcctggccaacatggtgaaaccccgtctctactaaaaatacaaaaattagccgggtgtggtggcatgtgcctgtggtcccagctactagggaggctgaggcaggaaaatcgcttgaacccaggagacggagattgcagtgagccgagatcatgccactgcactccaacctggatggggatttagtgtgagctcacttcaaatttgatttcttccttccccttaccatttttatttatttatgagacagaatcttgttctgttgcccaggctggagtgcaatggtgtgatcttggcttgctgcaacctcagcctccagatttaagtgattctccttcagcctcgtgagtagctgggactacaggcgctgccaccacgcccggctaatttttgtatttttagtagagatgggatttcgccgtgttggccaggctggtcttgaactcctggctcaagtgatccacctgcctcggccttccaaagtgctggggttacaggtgcatgccaccgcgcccagccccacatctcaagttttaaactgacaatgactatcccttaactgccaaacaaatagacgttgatgacgacrtaggtcctctgagtagtttggtcgtatgttcctttgcaaattcagttcttaaatacgtttcctttccagatgtccgttccaaatgggagtatgacgaaagccatgtgatcactgcccttcgagtgaagaaggtacatgggcagcgtcaggatctggggcaggctggctaccttgcagtggggtggggaagagtgggaagtttcaccctcaatccagcgggcagcagaagcaggactgtttyctatgtgcccaccgtggtggtcttccacacctctcaccctcacacattttctcaggtgtcctcccatcccccaagaatggtcaacaactccattagacaaatactgatttaatttttgagaccgggtctcrctctgtcatccaggctggagtgcagtggcacaatcatagctcactgcggccttaaactcctgggcttggctgggcatggtggttcatgcctgcagtcccagcactttgtgaggctgagacgggcagatcacctgaggtcaggagttcaagaccagactggccaacatggtgaaaccccatctctattaaaaatacaaaaattagccaggtgtggtggcttacgcctgagtcccagctactcaggaggctgagacatgagaatcgcttggacctgggaggcggagtttgtagtgagctgagatcacgccactgtactctagcctgggcaacagagtgagtgttggtctaaaaaatatatatatatctcctgggctcgagcaatcctacgccgctcagcctccagagtagctgagactacaatggggaatgccaccaggcctggctaatttttgtattttttatagaaatggggttgcactgtgttgcccaggctgctcttgaactcctggactcaagccatcctcctgccttagcctcccaaagcgctgggattacacatgtgagccgcctaagcctggccaaatattgatttaattccttgatatgccaggtattgttccagaccctggggatacaacagaatacaacagcctgagttcattgtccctgccgttgtggagctttctttttttgttgtttttaattattttttctgtttttatgtgttgtttttatatatttttttcatttttatctttatttttggagctttatgttgtaaatttttagggacagggtcttgctctgtcacccgggcaggggtgcagtggcacaatcatggcttgaactcctgggttcaatcaaccctcctatctcagcctcctgagtagctgggactgcagacttgtgccaacatgctaattttttttttttaaagacaggatcttattatgttgcccaggctgtcatggaccttctcttctatttagcaaacagacaataaaccctagagataattggctataatccaaagatggaagcatctcccttttttccttcccatcccctcccctcttccattcccctcctgtcccctcttcccttccccatcctgaggagtggacagagccctgcacacagtcaccatgtcccctactgcagcgaaaccttttccccacgcctccagggtgtcttctccctcatgattgtgaagcctggcagcctttgcccaggacccgtctctcccctctgcagtcctgatcaaattctctgccctgaacttggaggttctctttgactttcctggtttcttttctttattctttttttttttcttttgagacagaatctctccctgtcacccaggctggagtgcagtggcacaatttcggctcactgcaacctctgcctcccaggttcaaatgattctcctgcctcagcctccagcctgtagctgggattacaggcgtgcgccaccacacctggctaattttttcttatctttttttgtatctttagtagagacagggtttcaccatgttggccaggctggtctggaactcctgacctcgttatctgcctgtcttagccacccaaagtgctgggattgcaggcgtgagcctggcctcctggtttattttctatctctttggttcaccttcattttctccttctgccacctgaatgtaactgctggtctgtccttgatctccacatctgtcagggtactttcttgccagagatttcactggagcttacagctgcaatgacatatccacatgcaattagcattcctggcaagtttacatctaaaattttgggcggggcatggaggcttactcctgtaatcctagcactttggttggccgaagcaggaggattgcttgagtccaggagttcaagaccagcctgggcaacatagcaagacccctgtctctacaaaaaaattgaaaaattaactcagtgtggtggggcacctctgtagtaccagctacttgggaggccgagatgggaggatcacttgagtccaggaggctgattgcaccactgcactccagcctgggcgacagagcaagaccctgtctcaaaagtaataaaataaaactttgtcttctaaaattcccctttcctccccattcccgctgtacttttccacaccctgtctctgctgctttttttttttttttttttttttttttttttttttttggagacagagtcttgctctgtcctccaggctggagtgcagtggtgcaatctcagctcgctgcacgctccacctcccgggttaacgccattatcctgcctcagcctcccgagtagctgggactataggcgcccgccaccatgcctggctaattttttgtattcgtagtagagacggggtttcaccgtgttagccaggatgctctcgatcttctgatctcatgatccgcccacctcagcctcccaaagtgctggaattacaggcgtgagccaccgcgcccggcctctgtgctgctttttctgcacataactcaataactcagcagggagcatgggcaggctgtatttttccaggatatttccccgtacaaatccatcattattgtctttttgtctttttgtgtttttgagacagaatcttgctctgtctgtctgcccggtgcagtggtacaatctcagctcactgcaacctccatctcccaagttcaagggattctcctgcctcagcctccctcgtagctggggttacaggcacccgccaccacacctggctaatttttatatttttagtagagatggagtttcgccatgttggccaggctggtcttgaactcctgacctcaggtgatccacccgccttgaccttccaaagtgctgggattacaggcatgagccaccacaccaggcccataatcttactcttaatccccattgcaggccttttgctgcaaccgattcagagcccctcatgatgtatgggcctctattcccactcagctctcaagtctgtgcatttctttgattctggcagcacctcctgctctgggcctctgcccctcagcgtctccaattcagactgatagctttttttttttaattttaatttttattttttgagacaaagtcttgctcttgtcgcccaggctggagtgcagtggcgcactcttggctcttgccttccctctctagcttcccagttagcagattgaggccttcagggcattcccagccctagcaggacagaaaggctcccagccccacccccctcccgcccgtgttctcagccttcttagatctgaccacctctgtctccagcctcattcccagtacacttccactctcacctgacaccttagcagcactgtgctgccatgtttccttctatgatgcacatgtatcccatactgtaacttttttttgaaaacagaatatgtcgtactgttgaattttttttttttttttttttgagacagagtctcactctgtckcccaggctggagtgcagtggtacgatcttggctcactgcaacctccgcttcccaggttcaggcaattcttctgcctcagtctcccaagtagctgggactacaggcgcataccaccacacctggctaatttttgcatttttagtagagatggagtttcaccatattggtcaggctggtctcaaactcctgaccttgtgatccgcctgccttggcctcccaaagtgctgggattacaagtgtgagccaccgcacctggccaatttgtatggcttttttttgttttgttgttttgttttgagacagggtctcactctctcgcttaggctggagtgcaatggcaccatcacagctcactgcagccttaaactcccaggatcaagcagtcctcccaccttacccttcccagtagctgggaccataggtgtgcaccaccacacccagctaacttgtattttttgtagagatggggtctcgctatgttacccaggctggtcttgaacgcctgggctcaagcagtcctccctcctcagcctcccatagtgctgggatgacaggcatgagccaccaggcctggcctgatttgtacttttaatatggtagtgtctttttccctaaaagtgggtgtggtgaatatcggttgtttttctgcccaacacctccccctttttgaggggaacgtctcctctctctgctcaaaccatgggtttctagtggtgctctctaaagtaatattctggccaggcacggtggcttaagtctgtaatcccaacactttgggaggccgaggtggggagtttgcttgagctcaagagtttgagacgagcctggacaacacagtgggacctgagaaggcatctgtttactgccttctttttaagtggtggtggtgttcttgttgttttgagacagtttcactctgttgcccaggcttgagtgcagtgacgcgatctcggctcactgcaacctctgcctcccgggttcaagccattctcctgcctcagcctctttggtagctggtactataggcgtgtgccaccacacctggctaatttttgtatttttagtagagatgaggtttcaccatgttggccaggctgatctcgaactgacctcaggtgatccgcccaccttggcctcccaaagtgctgggattacagacatgagcctccgcgcccggccttgttggtttgagacaagtcttgctgtcacccaggctggagcgcagtgatgcaatcatagctcactgcagcctccacctcccagactcaagtgatcctctcacctcagactcccgagtagctgggactacatgtgcacccycccacacccggctttttttgtctctacaaatatatctatatatatagatataaatatataaattagccaagtatggtggtgcatgcccgtggtcccagctactcaggaggctgaagtgcgaagatcatttgagcccaggaattcaaggctgcagtgagcggtgactgcaccactgcastccagcctgggcaacagagtgagaccctgtctctaaaataaaataatatccagaacgctggccacagtgattggtcctgggtctgggatgaaagctgagccaatcagaattggaattagaagaaaggtgtctctgtccagcctggtggtggaattgggaagatgggagtctgagcattgctggggttcgtgacttaagcctctggaggaagctgtctgagaaggggaagtcagtgtggaggggtggagtgggaagcagagaggaagagagcccgaaggaagtctgggctttagggtctctgggtcctaaagccagctgctttaggtttggaaaccggctgcatctttgccttaccctggagtgttacctgccagtaagtccctcttttgtgcacactcctggttaaattgttagtacatcttatgatccatgaggttttttgtttgtttgtttgttttgttttgtttttgttttatttttgtttttttgggacatagtctcactctgttacccaggctggagtgcagtggtgcaatcatagctcactgcagctttgaactccagggctcaagcgatcctcccacctcagcctcccaggtagctgggattataggcatgagccaccatggccagccacatttgatcttctagtctatctcattccttctgctcactcatgacttctgcttctacacactgtctacttactgtccttttttggggtgttttttgtcttgttgttgttgttttgggacagggtcttgctctgtcacccagactggagtgcagtgacacaatcgcagctcactgcagcctccgcctcctgggctcaagtgatccktccacttcagcctcctgagtagtwgggactacaggcgcatgccactatgcctggcatttttgtatttttttttttttcatagagtcggggatcttgctgttgtccaggctggtctggaactcctggcctcaagcaatcctcctgccttggcctcctgaagtgctgggattacaggtgcaaaccactgcatccagtctggtatttctggattcaatctccactgccaracactctccccatgagaaaggatatcactaattcaattgaccatggtttctctgacaccagggtacctaataggctgtggatcagtcagcagaccagctgttctttggtcaggcacttctctctggtccagtcagctgtggtcagcttttctcagaagggaacacagttgtggaggatccttgggatttaacagactctccatccactgtctcagtgcttctgggcctgtgtgtatagtcaggggagagagtgcggtcttagctcctcccagtgctgctatgcagggagtctctgctcaaccgaacctgcccaccaacaggcctctcttgtgtgtgtgtgtttttttttttaagaaaaataatgaatatcttctcccggagtctgtggacctggagtgtgtgaagtactgcrtggtgtatgataacaacagcagcaccctggagatactcttaaaagatgatgatgatgattcagactctgatggtgatggcaaaggtgggttttatgcaacagcagcaagaataatagttaacggctattgaacaaatttgttataggaccaacaggttcatatgcccatggcacgggaacaggccaatgacactgagacagcagggtttgcgtcagaaaaagagcttcatgatcactggataccgagcaaggagatgggaggaggccctcaaatacatttccccaaggagtttggaatggggtttttaaggggattggggagggtgagggactggaaagttggggtcattgattggttgaggaaagggggatgaaataatcaggacgtggaaactgcgttctttggtgagtcagctcctgtggggcccgtcagaccagctgatgtcagtggtttcatcagtacgcgggacctgaaagaatatctcaaagggaaaacagtgttccatgatgttcaagttgtcacctacagagcagttaaggggaactatattcttggccgggcgcggtggctcatgcctgtaatcccagcactttgggaggccgaggcgggcggatcacaaggtcaggagattgagaccatcttggctaacacggtgaaactccgtctctactaaatacacaaaaaattagccgggcatggtggcaggcgcctgtagtccctgctagctacttgggaggctgaggcaggagaatggcgtgaacccaggaggcagagcttgcagtgagcggagatcacgccactgcactccagcctgggcgacagagcgagactccttctcaaaaaaaaaaaaaaattcttgtaacagggtcttatgtgattctaggacaatacacatcaaacagctgtgagcaagcaggttggagagcaagcaaggtgacttagtgatgaatgctgaatgtgctgcaagcttgctttattttcatttgttcccctcccttctttgctgatttcacaaagtttatggggacagttccatgtgtgccatgcaccaggaaccaagggctttacttggatctgcagaacagcttacaaggacgctaactaacatcaagagctgtgaggaagccaggcccagtgactcatacctgtagtcccagcacttggggaggctgaggcaggaggatcacttgagcccaggagttcaagaccagcctgggtgatatggcaagataaggtacccagctcatttatttactttttgtaaagactgggtcttgctgtgttgcctgagacttaagcttttaaaagtgttgtggacatatttttaaaccaccacacctataagtggtggggccaggattcaaacccaggcctttttggctctgtcctgtcccccagggattgggtagtggcacgagagcatgcagccccaagtcagaacattaaagcgtggtcagttccaatgtgctccatcgaacctctgaggctctgctgtgttcttcattagcccctggttttgggctgaccaccctttgccattggcactgggagctctgcttctaggaatcagaactgcacctgtgggtgccgttccagaagctgggggcactcacaccaactgccacggggtggcgctatgctcccacctttcataaaaccagctgtctggacttttgtcccaggaggtccttggccaggaaattgtcccttcttccctaagctcatcctgttgggctctggtctgcaatcctaggactgtaggctaggccttgaaaccctaggagatggtactcaacatggataatcccctttacattctataactgaccttactttgctatggggcccccattcacaggaaaccacaaccacacaacttgtgcattcaaggcaacttttcttgtttcaaatggcatctttcaggtcaatgaaaagtctttgggggtacaagaccatctcaaggcttctctcaacacccccttctttctttttttttttttttttttgagtcagggtctcgctttgttgcccaggctggtctcgaactcttggcttcaagcaattctcttgcattggcctctcaaagtgcatggattacaggcatgagccaccatgcctggcctgaactctgacttctgagccaggccctgtggggtgagctttggctcctgtcttgagagctgcagattctctctcagcctggctgcagattccagattcttcctgtcaatgccatctctcagataggtcccagccacttatatcctccacagccccttctggaagtgtctttgtctccctgaacaaaaattcaatatggaagcagagttagccaggcacggtgcctcacactcgtaatcccagcactttgtgaggctgaggcaggagggttgcttgaagccaggagtttgagaccaccctgggcaacatagcaaggccccgtctctaccaaaaatacaaaaaaaaaaatttagccaggcatggtggtgcatgcctgtagcaccagctactcaggaggctgaggcaggaggatcacttgagcccaggtggtcaaggctgcagtgagctatgactgtaccactgtattctagcctggctgacagcgtaagaccctgtctctaaaaaaaacgtatttaaaaaaaaaaaaaaaagaaaaaaacagttagagttcatgctgttttctttctccttttatctggctctctgaagtctgccacacactatttctctttctgggccagaacctggcctcaggatatcttggtttaaggatgtcttggcttagccttaattatgcaaacttcctgtcacatatatctaatttacatgcagtctgattgtgattctgcagatcaatgaaggtgtttaagattaaattgatgtcaaaaccacattgagatattattcacgcccactgggatggtaataatcaaagagacagatgataataagtgttggtgagaacatggagaaattggaagcctcatacactgcgaaccagaaagtaaaatggtgcagtcactggaaaacagtgtggtgtttctttagaaggttaagatatagaccccaaagtaatgaaaacacatccacaccaaagcttttacatgaatgttcatagcagtgttattcataatagccaaaaagcacgaacaacctaagtgtctatcagcagctaaacaggtagaacagaatgtggtctgtccacacaatggaatattactcagccataaaaaggaatggggctgggcgctgtggctaataatgcctgtaatcccagcactttggaaggccaaggcgggaggatcacctgaggtcaggagttcaagaccagcctggccaatgtggtgaaaccccatctctattaaaaatacaaaaattagctgggcgtggtggcatgtgcctgtaatcccagctactagggaggctgaggtaggagaatcacttgaacctgggaggcagaggttgcagtgagccgagtttgtgctattgtactctagcctggacaacagagtgaaactcggtctcaaaaaaaaaaaaataaaagtactgacatgtgctataatgtagatgaacactaaagagatcatggtaagtgatagaagttagatgcaaaacatcacatattattccatttatatgaaaagtccagaataggcaaatccatagaaatgagtggttaagtggagctgggagtttggggaaaaacgggtgtggctgattagtggtacagggtcccttgtaggggtgatgaaaatgttctaaaattaggccgggcactgtcgctcacacctgtagtcccagcactttgaggggctgaggtgggaggattgcttgagcccaggagtcgagaccagtctgggcaacatagtgagactctgtctcaaataaatactaaaaatagaagaaaacattctaaaattgattgtgggggatggttgcataactctgaatatactaaaagtcactgaattgtatattgaacccatcacccaggtagtgagcatagaacccaataggtagtaggtagtttttcttttttcttctgtcttgcctttttttttttttttgagatggagttttgctcttgttgcccaggttggagtgcaatggtgtgatcttggctcactgcagtctctgcttcccctcagcttcccaagtagctgggaatacaggtgcgcaccaccccacccggctatttttttgtattttcagtacagacagggtttcgccatcttggccaggctggtctcaaactcctggcctcagatgatgcacccgccttggcctcccaaagtattgggattacaggtgtgagccatcgcgcctggccccagtaggtagtttttcaacccctgtccctctctctctgtcctcctcgtattcttcagggtgtgttgttccgcatctttatttctatatgcatctgatgtttagcttgcacttataaatgagaacatgtggtatctggttttctatatctgtgttagttcgtttaggatgatggcctccagctccatccatggtgctgcagaggacatgattttgttctttttttatagctgtgtagtattctgtggtatatgttaaccacatttaaaaaatccaatctggggccgggcacggtggctcatgcctgtaatcctagcactttggggggccaaggygggtggatcacttgaggtcagcagtttgagaccagcctggctaacatagtgaaaccccgtctctactaaaaatacaaaaattagctgggcatggtggtgcatgcctgtaatcctagctactcgagaggctgaggcaggagaattgattgaacccagggaggtggaggttgcagtgcgccgagatcgtgccattgcactccagcctgggcgacaagagcgagactccatctaaaaaaaaattaaataaataaataaataaatacaatccgttgttgatgggcccttgagttgattctatgtctttgctgttgtcagtagtgctgcagtgaacatatgggtgcaggtatccttttggtgtaacaatatattttcttttggatgtgtacatagtaatgggattgctgggttgaatggtagttctatttttggttccttgacaaatctcaaactcctttccacaggggctgaactactttacattcccaccaacagtatgtaagtgttccttttctccatagccctgtcaacatctattattttttggctttctaataaaagccattctgactgatgtgagaaggttatctcattgtggttttgatttgcatttctctgatgattagtgatgtcaagcattttttcacgttcgttggctgcttgtatgtcttttgaaaagtgtctgtttatgtcctttgcccactttttaatagagttgtgtattagagttctctagagggacagaactaataggagatatatatatgtgtgtgtgtttttatatatatacgtgtatatatatgcgtatatatgtatatatgtgtatatatgcgtatatatgtatatatgtgtatacgtatagatatacgtatatatacacacatacgtatatacgctatatatgtgcacacatacgtatagatatacgtgtatatatacacacatatgtatagatatacgtgtatatatacacatgtatgtatagatatacatatatacacacatacatatagatatacgtatatctatacacacataaktatatatatgtatccctatacatgtacatatgtatagatatacatatatctataaatgtacatatgtatatacttatatctatacatgtacatatgtatagatatatgtgtgtgtatatatatgcgtgtatatgtagatacatgtgtatctatatatatgggagtttgttaaggagtattaactcgtgtgatcacaaggtcccacaataggctgtctgcaagctgaggagcaaggaagccagtgtgagtcccaaagctgaagaacttggagtccaatgtttgaggacaggaagcatccagcaagggagaaagatgtaggctgggaggctaggccagtctagtgttttcatgtatttctggttgctttatgttgtagctgtactggcagctgattagatggtgcccactcagattgagggtgggtctgcctctcccagtccactgactcaaatgttaatctcctttggcaacaccctcacagacacgcccaggatcagtactttgcatccttcaacccaatcaagttgacactcagtattaaccatcagaggttgtttggtttttgcttcttgatttcagttccttatagattttggatattggatctttgttggatgcatagcttgtggatactttctcccattctgcaggctgtttgtttactctggtagtttttcttgctgtgcagaagcactttcgtgtccttaggtcccacttgtcaatttttgttttgttgcaattgctttggaggacttagccaaaaattatttgccaaggccaatgtcaagaagggtattccctagattttcttctaggatttctatagttttcaggtgttacatttaagtctttaatctatcttgagttgatttttgtatatggtgataggggtccagtttcattcttctgcatatggatagccagttatcttagtaccatttattgaccaataagtgggagtcctttcccctttcctgttctttgagacaaggtcttgttctgtctccaaggctgtagtgcagtggcacgaccattgctcactacagcctcaacctccctggctcaggtgatcctcctgcctcagcctctctagtagctggaactgcaggtgcccgccaccacactcaactaattttttgaattttatttgtggaggcggggtctttccatgttgcctaggttggtctcaaactcctgggctcaggcaattctcctgcctctgcctcccaaggttctgggattatagatgtaaaccaccatccccagcctccattgcttatttttgtcaactttgttgaagatcagatggttataggtgtgtggctttatttctgggttatctattttgttccattggtctatatgttttgaattgcacactttaaatgggtgaattgtgtgatacacaacatacagttgacatatatatgtggtataaatataatatatacatgtatataatatgtaaaccatatgtatgcatatgagtggttaacgagctggcagtttctgtaaactctgagatatatgtattgtatgacatcatacaatacatatatctcagagtttgcagaaaagaagattaacttaggctgagcacacctgtaatctcagcactctgggaggctgaggcaggtagattgcttgagctcaggagttcaagacaagcctgggcaaaaaagtgagacactgtctctacaaaacaatacaaaatttagccaggtgtggtggtgcgcacctatagtcccagctactcgggaggctgaggtgggaggatggtgtgagcccaggagctggaggttgcagtgagccgagattgtaccactgcactccagccagatggagtgaagcccagtctcaaaaacaaaaacaaaaaaaacccggtggtaagctacttttaaaattttaatatgatgcatctctatacttgcttcagcttcctaaataattgcatttcaagccgggcatggtggctcacgcctgtaatctcagcactttgggaggccgaggctgaaggatcacctgggctgaggagttcaaaaccaggctggcaaacatggtgaaaccctgtctatactaaaaataaaaaattagccaggcatggtgggcgcctgtagtcccagctacttgggaggctgaggcaggagaatcgcttgaacccaggaggcagaggttgcagtgagccgagatcgcaccactgcactccagcctgggcgacagagtgagactctgtctcagaaaataaataaaataattgcatttcagaagaaagtggtcatctatcccagctctagaccaatggcagatacacaggagacattcatgtctttggtctccactctcagatcttgtgcctcaagcagccattgagtatggcaggatcctgacccgcctcacccaccaccccgtctacatcctgaaagggggctatgagcgcttctcaggcacgtaccactttctccggacccagaagatcatctggatgcctcaggtagggccaaatgctgagcacaggcaggcccagacgggaaggatgggcctagaaactgacttgtgggtgactgagtgggagaaacaggaggatgggacagaggatatagagaaagtggaggagattctgtctatactaaaaacacaaaaattagctgggcgtggtggtgcgtgcccatagtcgtagctactagggaagctgaggcagaagaattgcttgaacccaggaggcagaggttgcagtgagccaagatcatgccactgtactccagcctggatgacagagtaagactgtctcaaacaaaaacaaaaacaaaaacaaacaaaaaaaaaactagatctggactcctggcagccctaagttcatgtctgcagcccagtctcccccatctcctccacttttttttttttttttttgagacggagtctcgctctgtcgcccaggctggagtgcagtggtgccatcttggctcaccgcaagctctgcctcccaggttcacgccattctcctgcctcggcctcccaagtaggtgggactacaggygcccaccagcacgcccggctaattttttgtatttttagtagagacagggtttcaccctgttagccaggatggtctcgatctcctgacctcaagtgatccacctgcctcggctttccaaagtgctgggatcacaggcgtgagccatcctgcccggccacagttctttataaggaactgatggctgtcgggttgaaacagtgagcaaaggtggacccattcagagggcaggctggatggtggaccgataccaaggtcagaaaggcaggggcatggcggctcgagaccacctcttttttcttggctgtctgattccacaaatcctagctggatccagaggatacaaaaatacacaaaagtgggaaggattggtcaggcacggtggctcacgcctataagcctagcacttgggtaggccaaggcaggaggattgctttagctcagtactttgagaccggcctgagcaatatagtgagaccttgtctctacaaaaaaatcaataaatggagctggctgtggtggctcacgcctataatcccagcacttttggaggccaagctggatggatcacttgagctcaggagtttgagcccagcctaagcaacatggcaaaaccctgactaccaaaaatacagaaattcaccgggcatagtggcccacctgtcttgtagtcccagttactcaggagggtgaggcaggagaattacttgaacccaggaggaggaggttgcagggagccgagatcacaccactgcactccagcctgtgtgacagagtgagaccctggctcaaaaaaataatttagaaaagagatgggtggattgcttgagcccaggaggtcgaggctgcagtgagccgttgccatgccactgtactccagcctggttgacgaagcaagaccctgtctccaaaaaaaacaaaaagaaaatcagccaggtgtggcgactcacacctgtagttttagcactctgggaggccaaggcaggaggattgcttgatctcaggagttcaagaccagcctgggcagtatagtgagacccccatctctattataattcttttttagtagagacagggtttcaccatgttggtcaggctggtctccagctcctgacctcaagtgatccacctgcctcagcctcccaaagtgctgggattagaggcgtgagccactgcactcagcctattttttaatacaaaaagagaatcagatattaaacccctttgtccatcacctagctccaaacattgtcaactcatggtcagttttgtcaaaacaaaacaattttgagattccagtttctgctgatgactggtcctgtctgtaggggaggcagtggctggaagctggactgtgtcaagggacgccccgggtatctggagcccagagaaggggcacttgagcttcccagagccaaatctgacggaggaggagatttcgaggaagagaactgggtggagttgtctaaggctagcaccagactatgcagagatttgcaggcagggcctggtccctggagagtgccgtgtacagatgtctggcttattgaagygtctgaacacaatggaatgtaaacagaaagtggttttaactttttctaacagttgccttcagctgtgttccccttcctgcccttagcaacatcgtgagcagattccatactttctggccacttttggttacaaaaaacttcaatcgaaatcatagtatagaatgactgggcaaatgtgactattcacaggatgtttgactgtgtttaggaattgttgcttttcgaaggttgtagtgacattgttatggttattataaagtacaagtccttatcttttagaaatacagaacaaaatatttacgggtgaaatgacgtgatgtctggaatttcctttcaaataatctggggtgaggtgagaaggcagtgagggtatagaggaaacaaaattggccaatgagttgttaatgtttgaagttgggcgatatatacgttttagagacagggtctcactctgttgcccaggctggagtgcagtggtgcaatcatagctcactgcagcctccacctcctgggcttggtatcctccagcctcagcctcttgagtaggtgggactacagatgcatgccaccacagtcagctaagttttaaaattttttgcagatacagggtcttgctatgttccccaggctggtccaaaactcctgaccttaagcaatcctcctgccttggcctctcaaagtactggaattataggcatgaaccaccacacctggccaactagtgtatagttttgaaataatgttaaaggaagtaaaaagacagtctagtagaagctagggcggtttaatgttccaacctcaaatctgaatcaagtctcatctcttcccatgccctagagctgggcagcctagggtttgctgggggcactcaaagtagggagggatgggggttagctttaaggacagctgctctcttcccctcttctgggcagagtacctttggcagtagggcccagagtggacctgtctgtgtgcctggctgcgtgttagtggtgggaaagtgcctgctctctggccccgtctggctgtgtgagctgctggtagcctctgctgctgggtttctcgggacccagctcagcctcaccctggctccttctggggctgaggatctcccagagaacgcagccagtggtgactcccttcaacccctgccaggcatctcctccaacttcctccccttaacttggaagcccatgacccgtcccctgccccgcatgcccacattccttcaccggaatcgtagaaggcagggactcatgcctgaggtcagacatgttcccagatccagggtatgcatgcctggctcccaaagacatccctttcttccactgagataacagcactgtgaatttcagctcaacaggtgtacagtcagttaaataaaggaagtaaagacaatcagtctagtataagccagggcagtttaatgttccagcctcaaatctgaatcaagtcttatcttgattggaactcctccttgctcctccttgctcttggaggagcaccctggctttgcagggtgcagagagattaatttcttctctgcaaaccctacgctgctgataactcatcactgccacctcctcatttctgaagctttagtaaggtgtaattgacatgatgaactgcacatatttaaaaggcccggtatggtccgttttgacagttgcatattcctgaaacttgcctttgctcctagtctagtcacattgggaagaaggcgcagggttgtggctagggtagctgtgagggttggattgggttacttgtttgcagctgtctttagaatgtaggtgactggccagctgtggtggcttaagcttggaatcctagcactttgggaggtcaaagaggaggtggaaggatcacttgagtccaggagtttgagactagcctgggcaacatagtaagaccttgtttacacaaaaatttttttaaaaggctgggcttggaggctcacgcctgtaatcccagcattttgggaggccaaggcgggcggatcacgaggtcaagagatcaagaccattctggccaacatggtgaaaccccatctctactaaaaatacaaaaattagctgggtgtggtggcacatgcctgtaatcccagttactcaggaggctgaggcaggaaaatcaattgaacccgggaggcggaggttgcagtgagctgagtcacaccactgcactccagcctgggtgacagagtgagactccatctcaaaaaagaaaaaagaagaaagaaagatttaggaggtagcaccgatcagacatgagggcataggagagagagggggctgggatgatgccctggttttaggcgtgggtgacgggggctgtgatgtggttcattctggggaacactcgggagggggcggggtgggggaagaaggaggtggttttgggggaaggcagtgtgcccagttcgggcatattcatttgagatactggtttcgtttgcattgtgtcactgagcatttacacacattctacagtacagtgtgtttttatccacatcacaccctcttcccagccaaacccacacaaccgcagaaaaggaagctggtttaaaaacagcaggaagaggggttgatagatttgctatgggatttttgtggggttttttttgttttgttttgttttggtttttttttgagatagcatctctgttgcccaggctggagtacagtggtacaatctgggcttactgcaacctccacctcctgggttcaagtgattctcctgcctcagcctccagagtagctgagattacaggcgtgtgccaccacgcctaatttttatatttttagtagagatggggtttcactatgttggccaggctggtcttgaactcctgacctcaggtgatccacctgcctcagcttcccaaagtgctgggattacaagcatcagccaccatgcctggccttttagcgagatttttaagtggaaattgaaagggggatttcatttggcaccagcaagctgagcgtccatccgagttaggggcagcccacatgctggagtaaattgggcctgcccgcaggcagtggggggtcatgcatctccgtgtcacaggctggagaactggctcagcttggtgtctgttctttactaatggctttcgaagctggtagcttgggaaggatgtgggcttgcagagggttcactgctgtggggaagggagtgagatgtgctgagttcaggtggctctgaaggacccacacgcctgaggtccttaaaatgttatttctgagtcagacttagagccaggggacttttggaactgattttgatctttggcaaaggtcagcattttctgtggtgtaataatggagaaagtggtctctaatcagagcctcatggaaacatcaagttatccagttggagtggatttctctactgcagagcttctttgagattttttttttttttttttttttttttttttgagatggagttttgctcttgttgcccgggctggagtgcaatggcacaatcttggctcactgcaggctccacctcctgggttcaagtgattctcctgccccagcctcccgagtagctgggattacaggcgtgcactgtcacacctggctaatttttgtatttttagtagagacagggtttcaccatgttggtcaggctggtctcaaactcctgacctcaagtgatccacccacctcagcctcccaaagtgctgggattataagcatgaggcactgtgcccggctatttttttttttttttttttgagagacaggctggagtgcagtgatgcggtcataactctctgtaacctcaaactcctgtgggatcctcccacttcagcctcctgagtagccgggagtacagccatgtgccaccatgcctggcgaattttttattttttgtagagacaagggtcttgctgtgttacccaggctggtcttgaactcctgggttcaagcgatcctcccaccttggcctcccaaagtgctgatatcacaggcatgagcagccactgtgcccaacttctttgaacctttgattgctaatgtacgtgttgtttccgagagaggaatcatagatacagctgtccgtttgtacagttgtccagtatccatggaggttggttccagggcccccaatagataccaaatccttggatcttcaactccctgatacaagatggtgtagtatttgcgtctaacctaagcgtatcgtctcgtatactttatttatttgagacagagtctcactctgttgccaggctggggtgcagtggcatgatctcatctcactgcaacctccacgtcccaggatcaagtgattctcctgcctcagcctcccgagtagctgggactacaggcatgcaccatcatgcctggctaatttttgtgtttttcgtggagatggggtttcactcgttggccaggttggtctcaagctcctcacctcaggtgatgcgcctgcctcggcctcccaaagtgatggggttacagatgtgagccacctcacctggcccctcttgtgtatactttaaatcatctctagattatttataatacctaatacaatgtacatgctatgtaaataattgttatactgtatcgtttagggaataatgacaagaaaaaaagtctgtacatgttctgtacagatgcaaccatgaattatttttctggatatttttcatccaaggttgcttgaatatatggatgtggaacacacagattgcatttggttgtctgaacccctgaacccttttctcatagtgccttatgggggactagtgtttcttagaacacactttgggaaatgtagagataatccttgtctgtgtttcaaataaacgaaagtttttttttgttgttgttgttgttttgttttgtttttttttttttgagacggagtctcattctgtcgcccaggctggagtgcagtggcacaatctcagctcactgcaagctccgcctcccaggttcatgccattctcctgcctcagcctcccaagtagctgggattacaggtgcccgccaccatgcccggctaattttttgtattttttagaagagacgaggtttcaccgtgttagccaggatggtctcgatctcctgacctcgtgatccgcccacctcagcctcccaaagtgctgggattacaggcttgagccactgcgcccggcaaacgaaagttttaatgataactttggacctggaactcaggaagctcccatttaagtaggtgtcttgttctctctacccctctgcacatacactggcttcatttctgggcatgcagggtggctcacatgtgtatcccaacactttgggaggctgaggcaggaggatcactacaggccaggagttcgaggacagcttgggcaacatagtgagaccccatctctacaaaagataaaagtatcaaaattagctgagtatggtcatgcgcacctgtagtcccagctacctgggaggctgaggtaggagaagcatttgagcccaggaagataagactgcagcgagctatgattgagccacttgcactccagcctgggtgacagagtgagagaccctgtatctttaaaaaaagaaaagaaaagaaaaagatgggttgagcacagtggctcacgcctgtaatcctagcactttgggcagccgaggcaggtggattacttgaggtcaggagttcaagaccagcctggccaacatgatgaaacctcctctctcctcctccacctcctccctcctcctcctcctcctcctctctcctcctcctcctcctctctcctcctctctcttcctcctctctcctcctctctcttcctcctcctctctcttcctcctcctcctccttctctctctctctcgatgcttaaattctggtggtcttaagagagctgtccctctccatcctcctgagcccccagtacatgctgggttgttacagttctgggccacagcgtcctcactgcaacctttgtgcacctggccaagtgtaaacagttgccacggagggaatggacaccagtgctgagacccagcgctctgcacgatgaggctcagtcctttcgtcatgactcgccctgtgccaccccatgcaagttaccgtgtgccaatctctttcaaagtctggatctccgtcacattcactgtcctggaactgcccttttacgctcgtttgctgagctgtgtttcaagagatagacatccctcttccctgaggaatatgctcatagctgcctttctccctccacacttcaggaactggatgcatttcagccataccccattgaaatygtgccagggaaggtcttcgttggcaatttcagtcaagcctgtgaccccaagattcagaaggacttgaaaatcaaagcccatgtcaatgtctccatggatacagggcccttgtaagtaaagagaaactactgatttatatttcattttattttttatataatatttaaatttattttatttattttttttaattttattattattacactttacgttttagggtacatgtgcacaatgggcaggtttgttacatatgtatacatgtgccatgttggtgtgctgcacccattaactcgtcatttagcattaggtatatctcctaatgctatcccttccctttagtttttattttattattattattttttgagacggagtctcactctgtcacccagactggagtgcagtggcacaatctcggctcactgcaagctccgcctcctgggttcacgccattctcctgcctcagcctccccagtagctgggactacaggcgcccgccaccacgcccagctagttttttgtatttttagtagagatggggtttcaccgtgttagccaggatggtctcgatcacctgaccttgtgatcatcccgccttggcctcccaaagtgctgggattacaggcatgagccaccgcgcctggcctattttattattttttgagatggggtcttgctctgtcacccaggctggagtgcagtggcacaatcttggctcactgcaacctccgcctccagggttaagtgattctcctgcctcagcctccccagtagctgggactaaaggtgtgtgccatcatacccggctaatttttgtagtttttagtagagacagggtttcaaaatgttgcctgggctggtctcgaactcctgacctcaagtgatctgcctgccttggcctcccaaagtgctgggtttacaggtgtgagccaccatgcttggccaagataggtacttaaaaaaatttttttggctgggtgtggtggctcacacctgtaatcccagcactttgagaggccaaggcgggtacataagctgaggttgggagtttgatgaccagcctggccaaaatggtgaaaccccatctctactaaaaatataaacattagccggttgtggtggcacatgcctgtaatcccagctacttgggaggctgaagcaggagaatcgcttgaacctgggaggtagaggttgcagtgagccgagatcgtgccactgcactccagcctgggcaacagagcgggaatctgtctcaaacaaacaaaaaaaaagacaagggtctcgctatgtgatcctcccatctctgtttcccaaattactgggcttattcatgagccaccacacccagcctggatgtttttttccaggagaggttgagttacctgtgcacattcccccttacacaagctcagcgtcctccctgtggcccttctgctgtgatgaaaaccccacaatggggatgcctgcattctgcrttccacctgatgacctgtgtggtccttcygtgtagttttgcaggcgatrctgacaagcttctgcacatccggatagaagattccccggaagcccagattcttcccttcttacgccacatgtgtcacttcattggtaaggagcgttccttggccgggtagcaactggcctgtgtctgggaagcagaggggcagtggagcctccttcacaggcttattctggaccgtgatttccccatgctctagagagaaagggcccagctcggcatatgctccatctgggtgggacaagctccaggacacgtccaacttctggggagccctcagtgaaacgagcaaccgtggtgtttacctcgggggcagtggggcccaaggctctggccctggctagatggctgtgcccttctgggcttgttgtaaaatgagagtgatggctacccacaagtgcacatgctcatggaggctctgggctgagctctggggaccagtagtaaatctatctctctccatccccgccttcatccttggtctgtgggatgtcggtggaatggaaggaagactacaaagctctttcagttctgacttccaagattttctttgtttttgtttgttggttggttggtggagttggggtcttgctatgttgcctaggcaggtcttgaactcctggcctcaagcgatcttcctacctcagcctctcaaggtgctgggattataggcatgagccaccacacccaagtgatgcccaccagttacttaactcatcaagagtggattttttactcattcctggggctccagattgccagaggagagtaagatctgtagagagagcagggctgagtcaggtcagagtccccaccccatgcctgcctgtctggcaccaacagctcctggcctgagccactgtaccaggggctggagcatggcattttggcccaaccatcccttattttaaattttatttttcgagacggggtctggcttgttcacccaggctggagtgtagtggcacaatcttggctcactgcaatctctacttcctgggctcaagcaatcctcctacctcagcctcccaagtagctgggactacaggcatgcaccaccacgyccaactaatttttgcatttttagtaaagatggggttttgccatgttgcccaaactggtcttgaactcctgagctcaagcaatccacccacctcagcctcccaaagtactgggattacaggcgtgagccaccacacccagccccaaccatcctttatttgcccagtagatgtcaaatgttgctcaaccrgggcctgaggctgagacttcccatgtgtcccacctcgagatggcagagccttgtggcccaaggagggaccccatctagcctgcctccctgggtagcactgagccagtcaataaattaaactgcatgctcagttcctttattcagatggtgaggaaggtggccatcgtcatctctgcgtccttcttcagccctggcagtctgtgattttgcacttgrtaggcttatcttcagttcctgagggttgccagaccagcctcgggtgccagcttagatttcctctccctgggcaggactcacagcttcaggggtgctgtgattagagctgatatttctgtgccaggcactgggctcagcacagaacaaaaccaaactgtatgaagtaggtagtatactgtgatcccgttttccagatgaggacaccgtggcctcaagtaacttaccctccagcccgggcaacattgtgagaccccatctgtacaaaaaagttagctggatatggtggcacatgcctgtggtcccagctactcagaaggctaaggcggagggttacttgagcccaggagttcaaggttgcagtgagctgtgattacaccactgcgttccagcctgggcaacagagcaagacccagtctctaaaataaaataaataaaaataggctgggcacagtggttcttacctgtcattccagtactttgagaagccaaggtgggcagatcacccgaggtcaggagttcaagaccagcctgaacaacatagtgagactgcatgtctatattgaaaaaaaaaaaaaaaaaaaaaaaaatcaggcgcagtggctcatgcctataatcccagcactttgggaggccaaggcaggcagatcacctgaggtctggagttggagaccagcctggccaacatggtgaaaccccatctctattaaaaatacaaaaaattagctgggcgtggtggcaggtgcttgtaatcccaggtactcgggaggttaagccaggagaatcacttgaacccaggaggcagaggttgcagtgaactgagattgtgccactgcactccagcctgggcaacaagagtgaaactctgtctcaacaaagaaagaaggaaaggagagagaggagtagagaggagaagaaaggggaaagaagagaggagatgggggaaggaaaggaaaggaagtaacttgcccaagccccacggccagtgagtggcagtcaggattggcactcaggctacactggctctgtcagctcctgactgtttttgggatgacgatggtcctgtccgccccatactgggaggccagttggtagcagagcttcctgggctagaaacctggagttcaggagaaggtctttgcctggtgatgctggttgcccaggcatgattctctggaacttccagccaggtctgagggatgcccacttgctagacaatgaaatgggctcccagagaaatcatgggacttgccgaggtcacgtgggctggttttgaactcatgcttggaccacgggcccatggaggccagtgtctgacagcaacccaggcccacagggaggagggccaggcatgacccaaccccccacttctttttgcagaaattcaccatcaccttggctctgtcattctgatcttttccacccarggtatcagccgcagttgtgccgccatcatagcctacctcatgcatagtaacgagcagaccttgcaggtatgcgttccccgggccaggctcrcaccacggccaccccctgggaggtgaggtcagagcgcaacctgggaggagtggggccccagcactgctttgggaggaagaatcccagataactccaagtctagggtgctccccagtccgcgtcacccaagggcaaggccccagtgttgcatgcttgaggcctgaggctggatatgcagggctggcccagggactcaggccaggtcaggctgtcctgcagcccccactgctgtcaggccgtccacctgtgtttgtttggtgttgcccaagggagaactgcttggagtcccagagctgcagcacaggcgcccacccactcccgtctatctccctgtaccttgggcgcagggtccagagaagagagggaagcagggacccatcgcagcaaacccaggcggaactcggrgctcctaactcacagcacctttctcgagggcctgccctgcctgtcacagcctgttcgtgatccccagagggcttgataggacctacaaagccccaacatttgcccagggatgtttttgggggaaggagagggacaaagaataaaactcgttggccagtggcttcggttgttgcccccatgtgcactttgggggtgaagttgtaggctagaaagtcctttttttttttttttttttttttttgagrtggagtcttgttctgttgcccaggctggagtgcagtggtgcaatctccacctcctgggttcaagcgattcttgaacctccactgcaccctctgcctcctgggttcaagcgattctcctgtctctgcctcccgcgtagctgggattacaggtccgtgtcaccatgcccggctaatttttgtatttttagtagagacagggtttcaccatcttggccaggcgatgtgtggggtggtggtgggggatgggtggtttacgattcttcctccagggcctgttctgacccagcgaggacatagtaagccttttgactgcacagctctgcccctcacaccactttaaaaaaaattgtggttaaaatatacataacaggccgggcgcggtggctcacgcctgtaatcccagcattgtgggaggccgaggcgggcagatcacctgaggtcaggagttcaagaccagcctggccaacatagtgaaaccccctctactaaaaatacaaaaattagctgggcgtggtggtgcgtgcctgtaatcccagctactctggaggctgaggcaggagaatcgctagaagctgggaggcagaggcagcagtgagctgagattgcaccattgtactccagcctgggtgacaagagcgaaactctgtctcaaaaaaaaatatacacacacacacacacacacacacacacacacacacacacatacacacacacacacacacaacaaaaaaattaccatcttaactattttaaaatgtatagcttaggagcattaagtacattcacattattgtacaactaatctcccaaacttttccatcttgcaaacctgaaacagcaactctttactttcccctcttcatcgccccgtgggaaccaccattctactttttgtctctgtgaatttgactactctaggtaccttatataagttccttccttttaaggctgaataatattccattatatgtgtggaattcaccaataaacccatctaggctgggtgctttctgttttggaaggttactaattattgattcaatttattattgttattttatttatttatttatttatttttgagacggagtctcgctctgtcacccaggctggagtacagtagcacaatctcgactcactgcaagctctgcctcccgggctcatgccattcttctgcctcagcctcccgagtaactgggactacaggcatctgccaccactcaatttctttaatatatgtaggcctattcagattgtctgtttcttcttgtgtgagttttggcagtctgtgtctttcaaggaattgatcaatcacatttgtggatatgaatattcttctattatccttttaatgtctgtgggatctgtagcaatgtcttctctttcacttctgtattagtaatttgtgtcttctctttaagttagcctggctagcagtgtatcgattttattgatcttttcaaagaaccggcttttggtttttttgattttctctattgatttcctgttttcaatttcattctttgcatggcgtatctagttttcctagcaccatttgttgaaatgactgtccttttcccccatcgaatggtcttggcatactatcaaaaattccttgacaggcccggtgcagtggctcacacctgtaatcccagcaggttgggaggcagaggtgggcagatcacctgaggtcaggagtttgagaccagcctggctgacatggcaaaacctcgtctctgctaaaaatacaaaaatgagccaggcgtggtggcacatgcctgtaatcccagttacttgggaggctgaggcacaaggatcacttgaacccaggaggcggaggttgcagtaagctgagattgcacaattgcactccagcctgggcaacagagtgagactcagtctcaaaaaaaaaaaaaaattgcttgaccatataggtaagggtttatttctaggctaggctggctattctattccactagtctctttgtcttcatgtccataccatactgttttgattactgtagttttgttagactaaggtttgaaatcaggaagtgtgagacctacaactttgttctttttaaatattttttatggggtcctttgagattccatatgaattttaggatggatttttctatttctacaaaaaatgttgttgggattttgatagggattgccttaaacctgtggattactttgagttgtattggcatcttaataatattaagctttccaacccatgaacacaggatgtcttttcatttgtttgtacctttaatttctttcagcactgttttggagttttcagtgtacaagtcttttgcctccttggttaaatattttattctttttgatgctactgtaaatggaattgttttcttaatttcctttttgaattgtttagtatatagacatgcaactaatttttgcatgttggttttgtatcctgcatccttgctgaatttattagctgtgtgtgtgtgttgtgtgtgtgtgtaatctttagggttttctacatatgaaatcatgtcatcttcaaaccagaggtaaggttacttcttcctatccattgtagatgccttttatttctttttcttgcctcattgttctggctaggacttctaggactatgttgaacagaagtgatgaaagcaagcacccttgccttgttcccgatcttagaggaaaaactttatctttcgccattgagtgtgatgttagctgtgggcttctcatatatggcctttatcaggttgacatcacttccttccttttttgtttttgagacagagtcttgctctgtcacccaggctggagtgcagtggtgcaatctcggctcactgcaacctccgcctcccaggttcaagcaattttcctgcctcagccacccaagtagctgggattacaggcatgtgccaccatacttggctaatttttgcatttttttagtagagacagggtttcgccacattggccaggctagtctcgaactcctgacctcaggtgatccacccgtctcggccccccaaagtgccaggattacaggcatgagccactgtgcctggccatttccttctgttcctagttttaggcaccactcttgcctttccctttttcgtttgtcctcaatccagatggagaccaggtgctcaccctccttcatgcagcaacacttcctgtactttaaggtggatgcctgaaggagggcagcttgaattttcttcttcagagaatttgcccacagttctcttcctctttccattaatttgtccagtcacaatgcaaacctttgttgagactgcactaggcttggcatagtgtttgccatccacaggtggtttcatgtatattgtcttaatcttcccagaagctgtttgaaataggaattatttctgtcaccagatttagaagcagaggggcttgcccaaggcagagtcagctcccatgactcccagcactgatgcattcatgccaggctgccctgtttctgcatccagcccttaagccgtgttgctggcactgtgcaagtgcctcctgtctctgaaagctgcctctgatccaagtggmaagggcccaggaccaatcgtgaagttcactttctctctttgtattcatagaggtcctgggcctatgtcaagaagtgcaaaaacaacatgtgtccaaatcggggattggtgagccagctgctggaatgggagaagactatccttggagattccatcacaaacatcatggatccgctctactgatyttctccgaggcccaccgaagggtactgaagagcctcacctgggggcattttgtgggtggagggccagagtgtgtatacccaggcttgtctggaaggagaaggcctttgctgcctgaaagtctcatgttagcctcctgtactgattcttcccaagtgcctgttcacgccacctagctgatgcgccctgctcaggttcaccaagaacccgcatccctgaggtgtcgcgggccatcccaactgcacccctgaggctgcctctggaagagcatctggctgctagagcagctgccctgcatccccctggtgacttagaccctttggaggctgcctgggggtacccagaggttgcctgtgttggttcacagaggatgtcacaatagccaccaataggcagtcccctagtcccagagataccaagcccagccttgtctagcccccaggctcctagaatgggatcacacccttgcctcatccccagcgcttcctgccatccaccccttgaaacagattttctttccctgctccccactcatttctgcctggctgtgttcaccaaggagagattctcaccccctcccccatctccctatccacgtttctagaaattcctaaggtcttaaaagttttccttttttttaccccctttccttttttttggaggcacggtcttgctgtgtctctcaggctggagtgcagtggcgcaatcatggctcactgcagcctcaacttccctgggctcaagcgatcctcccacctcaacctcctgagtgagtagctgggaatgcaggcatgcaccatcacacctggctaatttatttttatttttgtagaaacagggtcttgctctgttgcctaggctggtctcgaacttctgggctcaagtgatcctccagcctcggcctccccaaaatgctgggattacaggtgtgggccacggcacccagttggaagttgttttccaaatgcacttctccaaagctggcagcacccacagaacaaactgggcatcaggagacggcacagactaggggactggtaggggattaggatgtccatccatgcaggaccttccccaagtccattcggcaaccattccctgccaccgcgtgggtggggctgggaacagagagatgaatgccgtcccaccacttagcgcgctctgtggagggatgggggtgggagggggtgggggattcccctcaacagaagggcaggccttcaaggaggagtggggttttgccagagggggaacggctttacacacagccctggctttcctcagggtgtgagttgggacagagcccgggatggctgcagagctccgattagggacctcctggtaggcaggacacagccgctggaaagttttaagcatgaacatgatggggaatcagccttgtgttttgggaagggcagtccggtggccgcgagaagggacagtggaggtgaggcagggagaaaggaggccgctgtaaaaatccaagcgagagaagcagctctaactcccttccccaaagaggctcagcttcccaaggacgaaaatgttgcaagcaggtgtcacctccctggaccttggtttgctctcagcatgacgggccagagccctgctggctgcaccacgcggctggcacagtcagtgcagtccaggcccgggggctgcagccgtcccagtcccggtccaggccgcgagtcccggggctrgcaaccgcccttgcatacggccccgcccataccccgcccctgtcccggattggctggggcggggggcgtggcctttccccattggtgcccgtggcggcgcgagcccggaagcggacgggggcggtggcggaggagcctcgggtgggccggggttgctgcgccgtcctccactactggctactggcgctgcagccatgcagcccccgcccccgggcccgctgggcgactgcctgcgggactgggaggatctacagcaggacttccagaacatccaggttagcgccgctgcggacgccgggtcgcccccgagccgcgtctcgctggctcagggtcaagggtcgggcagccctgggtcaggcagtggggagctaagggtcaggggtcggggccctggcgtcactgccaaggggggcgaggcccctggtcctggtgtccactgccaccacctccagtgtccgggaaccccggcgggaccccatcgcgctgggcgacctcggcttccaatgagggccttggaaaggggcccagaccccgaccccgtcccttcccagaagagagcggccgcctgagtcacacacgggcgggcccagccttgggtcagccactcagcaaacgcgcagcgggcagcgcccgagaggcagcccaggtcgggggagcagcgtttaggggggtgtcctcggcctggatgggggacgccccaggcagagggataccgcgcgccgccgaggcctttggaaggaaagaggggacttgacaggcccatgtggctgcatcaaggagaaccaggggaggggtgggacgggtgggaggggtgggcggggctaggccctgcagggacgctctggcctggcagagatcagagtccctccgaggccagtggaaagctacgggaggaattgtctggactgagctccccagggccaccgtggctgttctgtccagaggccagggaggaggaggctgttggcctcatccaggcagggaagagggcggtggctgtgggtgggcagaagtggcacgtgctggggtccgagggggcgtggtgacccctcctgggcatgagaaacaagatccagacagagtagagccctggccagctgatggcttggttagcccttggcctctcctggactggttccaactgcttcctgtgggcattgaaacccagctgcccctggccctgccaaggcccctgccattggtgcttctccccagagactgagcagacccagtctccccgcctggccgccgctgtcctggccacagcccctkcttggctctcctcacactgccccttgccccatctctaggctgcgccttcttgagactcacctaccagggcaaagtgcttggggaatccttgggccaaaggtgctaggggaagggagtggggctggccttagagcaggaggctctagggttgaaacctgatgacctttaacctgggaagaagatgtcagggattcctgagaacctgagctcctcctgtactggaaggctagataggcaggaggagctgagaggatagaggggtggctctgggctgcctgcttggtccaggaggtggccctgggggcctaagctccagactcaaggtaggagaaagagtctgtccttgtagggtggggacaactagcagatgggctgagactaagaaaaccttggctgggtgcggtggcttatgcctgtaatcccagcactttgggaggccgaggcaggcggatcacctgaggtcaggagttcaagaccagcctggccaacatggtgaaaccctgtctctacaaaaatacaaaaattagccgggcatgatggcaggtgcctgtaatcctagctacttgggaggctgaggcagaagaatggtttgaacccgggaggcggaggttggagtgagctgagatcctgccattgcacttcagcctgggcaacagaacgagactgtctcaaaacaaaaacaaaaacaaaaacacctagtctgtttttggaggaggggtgctgtgggggtctctgggctcacaggaggacacccaggtccttgcctgccttggggagacagccacctcatccctgggcaggcacagttctacctcctttcccgctgagcgagaccctcccagcagccctgggggagcctgagcgccacgtcctgcctgcaggctctggctcagtagctccccaactggcctgagcctctcccctccggcccccaggagacccatcggctctaccgcctgaagctggaggagctgaccaaacttcagaacaattgcaccagctccatcacgcggcagaagaagcggctccaggagctggccctcgccctgaagaagttaggatcccctaccccacccgccatgggcagagtgtggggtgggagggctggcgctgtgagaccctgggcaccgcccctcccctctctgggccgtgtttgcccttctgcccctgtgggagtcagggaggacacttgggagtcctcttgccctgactgtttctggccttacccgcagatgcaaaccctccctcccagcagaggccgagggggccgcacaggagctggagaaccagatgaaagagcgccaaggcctcttctttgacatggaggcctatttgcctaagaagaatgggtgagggcccccaccgccacccccagctcagttcacagccactcctgaagccgggtgctgcctcctcttggtcattatagtcagcaaatgttccctgggcccagtacaggctgagcaatgaggcacagtgctgacttcaggggagacacctggctgagagtgacatttcactgtgataggtgctttgtagcatggggaatgaggtggcacagtgagggacacctgacccagtccaggaggtcgcagaaggcttcctggattaggggatgggtgggctgagtcttacagaataaagagtgggccgggcgtggtggctttcacctgtaatctcagcactctgggagatggaggtgggaggatcacttgaactcaggagttcaagaccagcctgggtgacatactgagaccctatgtctctatttatttaaaaagaacaaataggctgggcgcggtggctcatgcctgtaatcccagcacttttttgggaagccaaggcagatcgcttgaggtcgggagttcaagacccgcctgggcaacatggtaaaacccatctctactaaaaatacaaaaattagccgggcattgtggcatgcacctgtaatcccagctacttgggaggctgagacaggagaatcacttgaacccgggaggcggaggctgcagtgagctgagatcgcaccaccggactgtagcctgggcaacagagtgagactctgtcttaaaaaataaataagtaaataaataaaaaaaatgaggcagacacatgggctgagggcgagaggtagcagcaggtggacgggccatgagaacttgtagtggctagaggtcggggcgggaggtgagaggcagccaagagatcagaggctttgctgggctgcagctcttgccttgagcccagtaggcgggcgggggcggtggaatgtgcacctggaaaggccagcagctgtcacccaggaggacggatggggcagtgcaaaaccccctgctgagcaaaaaatcccagcagaggctgcaggcagggagatagctgggagagggcgtggcccagaaggcagggagaagaaaggagtgtccgtagcctggggtcagtcctgtgataaggaaggggatgcgcttcctggaagttgggtcatcttggcagaaccatttggtggaaggggatggatgtcgatcttggggatgacagaagagccaaggaagggagacagccaagtctaggagactttttttttttttttttttttttgagacagagtctcactctgtcgctaggctggagtgcagtcacttgatctcggctcactgcaacctctgtctccgtggttcaagcgattctcctgcctcagcctccggagtagctgggattacaggtgcccgccaccacacccggctaatttttgtatttttgtattttgtatttttagtagagatggggtttcaccatgttggtcaggctggtctcgatcttctgacctcatgatccacccgcctcggcctcccaaagtgctgggattacaggtgtgagccaccgcacccagccctctgggagactttttagagcttggctgtgagtggagggagagaattagcaactaggaactggaaattagcactgggttgaggggcagctactgcctgtttgtggggttactttgcctctgggaagactcgagcacatccacctgctgagaagaggggccgagaggggaaagacccaggagaagggcaggaggtgatggagggaagcctggggagagcgagaagggctagtgggggatggagggtgcagagatgagagtgaggag

SEQ ID NO: 96071 - DNA, 83758 bp, Homo sapiens
  misc_feature (1)...(83758): n = A,T,C or G
tctaaaatatcaggcagagggctggacatggtggctcatgcctgtaatcccagtgctatgggaggctgaggcaggaggattgcttgagcccaggagtttgagaccagcctgggcatcatagtgagaacctgtctctttatttatttatttatttatttatttgagatggattctctctatatatcccaggctggagtgcagtggcgtgatctcggctcactgcaacctccgcctcctgggttcaagggattctcctgcctcagcctcccaagtagctgggattacaggcacccaccaccacacccagctaatttttatatttttagtagagaccgagtttcaccatgttggccaggctggtcttgaactgctgacctcaagtgatccgcccgccttggcctcccaaagtgttgggattacaggcgtcagccaccgcacctggcctgtctctatatttaaaaaagaaaagaaaagaaaagaaaagaagaacaaggaggaggaggagaaagaagaaagagaagaagaggaagaggaaggaagaagaagaggaggaagaggaagaagaggaagagggagaggagggagaggtgggagaggaaagagaggaaggagaggaaggaaaagaggaaggagaggagaagaggaaggaggagaagaaggagaaaagaaaagaagaagaaagaagaagaaaagaagaaggaagaggaggaagaggaagagaagaagaaggaggaggaagaagaagaagagagaagaagaaagaagaagaagaaaagaaagtcacaggtcaaaatcagccagaaaaacatgtatgtaccagcatggctgtaatgaccagaagaaaatgctaaaaaagagaagaatttatcctttcagccagatgcattggctcatgcctataatcccagcgctttgggaggtcgaggcaggtggatcacttgaggtcaggagttcgagaccagcctggccaaagtggtgaaaccccatctctactaaaaatataaaaaattagctgggcgtggtggagcgcacctgcagtcccagctactctggaggctgaggcaggagaatcgcttgaacccagaaggaggaggttgcagtgagtcaagatcacaccactgcactcaagcctaggcgacagaacaatactccaccttaaaaaaaaagaaaatcaagtctatagtcactattctttagatttggggagcaagtaaaagtttgttctttggccagcagcaagattatctgggtatttaaaaagtatttatgagctgggtgtagaggctgacacctggaatcccagcgctttgagaggccgaggtgggaggatcacttgagcccaggagttcaagaccagccacatagcgagaccctctctcaacaacaaataaaaaataaattagccaggtgtggtggtgctcacctgtagttccagctactcggaggctgaggtgggaggattgcctgagcccaggaggcagaggttgtagtgagccatgatcatgccactgtactccatcctgggcgacagagcaaaacccagtctctaatttaaaacaaaaaaaggtatttatgtatttgacttagaataagtaatacattcataaggtacaaaatttgaatgatacagagtagtatatagtgaaatatattcctttgcccctggtctccctcctcccagttctccagagacaaccaaccttacctccctcccttttttttttttttgtttttgtttttgtttcaggaggtatttcatgcacatacaggcaaatatgtatacctagtatctatgttcttccctcatttcccaccacaattgtttgagaacatacaaacggtaacattctatacctactgttctgtaccttgcatatttatcaatttgtctcagagatttttctgtttaagcaatgagcttccttccttgtttgtttgtttgtttgagacaagagtctcactctgtcaccccggctggagtgcagtggtgcacccttggctcactgcaaactccgcctcccaggttcaagcgattctcctgcctcagcctcccgactagctgggattacaggcgcccaccacgcccagctaatgttttgtatttttaagagacgaggtttcaccatgttggccaggctggtctcaaactcctgacctcaagtaatctgcctgcctcggcctctcaaagtgttgggattacaggtgtgagccaccgtgccctgccggccccttgtttgtttgtttttgtttttttgagacggagtctcagtctgttacccaggctggagtgcagtggcgcaatctcagctcactgcaacctctgcctcccgggttcaagccattctcctgtctcagccacccctgggactacaggcatgtgccaccatgctcagctaatttttgtatttttagtagagacggggtttcgtcatgttggccaggctgatctcgaactcctgggctctagcgatcctcccacctcagcctcccaaagtgctgggatgacaggcgtgagccactgtacccagcccagattatttctcaatgttttcatttatggcttctggagtttatgtcataatttcataatttagaaatgcctcttggggattattaacaccaattctcccatggacttttgggggctttttttttccttctcccttaaaaaatcatttaaatattttatctatctggaatttatattagtgtaatatgtgagatgtggatgcaacctactttttttccccccagctggccagcgagagtgttttttcggggtgggggtggggagggaaggagaggaaggtaggacaatgaggaggacagtaactgaagaagagaagctttcagctcggtgtggtggctcacgcctgtaatcccagcactttgggagtctgaggaggatggatcacctgaggtcaggagttcgagaccagcttggccaacatggcaaaaccccgtctctactaaaaatacaaaaattagccaggtgtggtggtgcacacctgtgatcccagctactcaggaggctgaggcaggagaatcgcttgaacccaggaggtggaggttgcagtgagcctagatctcaccactacacttcagcctgggtgtcagagtgagaccctgtctcaaaaaaaaaaaaaaaaaaaaaaaaaaaaaaaagaggcttccttgccagtgggtgtagcagaaacgagaagtgacataaacagtcaggaagccggctaggtgcggtggctcacacctgtaatcccagcactttgggaggccaaggcagatggatcacctgaggtcaggagttcgagagcagcctggccaatatggtgaaaccccatctctactagaaatacaaaaattagccgggtgtggtggcacaagtctgtaatcccagctactcaggcagctgaggcaggagaatcgcttgaactcaggaggcagaggttgcagtgagctgagatggtgcccctgcactgcagcctgggtgacacagtgagactccatcccccccaaaaaagtcaggaagctgctgagatcatccaggtgaacggtgaacccacgtggccccaactggaacagggacagcagaaaagatgacaagaggaggttctggagatagaatccataggacccagttattggttcaatgggaaaaggccaaagaggtaaaatgcctgtttcctgatgtttccttagtgatgctatattattagcagacagagaagactcagtgttttaggagttctggtttcaaaaaaagcagggggcatggagtcaaagtccaaatttgaagcctcactgggacatcctggggagatgtccaacagggtgttgaaaagatggcacagagtatcagatatctgggtgaatttctccacagctctctctctgggtgagtgtggagttcaktcccttctttggacaggtattgtgccccaccctgagggctactgcattcatccaacctgttggagggactggttcctggacataggaaacctggcacctgggccatggtaataatctctttatataggattttgctattttcacaatattttaaagatgaagagtggatgggaatggtggctcacatctgtaattcctgcactttgggaggccgaggcaagggatcccttgaggccaggagttcaagaccaggttgggcaacatagcgagactctgtctctacaaaaaatttaaaaattaggctaggtgcagtgctcacacctgtaatctcagcactttgggaggccaaggtgggaggactgcttgaggtctggagtttgagaccagcctgggaaacatggcaaaacaccatctctacaaaaaaatttcaatcaactttctttaaaatgaaaaataaaaatacaaaaattagccagttgtggtggcgcatgcctgtaattccagctactagggaggctgaggcaggaggatcacctgagcccaggaggtcgaggctgcatcccagcctcagcgacaaagggagaccctgtttcaaaaaataagtaacatatatgttattatataatatatattatttatataatatataaatataacaaatataacatttatataatatataaatgttatatttatgtattattttataaattaacttttttttttttgtgagacggagtgtcactctgtcggccacactggagtgcagtggtgtgaactgggctcactgcaacctctgcctccggggttcaagtgggtctcctgcctcagtctccccagtaggtgggattacaggcacccgccaccatgcccagctaatttttgtatttttagtagagacggggttttgccatgttggtcaggctggtctcgaactcctgacctcaggtgatccgcccacctcagcctaccaaagttctgggattacaggcgtgagccaccgtgcctgggctatttttaaaagatggagaaggggctctgagagaagtgagttgcacagtgttgcaaaaggaattcacagcacagctagtaataatagtagtagtagtaataataacaatggcgatgagaacacttagtaatgccgtgctctaaatcctttaggaacaaaggttataccacttaatcttcatgaccctgtaaagtagaaaccatagcaggaggcagaggtgggcttcactccccaaccaaggctgccagacttttcaaaccccagaagctctctgtatccccccactcctcttccatccagggcttgcctcctgcttggtcacttcccacccccaacaggccggccttcaaaagcgagctctaggcagcgtgtgggacctcacgcctgtaatcgcagcgctttgagaggccgaggagggaggatcacttgagaccagttcgagaccaacctgggcatcatagcgagaccgcatctctgcaaataaaataaaataaaattagctaggtgtggtggcgcgcctgtagtcccagctactgggaggctgaagtgggagaatcgcctgagcacaggagttgaaggctgcagtgagctgtgactgcaccactgcaatccagcctgggcgacagaacgagaccctgtctctaaaaacaaacgcgcgccctccgccgtcaggctggatggagggaacccagggagacgacttgggcctgaagcctcgccaatttcaggtgagsaaacagggccgtggaggagacaatgtggcgatcacaagcaagcggcggcccgaaggaggaggctagaccggcgggcgcacagccacagttctgcagtgatccccgggaaggtgggcagccggcccggtgacctgcagggtccgagctgtagaagccgcagccgccgtctccaggcgactccgccacccccgggaaccacgcactttcatttctctgccgggcgacccagccgagccgcgagggggcgtggccgggccgggccgtaccaagagcgcaaatttgcagggggaagcgcggggctccgggaatgcacgcgcggctcgagtgggcggggcggcggcccaatggccacgcccccacccccgcggccggcgaaggcggtggtagcgcctcagtggtgtgggcctgmgccctgcccaggtgcccgcagagagcagccgggctgccagcggtgagtgctatctttcgcggcgacggcggggtgggtgaggtcgggccccaagactcggggtttgccgggcgcctcagttcaccgcggccgcctggctctctgcgtcggggtgggccctcgggcctgggcactgcgcrtctggcccgacgctcgggcggaaggcatggctcccaccccggccctcctccgcgtcgcccttcccctagagctgatctcccgcggcggcctgagggtcgacttttccacagcttgggccgagagagcccggcaggccctcggctgagggttagggctcggtatctcagggctcggggtccagtccccgcgccgccgccccccacgggctaagccactttaactctccgagcctcagtttccccatctgtacgatgaatgggcctcgggaggcagcgaattctgggggtacctaacgtgagaggcgctcgatgcatgctcatgggacccgaatctaaccctgcagcatcaggtgggctgagtcgatggatcacgggagccccccagcccggcctgcatccctgagggcagtgcccctcgcagtcaggtgtctcggcggcccccacaacacaggtacccggatctcctgggggagccgggacacccttagatcgggggagcaattgggtaagagttcaaggtctcttgggcgccagggggaggagagtagaggtttcagtgagcttgattgacttcgactttctgcgtattgtttttcaaaacgagttacccttgtgtaaactggtgaccactaataaggagtttggggctgtttcaatgaaagtggctgtctcctctcttaaacccttaaagctgcagccttgccttgccttgcctctgagcttggccaagctggagaatgatgccagcacaaaaggagacaggactggactgggtggccctggtttgattcttggcaagcaagatacctcctggagcctccgttttctgatcagtgggtctggtagtaagacagccaccctgctctccccacagggttgagattctgaggatcaagacagggtcccagagagtggcatcgagaactttaatcctccttgtaagcagaacgtttatggaaccctctgggggatccagtatccccaccgttgttcactgctgtaattccttgggtcttgctttatggagaaggcattgattcattaaccatttgcaagttctacctacggaaatcccttttgagtggttatggggttggcttggtcaggagaacagctccaaaggcccagttagtaaaccagggaacccagaaaggtccacttccttttttttgggaggagggctgttttaggagttcttattttccttttaagagagtggtttttgagctacttatgaccttcatgccatctaatgttggaaactttcgctgagcagatagcttattataaaaagtatttgtacaacatccgcatttcagagaatgggatgctagctgccagttgcgtggtggtgtggaaacttakgagtgatcttaattttccaaaattcttcaggtctagcacttgaagaaataataggtagatttgaaatgaaacaacccagggatattcctgaaaacagcagcattgaccgcagccaatgtaaatcaggtgtggatcgtcctgggtagtaggartttataaatgccacagaggatgtttgctgccagacatacctgaattttaggacctgctgttggttaactctgggttgatccacccttaaccccttgaaaatcagaatctgtgttaggtaagtctgtgtatgattaggagacaggccaattgaaatcaaaactgcttggcaaatccagaacatttactcgtgaagtccatggaacatttcaagttaaaaataatttagcttttaagtaacttttttttttttgtgagacaggtctcactctgtcgtgcaggctggagtgcagtggcgcaatcatagctcactgcagcctcaacctccaggattcaagcaatcctccctcctcagcctcccaagtagttgggagtacaggcacgcaccaccacacccagctaattttttaaatgttttttagagatttggtttgccatgttgcccaggctggtctcgaattctggggttcaagtggtcctcctgctttgacctcctaaagtgctgagattacaggtgtgagccaccgttcctggctttcttatttcttcttyttttttttttttttttttctgatggaagctcttgaagttataggacctttcatggttccagagaggctggccgcccctacaagagcttcgatgtccttgtgctttagggaggagccagagaaacagaggtcaagctctggcactagcaccgtgtgtggcctcaattgagcatgttgggatttaactttctrttatatgtcagactcacttaaaaattaaagttagaaaaaggtgaaatggagaaatgacaattttcttttcttttcttttctttttttgagatggagtctcgctctgtcgcccaggctggagcgcagtgggctcagtgcagcctccacctcccccaggttcaagcaattttccttgcttgaattctgcctcagcctcctgagtagctggaatttcgagtacccaccacctggccaaagattctgtgctcattagcacacagcctcccaggtggctacagccttaaaagactttcaaatgccaattctaggctgggaacagtggctcacgcctgtaattccggcactttgggagaccaaggtgggtgaattgcttgagtccaggagtttgagaccagcctgggcaacacggcgaatccctgtctctataaaaaaaatacaaatacaaaaattgactgggcatggtggctcacgcctgtaatcccagcactttgggaggccgaggcaggcagatcacttgaggtcaggagttcgagaccagcctggccaacgtggtgaaaccccgtctctactaaaaatacaaaaattagccggtgtggtggtgtgcacctgtaatcccaactactcaggaggctgaggcagaagaatcacttgaacctgggaagcggaggttgcagtgagccgagatcgtgctgctgcactccagcctgggtgacagagtgagactctgtctcagaaaaaaaaacccaaaaaacaacaacttgttttgctgtgcagttttgtcatctggcattgggcagaaatttggacccgccgggcaggtgggagaagcatctgagtcagaggtcacttacctgcttgcataggccgctgacctataccaagccttagtttcttcatcactaaagtcagagaaagaacccactccacctgcctctgggacagctcagaacatgttaaccctttcagcagtgggtccttcttcatcttcttggcgctgtttggatccctgtagcgtgacacataaaaaagcacacatccggccttaggatatgtgtaggctctggtttgggcacttgagaactctcacagggagggaagcaagcatacaattcaacaagaatggcacggtgtgttgcattcattctcaagatgatggggtgaggcttttattagtgctgagcctgctgtttgtttccacagcagggctccaggggagaggtgatgtttgagttgggtcttggaggattgctaggagttctctgagcccacccaggcacaccagctctggggggcatgtagggtgtagaytgcatgaggctgaggtcgcgtggtggcacttgtctgaaatggtcctaggaaccatgggaagagatggggaggtgttttaaaaggtcagggctatgtgactagctcagatcagtgttgtgtgttttttttttttttagacagagtctcactctgtcacccaggctggagtgcagtggtgtgatcttggctcactgcaacctctgtctcctgggttcaagcaattcttgtgcctcagcctcccgagtagctaggattacaggcaccggccaccatgtctggctcaggacagtgttttcttgtactgaatattctcttactgcctaatatcctctctgggtgaatgaacaaccatttgggaaatttttactgtgtctaaatttgtaatcatactgttttagagctctacatcttaaaagtttttcctccccaagcgagatgtttacatcagttgtgttcttgttgggattagtgtgcacacgcctgtctgcatctgtgcgtgcgtgtgtgtgtgtgtgtgtgtgtgtgtatgcatataagagggagagaagatggaggaattccatgggggcagaccatggttctttgcagattggtggctccagttggttgggttcactggagccacgttcatcagtttgtttctttctttccttttctctctctgtatgtttatttatttatttattatttgtagaagtggggtctggctatgttgcccaggctagtttcaaactcctggcctcaagtgagcctcctatctcagcctcccaaaacgctgggattacaggcatgagccaccgcgcccagcccagtaactgttactcctgacgctggtcggtgtggcaactcagttgatgcttggacgtgttgtgaacaaagccccggggaacctgatccttctggtggcttgtgcagcaaactgttgatgtgggaagcttatttatttcacttgttaaagaggtgacttggatagggggatatctaagaattgtcctttcattggagtgctggagggtgtggcattcggatctcctttgtgcagcatctgtacctagctgagagaattgtacacataatttcccgaaatgcgtcagtttcaaggctaacttagaatatgttggtggccagactgtggtgctgtcagctgtggactgttctccaagagttgaatttctttttttttttttttttttttttttttgagacagagtctgactctctcgcctaggctggagtgcagtggtgtgatcttggctcactgcaacctctgccttccaggttcaagcaattcttctgcctcagcctcccaagtagctgggattacaggcgcgtgccatcacgcccggctaatttttttttgtatttttagtagagatgaggtttcactgtgttggccaggctggtttcaaactcctgacctcaagtgatccacccgcctcagcctcccaaagtgctaggattaccaggcgtgagccaccatgtccagcttataagaattgaattctttaggagacatttggtaggagaatagaagggggaaagttgccttttgtctacttggatgtagtaatgaggaggaagatggggcattgtggggcgtgtcctctaacttggaacagatgtaatttatttctaggtgaaagttaagaacagtgcttactcattctatttatctgccctccttttatcttcggcactttttcctacagccctgtttctgagctcacgtcacatcacctctgcggtggtgatgccggtgttcttagagcactgtgtcctagtgatactttgatcttcgtgggcatgcatcatcagtgcattgggtaagccgggcctgtacaaaggtttgcaggtttggttaggaacacgtgaactacggtcacctttctgaactttctgaactcatatgtagtgaccataggtcacctgggttgagttttcaacactgcaaacagggatggcagttcttgaatacacaggagagtgcattagccagtggtgcccggcatcattcagagtgcagtttggcatcaggaatgttccgtcaggtatttgtggtcttgtggagaaaagccactgttggttttggtgaagggcttcagaccctttgactgctcatgaaaccacacagtcttaacatggacacgttggacgcgttccttacgtaacgtgatttgcaaactcaggagtcattcagcgtcacagcagtgatcaaaagctcccagcccatctacccgaaacctccacaacaagagctctatctgtcagtggcctcaccgacttcctgggccctgaagctccaaggacaaaagactcctgtcccttttcccttcctctccattctgggtctcccaccaccaccaagtcctgtaagtttttagtcttttttttttttttttttgagacagattcttgctctgttgttcagagtgcagtgacacaatctcagctcactgcaacctctgcctcccaggttcaagtgattctcctgcctcagcttcccgagtagctgggattataggtgcgcggcaccgcgcccagctaatttttgtatttttagtagagacagggtttyactgtgttggccaggctggtctcgaactcctgacctcaggcgatctgcctgcctcggcctcccaaagtgctgggattacagcaggcgtgagccaccacgcccggccctttaaatctctttccactgctgtggtcttactgtagccccttgtcacttcctgctgcgctgacccgtaattgacccataattctccctctcttcccctccctaccacgttccaagatctgtccatggtaccattgctggttgatcttggaaccctgcttcggtcacccctcctttctcttcgcccagactggagtgcagtggcacgatttggctcactgcaacctccacctgtcaggttcaagtgattctcctgcctcagcctcccgagtagctggcactacaggcacgtgcctccacacctagctaatttttgtatttctagtagagacagggtttcaccatgttggccaggccagtctcgaactcctggccttaagtggtccacccagctcagcctcccaaagtgctgggataataggcaggagccactgtgcccggtcactgtcactgtcttattgcatgttttcttcttcatctgctttcataaaggataaacagtgacttaataaaaggtgtctaattctcccctccctagtggcaatacggttggactagaaggtgaattcagttgagaacagggaacctatcatttctgcgagtgtaagctggggcatagaacaatgccaggcataaggtaggcacttggatgaatggatgaatgaataaatatggcttctgtcccccaagtttactgctgagctttctcctgcatattgactgagctcagatgtcaaaattgggtctgatctgtagttttttttttttttttttttgagacagagcctgtcactctgtcgcccaggctggagtgcagtggcgcaatcttggctcactgcaacctctgcctcctgggttcaagcaattctcgtgcctcaacctcctgagtagctggaattataggtgtgtgccatcatgcctggctaattttttgtaattttagtacagatggggtttcaccatgttgcccagctggtctcgaatgcctgacctgaagcagtctgcccgcctcggccttccgaagtgctgggattacaggcgtgagccactgcgcctggcctggtctgtacttctgaagattattccaaagtacagtaggaacttttggtaggactttagttttccatccaggtataaaattttgtgtcagtggtggggttgcgcatgttcagtagctgcaacactagaaagatggcaaagcaggagcaaagaaaaatccctttggctccagaaaatctcctgaaagcagaaggcttatcaaggcctcaaagccacccagtcaaagtaggcacttttggcaaaggaggagcagagggaaggaaaagagctcaggtttaaacgactggaatcattcctacatgattcctggcrgcagaaacatgacaaggtgtgtctcagacgactagaagtaaaacctcacaccttggaatcgccagataaacattccttggcctttgttgtacgcgtcgaaaggattgatggtgtgagtttactggtgcggagagccattgcaagacttaaacctaaaaatgcagcgtatagtatgtaaccttatgtgacctggggatttccaaatctgaagtctgtccagaaactcattttgaaacgtagacaagccaaggtcaagaataagaccatccctctgacaacacagtgattgaggagcacctgggaaagcttggtgtcttttgcttggaagacctcattcatgaaattgccttcccaaggaagcatttccaggagatctcatggttcttgtcccctttccacctctcagtggactgtcatgctaccaaaaatagtggactttctgaaggagattggcacacctccatcttcttgggggtgtgtgcatcaatcagctcatccgccagctgaactagagccaggtgccaaactacagtaaatttttatcaatgaactggaagcttgtgttatttttgggggcggggtggaatttttatcaagtatcttcagagaagattatttcctgctttatcttcaaaaactgtaaaggaagggtcaaaggaaagacagtggctggccgggcccggtggctcacgcctataatcctagcactttgggaggctgaggcgggcagatcacctgaggtcgggagttcgaaaccagcctgaccaacatggagaaaccccgtctctactaaaaatacaaaaattagctgagcgtggtggcacacgcctgtaatcccagctactggggaggctgaggcaggagaatcgcttgaacccgggaggcggaggttgtggtgagccaagatcagacctttgtcctccagcctgggcaacaagagcgaaactccatctcaaaaaaaaaaaaaaagaaaagaaaagacagtagcttacgttcatggcggcacctctcatcacagtccagttccaaggaaaaattccagcgttttctacgttggctgctgccttgtctgaaatcacattttgtggagaaaggagtcttgctttgttgcatcttctatcctagggtttaatgttggtgaatgagtaactctagcatttgtacaaggctccctaagagtcctgcagcagtcgaccaagcccggggacataattgaatccggagattcctggggccttgaaaaaggcttgaaatatacataggaagaaaggcacaaaaataaatgctcacttgtctctgcaaaaaaaaagaaaagaaaaattgtgtctcaagttccttctgtagttgataatttattcagtaatcattttataattgaagaagaatattctgactctaaatctttctagatcagttacctggatgctgaagacatgaataaatttgtttattttaaaaatcctagggcctggcacagtggctcatgcttataatcttagcactgtgggaggccgaggtggacggatcactagagcccaggaattcaagaccatcctgggccacatggcaaaacaccatctctatttaaaaattagtgtttttaaacatcagtgtttaaaaattagctgggtgtggtggtgtgtacctgtcatcccaactacttgggaggctgaggtgggaggatcacctgagcccagggaggttgaggctgcagtgagccatgatcagaccactgcacaccaacctgggtgatagagtgagacccccatctcaaaatatacagtaataaatgaaaaatagaaaattccccaaataaataaataatagaaaattctaatgaaaataaaaggagttgagtgtaaccgttgagtgtctgcgctgggtgtttatgtctcatgtaaccaacgtagcactgtgagcatggtcatcccggagacggactgtgataaatcgtgtgcccaggatcccagagtgcataggtggcatatctaggttttgaaccaaggtctgttggtcttttatagctcaactgggttgtgagtttgttgaatttcactttccatgctttccccaaccaaaccaaaaaccagagggggaactgaaagctgagagcctagtaattgagaaaaggactctgggaggtgatggtgtcaaaaagcagtccagggaagctcttgtggttgagcacacagctctgcccagagcttcctagatgccaaggcaaagaaggatggggttacatagcagttattggaaaaaggaagctgaccagtttctcattagtatttttcagctgggcgcgatggctcatgtctgtagtcccagcactctgggaggctgaggcaggaggatcacttgtggccaggagtttgagaccagcctgggcaagagagagagagagagaccctgtcccttcaacaagaaaatacacatttaaaatattagccaggcatggtggtgtgcacctgtagtcccagctactcaagaggctgaagcaggacgatcgcttgagcctgagagttcaaggctgtagtaagctatgattgcaccacgacactgcagcctgggtgatggagcaagaccccatctcttaaattttttttaaaaagtgcttttccctgggcctttacacgaggatcattgaataaagcagtggtcagcagcccatgtactcagcaagtatttgtagagcaccacgtatgtgccaagctctcttcgaggtgctgggactacttttgtgtgtggaaaagaccaacaagatgaaagatgatgttggcctaggccagggtggaggcactgttttcaagaacaggagtgttcccacaggtgaccctttctgggtcccatctaggtaagaggctgagaggttcaggctcggttgtaaattctgtaagggcagttctttgggaggtgtgagcaagagaatggaatcagagcgattattttagcaggcaggagtgaagcttgagaatctggcagagtgaggagcgatcttgtgccagagtgagaggcagccagtccaaagtgaaggttctgaagctcttagtacctcccacgtacagtgtcctgcttttttttctttctcttttctctctctttttttttttttttttttttaaggcaggacacttgctctgtcacccaggatcattgctcactgcagtctcaaactccttaagcccttccaagtagctgggactacaggcacacaccaccatgcttggcgagtttttctttctttttgcagagatggggtcttgctatgttgcccaggccgatctcaaactcctgggctcaaacgatcctcctgttgacctcccaaagtgctggaattacaggcatgagccactgtacctggacccctgctatttttcctgtgatatttgaaaagcttggcttggtttcttgccctttagtaggtgattgcaggcagagccacgaggtcttagaaagcagcacggctctgttccgatactcctggctgaagggccagtgtgctgtgccattgagggagaagcattgactctggtctgggagattctgttcatttagtcattcagcaaacaaatattgagtgctggccaggtgtggtggctcacacctgtaatcccagcactttgggaggccgaggcgggcagatcacctgaggtcgcgagttcgagaccggcctgaccaacatggagaaacctgtctctactaaaaatacaaaattagccgggcgtggtggtgcatgcctgtaatcccagctacttgggaggctgaggcaggagaatcgcttgaacccggggggcagaggttgcagtgagctgaggttgcgccattgcattccatccagcctgggcaacaagagcgaaactctgtctcaaaaaaacaaaaacaaatattgagcactcatgttatgcaaagtctgatgagcaccagggttacagaggtgcaggatagctccacccagacacgagaccaatcctgtgtccttctgcagggattatttcatcttgggtaatgctgtcatctgatgatgtggccaggatgtcagctgcaaaatgaaccccaggtcattcagtgaggctgcgtctacctgtaactttgccatgtcctaaaaaggtcttgaagggcagacagatggttgatagaatagctctggagacagttggtctgggtttgaatcctggttccaccatttatcgattccctgatgttggacaaggtcctttaacctttgtgataattacagctcctgtatgtcagagcagtgttaaaacactgttcattagttaaaaacaaatcagggccgggcttggtggctcacacctgtaatcccagcactttgggagattgaggtgggctaatggcttgagcccaggagtttgagaccaacctgggcaacatggcgaaaccccgtatcttaacaaaaaattaatggggcttggtggtgggtgcctgtagtcccagcaacgcaggaggctgggctgtcatcacgccactgtacagcagcctggctgacagagtgagaccctgtctcaaaaaaaaaacaacaacaaaaaaaaccccaaaaaacaaaaaccaggtcaggagtggggagtgactgctgatgagtgtgggatttccttttgagggtatgaagatgctctggaatctggtagtggtgatgcttgcacaatgggtgaatatagtgaaaaccactgaattttatactttaaaatgatgaattttatggtgtgtgaattctgtctcaattttttttttttttttttgagactgactctcgctctgtggtccaggctggagtgcagtggcccaatctcagcccactgcaacctctgcctcccgggttccagtgattctcttgcctcagcctcctgagtagctgggattacaggtgcccaccaccacgcccagctaatttttgtatttttagtagagacggggtttcaccatgttggctagactggtctcgaactcctgacctcaagtgatcttgccctcctcggcctgaggcatgagccactgctcccagtctctatctcaggtttctttttttttttttttttttttgagacggagtcttgctgtgttgcccaggctggagtacagtggaacaatcttcacttaccacaacctccacctcctgggttcaagtgattctcctgcctcagcctcccaagtagctgggattacaggcacacactgccataccagctaatttttgtatttttagtagagatagggtttcactatgttggccaggctggtctcgaactcctgaccttgtgatccacccgcctcggcctctcaaagtactgggattacaggtgtgagccaccacacccggcttctatctcagtttttaaaaatcaggtttataggtcatgagttcttgagcaactagactcccaccagttgtgcctccagttccctgtcatcttgagctagtcgtggacacctgcagcagacgtatgttcactgcgtgtttctgggctcccacacatttctaagccctcttgaagttaacttcgggtaatggcctgtragaggaagtcacgtatgtcacttctggatggaagcatttaagagccagggccaggccctccagcaatcttcttcccatcaggacggcccggaagttgaacattgagatggtggaatgacaagagaaaaagctgcttgaaccactgagtcaccttatggaggccaagggcctagcggagtcaccctgcccacactagacgttgcttagagttcagcttgaagccatgtgatgtgggtcactgcccaggaggacwtttttctagtgctgtggcctggaggactttccctctagcctctcatgcaggtgtactgtgtgatgtggtgggtctcttttctaacaggaagccccagtgggtgcagcagagctgtggctctcccaactcaagcacatctccacagctagctgccggcaagtacgcagctctcttggtggtgtctgagaaatggagcattaagccctcagtctaaaggagcatcttgggtaacctagtgtacctgtctcgagcagcaggcatagtacaatgtcaggccagcaccaaaggattttgtcttccttgtaagacaacatggggcaatagaaagctctgtatgggcaatcttgtaaatggtataataattatgatgcttttatagacaccgcatgaccgtccttagtcaccatagcgatgggatctaattattactgacttgttcatgttgtgggtttttagtaaccctactgcccacattctagaatttaaacacatgctgtgaatatccaagcacaggtcacagagatgacctagagttggtgctcagtacactttttttgtttttttgagaccgagtctggctctatcgcccaggctggagtgcagtggtgcgatctcagctcagcgcaacctccgcctcctgggttcaagtgattttcctgcctcagcctcctgagtagctgggattacagagcatgcaccaccatgcccagctactttttgtatttttagtttcaccatgttggccaggctggtcttgaactcctgacctcaggtsatcttcccactttggcctcccaaagtgctgggataacaggtgtgagccaccgcgcccggcctcaatacacatgtgattgccttgaatgcatagcaatgaccgaacatcaaggtgaaacgcaagcaacgctggggaaggaatgaccaatayggtgccctctgaggcctcagcccaggggccatctggcttgtctgtctcattagtaccattgttcyctgtcagcttgtggaagagctgatttgaaaccacctgttggaccgaaggaagccactgaccaatacctgttctgtgggtgaagctgtcgcccagagcaccccctgtgactccgtggtcctctatgcactagtagaaactctgtttttgctgaatggcacagcccactactagctgaatgtggggtgacagtagccagcatgagaaccatcaagaccattatgggccaggagttgggtcaccccttccttgtctagggttgcaacaagaagtgacagagagggtcccacaaggtctttaaatctccctctgtaagttgtgggaatttcagtaacttgcttggtccttagggctttgaatctgagtctgtaaaatgggtgaaataatatttctctaaacaggtttatcatatgaatcaaaagaaattgtagaaggtgcctagccagggtgcttggcacgtagtaggtgttgagtgaacgttggttgcattgcttggctcctccttagtgagcctgtagtaaacacagtgctgtgtagactaggcaggcctttctctcttctgcaattctgagtgctttttcttaagaaccaaggggtactaacccttgttttagagacattcagaaactagccaggcgtagtggtgtgcacctgtagtcccagctcctcgggaggctgaggtgggaggatcacttgatcctgggaggtagaggttgtggtgacctatgattgcaccactgcactccagcctggacaacagagcaagaccctgtctaaaaataaataaaataaaataaataaataaatgtaaacaaggaaatagaaaacgtttatactgatggagtctcgctgtgtcgcccaggctggagtgcagtggcacgatcttggctcactgcagcctccacctcccgggttcaagtgattctcctgcctcagcctcccaagtagctggaattacaggcatgtgccaccacgcccgtctaattttgtatttttagtaaagacagggtttctccatgttggttaggctggtctccaactcctgacctcaggtgatccgcccacctcgacctcccagagtgctgggattacaggcatgagccaccttgcccggcccttatgtatttattttttaaagacagggtcttgctctgtcacccaggctggagtgcagtgttgggatcatatctcactgtaacccccaattcctgggctcaagtgatcctctaacctcagcctcctgagtagcggggactacaggtgtgcaccaccacacctcactaattttttaattttctgtagagatggcgtttcactatgttacccaggctggtctcaaactcctggcctcaatccatcctcccgcctcagcctctcaatgtgctgggattacaggcatgagccactgtgcctgtccagcaacaatatttataacagcccccaaaaggaaacaatccaagtatccatcacccattgaatggataaacaaaatgtggtatatccatacgatgaaatgttactcaggcatgaagaggaatgaagggcttttatgcatgccacaacgtggatggaccttgaagacattattctaagtgaaagaaaccagttacaaagggccacttattgtgtgattttatttatttatttatttatttatttatttatttatttatttatttgagacacagtctccctctctcacgcaggctataatgcagtggtgcagtcttggctcactgcaacctccacctcccaggttcaagcgattctcctgccttagcctcccgagtagctgggattacaggcgcctgtcatcacacccgactaatttttttgtatttttagtagagacggggtttcaccacgttggacaggttggtctcgaactcctgtcctcaagtgatcctcccgccttggtctcccaaagtgctgggattacaggtgtgagcctccgcacctggcctgtttttccttttaaagccgtgactctattttcccttctggccttggtgtgtgctcttccccactctgtctccttcccttttgagtcctttccatcaggaagccctccttaaccactaccagactcacccacacatgaaccggctcccaccatctgttctgtttattttggcaaggaaataaagatgtgtcttccaccagaaaagctgaggccactactcgattcagtttgccctccctgctggggcacaggtgtcatggcctcccttaagtgcttattaattcctgtgtttcagctttcatccttccacctgctgctaggcctctgtgcacacagtgctttgtggaattgctcccgtctcttcagcttagcagcgtgccttgaagaggaagagctgcagagaaattttgaaaataaattgctttttgaaaaataatttgacagtaagtcagggaccttgaaaatatttgttccctttgattcagaaatatttctaagacaaattcagaaattctttttttttttttttgagacaaattctgtctctgtctgcccaggctggagtgcagtggtgcagtcttggctcactgcaacctcygcctcccaggttcaagtgattctcatgcctcagccccccgagtagctagaactgcaggtgtgcaccaacacgcccagctaattgttgtattgttttatagaaacagggatttgttgtgttgcccaggctagtcttgaactcctgagcttaagcaatctgcctgcctcggcctcccaaagtgctgggactacaggcatgtaccactgcgcctggccagaatttctattttaaggaacttatcagtggcttacaaagacttatgttgaaaatatatcaatcctgtttttcatgacttttttaaaaacagttttaatttttttttctgtactagaaaatgcactgtaacttgacattgtaatagtgaaaatataatgacatttgagaatttataacaagaaaatgttcacaatttaatatatgaaaagtagaacaaaattatatgtagtataagaccgatcatgttaaaaacatgggcgggcacggtggctcacacctgtaatcccagcactttgggaggccgaggtgggtggatcacgaggtcaggagtttgagaccagcctggccaacatagtgaaaccccatctctactacaaatacaaagattagccgagcatggtggcaggcacctgtaatcccagctactccagaggccgaggcaggaaaatcccttgaactcgggaggtggaggttgcagtgagctgagcgagatggcaccactgcattccagcctgggcaacaacagagcgagactccatctgaaaaaaaaaaaaaaaggaaaagtatgtcctgtaatatgcatgtaaaaaactggtagaatgaaaccaaataagagtttggattatgttttccttaattttatgttttaaaatatagcacattttcttcactaaacatgcttttaaattttttaattgacaaagttgtatatatttatagtgtatggcatattgttttgaagtctggtagaatggctaaattgagttaattaacatatgcattacctcacacctttttttgtggtgagaacacttaaaatctactcttagcagtcttcaagagtacaacacattgctactaactatagtcaccatgttatacaataggtctttgttttttttttttttgagcggagtttcactcttgttgcccaggctggagtgcaatggcgcgatctcggctcactgcaacctctgcctcccaggttcaagcgattctcctgcctcagcctctggagcagccaggattacaggcacctgccaccacgcctggctaattttttgtatttttagtagagatgggggtttcaccatgttgcccaggctggtttctaactcctgacctcaggtgatccacctgcctgggcctcccaaagtgttgggattacaggcgtgagccaccgcacccagcctcagtaggtctcttgaactgtatttaattttaactttttgttttgaaatagtttcagatttgcaaaaaagttgcaacagcagtgctaacaattcttgagcgccctttacccagatttccccattgttaatattttaccatatttgctttatcaatgtgtgtgtgtgtgtgtgtagatatattttttcttgaactatttgagaatgagttgcagatatgaccaagatacttggttacccctaagtacttcagtgtgtattttcttcaaggcaaggacagtttttttttttttggtaagcaaaatacagtgatcaatagcaggaaattaacattgatatcctgtgttgtctaatcatagagtttctttacattttgccgttaatatcttttacatcagaaaaaatatgtttttttcctggtccaagacctcagagkgtgtgtgtgtgtgtgtgtgtgtgtgtgtgtgtgtgtgtgtgtcttagatcactcagtctttgtttatctttcatggccttaacatttttgaaaatgtgaggccgtgtctttgtcaacgtctcacagtttggtttgggtttgtataattcccttataacaagatccagcttccacccgaggcaacagagtgaacaacaacaacaaaaaaagaggtgacctgggtgcttttactascctacattcagatgtgggagcaaagaaatgacttaaagttggagtttatatttaaaagggaagcggaatgtaagtttggaaaatttgcaggctggccatgtgacagaaagaaaaaactttttcaagagaattcaagcaggctgtggagcaaccgcttgctagagcgatttgtagatttaaaaaggagccaagtgctgatagccaagactgtggggaaaaaaaggccttgaaggcatttcagagaccttcccggcagcccctcccattacagttgtggaggcctcagagggaagaatgctttgtggttcaggcccagtgccagggacagcctcaggacactgctcctcacatccctggccattcagcttccagccttggctcaaaggggcccagatacagctcaggctgccacactagagggtgaaagccatgagccttggccgcttcaatgtggtggtgagcctgtgggtggacagaatgcaagagtgagggaggcttggcagcctccacctagatttcagaggatgtatgggaaagcctgggaaaggggcagaccccttaccgagaacctctggtaggagaggaatgtgggactggaggccccatacagagttctcactggggcactgcctagtggagctgtgggaagggggccactgtcctccagaccccggaatggtagatccaccagcatcttacaacctgtccctggaaaagccacaggctgtgagagcagcctcggattgaaccctgcaaagccaccaggacagagctgcccaggaccttgggagcccacccttcgcaccagcacgccctggatgtgagacatggagtcaaaaggagattatttgggagctttaagatttaatgactgtctgccaggtgcggtggctcacacctgtaatcccagcactatgggaggccgaggtgggagtgcattggcgctatctcagttcactgcaacctccacttcctgggttcaagcgattctcctgccttagcctcccaagtaactgggactacaggcacccaccaccatgcccaggtaatttttgtatttttagtagggacagggtttcatcatgttggccaggttggtctcgaatcctgacctcaggtgatctgcccccgtcggcctcccaaagtgctgggattataggcttgagccactgcgcctggctggagggaccggttttttaattgagagggttggtacttctcccttcctgcctttttccaagggctgctcggggcttgtgtgtgtgtgtgtgtgtgtgtgtgtgtgtgtgtgtgtgtgtgtgtgtttcaaagacagagatctgtatttattaactcaggtcagacacttgggatttttcaccaggcatcatcaccaatcagccagctcagattaattaatattaatttggttggtctgttcccaggcccttggtgtgcaggcactttctgtcattaagtccttgtgacccagcctcgtgtgacacatctcccatgatggggagccactcccccaatagcgcattctatgttcagactcctttattagaacgtctttgcttggaggggttgtaaacctctctcctctatgaccactcctatttctgaatgccaggcctctccctttggcagttttctgaccacctaaagaagggatcaagtacctctgaatcttcttttcttaggattaacttttccagtgtctttactgtttctttctttctttttttttttttttttttttttgagagatggtctcgctctgtcacccaggctagagtgcaatgacacaatcatcatggctcactgcagcctctgcagcctctaactcccgggcttaagtaatccttctgcctcagcctcctgagtagttgggactacaggtgcatgctgcgacacctggataatttttttttttttttgagatggagggggtggtctcactttgttgcccaggctggtctcgaacctctggcctcagcacttctccagcctcggcctcccaaagtgctgagattataggcgtgagccactatgcctgtttctcttgtgacaggtrttggggactactgtgccctagagccactttctgagtgttgcagtttgtctttgatgttcaatgtggagctcatttggaattctattaaagaatccttagtgtgccttcccttttggggaagccatgttgacttcggcccatcctattctcatttcggtaaaggaggagggagtagcactgcccatgctgtgggcttgctgccgtggacttgctgtaggaattgtaacacatgcgtgtgtgggcagggggttggggggcaggtggcattctgattgcctccaggtgatctctccagactgttgcccctgcgctggaggcagaagccgacttcagaactgatctgcccagatttgagaaaagtaaagcaagacccctggctctgtttctcttattattattaatttttttttttttttttttttgagaccgagtcctgctctgtcacccaggctggagtgcagtggcgcgatcttggctcactgcaaactccacctcccgggttcatgccattctcctgcctcagcctcccaagtagctgggattacaggcgcccgccaccacacccggctaatttttttgtatttttagtagagacggggtttcaccgtgctagccaggatggtctcgatatcctgacttcgtgatccgcctgcctcggactcccaaagtgctgggattacaggcgtgagccaccgcatccggccgctgtttctgttttctatatttttattcaaaattaattgaggcaatcagctaggcttggtggctcatgcctgcaatcccagcacttgggaggccaaggcaggtggatcagttgagatcgggagtttgacatcagcctggacaacgtggtgaaaccccatctctacaaaaaaaamaaaaaaacaaaaaaaccaaaaattagccaggcatgttggcgggtgcctgtaattccagctacctgggaggctgaggcaggagaattgcttgaacctgggaggcggaggttgcagtgagcctagattgtgccactgtactccagcctggggacaagagccagaccctgtctcaaaaaaaaaaaaaaaaaaaaaaaaaagaaggccgtgtttggtggctcacgtctgtaatcccagcactttggaaggctgagggggtggatcacctgaggtcaggagtttgagaccagcctggccagcatggcgaaaccccatctctactaaaaatacaaaaattagccaggcgtggtggcaggcacctgtaatcccagctactcgggaggctgaggcaggagaatcgcttgaacctgggaggcagaggttgcagtgagccgagatcgtgccattgcactccagcctgggcgacaagagcaaaactccatctaaaaaaaaaaacaattgaggcaaaagtggggatggtcaggaggatgaaccagcgtgaactcctgtggagagttttgtgcctgtaaatcaccttgtgccaccttttaatgttgacgctggattatatccatgcaatgccctggagcttaggggagctgtggtctcgtccccttggcattcaagccaaggagccaaggccgcagagatgctgctagaagcaggcacggggagctgcagctgcagcatcagcccctgtgggcctggtcagttcgatttgtgctgagtcatgcccactgttcgcctgctgtccctcctgtccccccagtcacgcttgcacagatctgactcagcagctgccttcctcctttcacgtcattgcatcgggcacatgctggtcatgtgtttctaaattaagtcctgttgtgtggggaaaaggccatcagctgggagcgtttggccatggccatcttcagtggagaatgttctccaggataccttggtgaaagccccgtgactgcattgatattaggggtgcaggcatcgttgtacagtagtaccttcctgtagcagcattctgatcacagcacccccttgccctgtcctcaccagcttccccagggccaaacaccttagactggcatacaggcccctaggcccttacgcactcatctgggtgtctcttaaaagtttatctcggccgagtgtggtggctcttacctgttatcccagcactttgggaggccaagatgggaggattgcttgagcctaggagtttgagaccagcctgggcaacttagtgagaccccatctctacaaaaaaatttaaaaaatcagctggtatggtggtgcatgcctatggtctcagctatgcaggaggctgagggaggaggattgcttgagcccaggagttagaggctgcagtgagctgtgatcacaccactgcactgcagccttggtgactccagcctgttccgtgaatgaatgaatgcttatctcttattcgccatctatgcatccccacataaaaacacatcccattgcaccacacttgagttaccccagaccccgagtttctcgtgttctaggctctggtacacgcttcctctatcggtagcttcgctcatccccctaatctgactggtggaccctgatcattcttcacaatccagcccagatgttggcctctgggagccccttccttgactgtttcagactgtcatgcctgctttttccttccagctctatttcccctgcacctggcctccccatgcagccgtgactgttgggataggtctgccctttctcatagcaggaggacaccttggggcaaggttggcatgtctgctcctgcctgaacccacacagttcctggagtgcagcaggtgctcctcagctgtttgctgcacgcatggacgtaagagtgacagaagcatgtccttcgacatgacgtttttgtacctgaacattgtctagaggctttccagactgtaagctctgtgggattaggagcctgcctgcctcgcactccctggcatccttagtgctttgggcctcacaggccagcggagccctcgtgcgggttccaggcctgctttggtgggagtgctcagtacttttagccacacagagccgtggcctgcaaggctttcggagtacatctcyagcacatctgagaatccggaagcaactcagagtttctggaatggatttcacaaagtctgtgaataagaaggccccacaggccctactcaacagcttttttttttttttttttttttaaatacagaagatgctagtcttcaaagaacctctttactcttttactctttttctttttttttcgagacagagtctcattctatcgcccaggctggagtgcagtggyatgatcttggctcactgcaaccttcacctcctaggtgcaagtgattctcctgcctcagcagcctccagagtagctggaattacaggggtgcgccaccatacttggctaatttttgtatttttagtagagactgggtttcccaatgttggccaggctggtctcgagctcctgacctcaagtgatccacccgcctcagcctcccaaagtgttgggattacaggcgtgagccaccgcacctggccctctttactcttattatatagtgatggggtcttgctttgttgcccaggctggagtgcagggatactcactgcagcctcaacctgcagggctcaagtgatctcctgccttacctcccaaatagctgggactacagacctgagccaacgctccccacctctttactcttattttattttatatttatttatttattgagacggagtctcactgtgttgcccaggctggagtgcaatggtgtcatcttggctcactgcagcctccgcctcctgggttcaagtgattctcctgcctcagcctcccaagtacctgggattacaggcacgcaccaccacgcctggctagttatttttgtatttttagtagagatggggtttcgccatgttggccaggctggtctcaaactcctgacctcaggtgatccacctgcctcagcctcccaaagtgctgggattccaggcgtgagccgctgtgcctggcttactcttatcttagatatcacgctaacaagcagctgatttcccaatttacgcagattcaaagcagccaattagaaatgggtgagagacttttgaaaaaaaacgtaggcactctcgtggccgggtgcagtggctcacacctgtaataccagcactttgggaggctgaggcaggtggatcacgaagtcaggagatcgagaccatcctggctaatatggtgaaaccccatctctactaaaaacacaaaaaattagccgggtgtggtggcaggcgcctgtagtcccagctactcaggaggctaaggaaggagaatggcgtgaacccaggaggcggagcttgctgtcagctgagattgcgccactgtactccagcctggacgacagagcaagactccatctcaaaaaagaaaaaagaaaaaacgtaggcactctcataatggtgagggtcatcctgcctcaagaaaagacaaacactatcaacaacaaagatgcaggggccgggtgtgctggcttacacctggaatcccaggactttgggaggccaaggtgcgaggatcgcttgagcccaggagtttgagaccagcctgggcaaccaagcgagaccccatctctacagaaataaaagtttttaaaaaattagctcggtgaggtggtgcatacctatagtctcagctacttgggaggctaaggtgggaggatggcttgaggccaggagtatgagggtgcagtgaactatgctactgctttccaccctgggtaacagagtgagactgtgtctctcaaaacaagcaaacagaccaaaaagatgcaggaacctgagatcccacagcctgggttccctctgtgtgcaagcaacctctcctgcctctttaggccctaagtatgttgtacaatgacacgatggccgagtagtctacaaaaggaaccgtgcgtggactcgagacagcatggacatggttcacgtattccggaagtatttctctagctgtgtagaattttagagctgaggatgatccttggtgaccagctccatattgctttgtggagaagaaacctgagtcctgggaggtcaagtaacccgttcagactcccacaaccagagcctscggcatctgtactgcccagtcagtacagagctccggtaactaggtgcacttcagttatctagagtaggcgctaataacttatttcttgtcagaggccaggtaataaatattttttaggctttgcatgccaagaagtaaaatctaggatgttatatataaygagaggcaacaagtttccatgttttttgttgatgaaattcaaataaggctggttgcggtggttcacacctgtaatcccagcactttgggaggccaaggcgggagaattgcttgagcccaggtgtttgagaccagcctgggcaacttagccagaccctgtctctataatttgaaatatatatttttaaaagaaattcgagtaataactaataacagttgagtgcaagtttttaatacaggtttgttaataagaagaatggaatgatttttgtagggataacaattttgggccaggtgccatgactcacgcctctaatcccagcactcttggaggctgaggtgggaggatcgcttgagtccaggagtttgagaccagcctgggcaacatggctaacccctgtctctacaaaaaaatatttaaaaagttagctgggcatggtgggtagtatacacctgtagtcccaactactgtggagactgaggtgggaggatcacttgagcccagaaggctgaggctggagtgagctgcgattgtgccactgcactgcagtctgggtgacaaagcaagacccagtctcaaaaaaacaaaaaacagaaaacaattttgtttcattggggttctgaattagtgttcccaaacatcaaaatctgttgcaaatatccccgtgtcagtgctcatctgtaatgagattgtataggtgacatctttgaaaatatcttttcacacaaataggtactgccaagttatattggtcagggagcataaattttgatggggcattttaatcattggaagacagcatttatagatttttttttttagattcccctcttgatatttgcctttttgcattattgcattgcagatcagccacttccaattgaaggttagatgagagctgctcaattgtacagttaaatggattttaaaatatgggaatttccttcatacttagatcaagatctgaaaaacgctgctagggctagaactagcagctcaaagtttttgttttttttgagctcaaggtttgagctcaaaaaaatgtgcaaaggtttttcacttgttctaaccttgacagtctaggaattgtatggcgcaggttgacattacttgtgattcatacaatgttaatttcattgaaatgactttaccgcaatataagttttgcatataactgctgttttgccttataattttagattggcctcattaagaaacatcaagtctgcagcaaaagctaatttccaaagcgatttagtatttggtaatagtggttgagggcagttctttcttttttctttttctttttttttttttattgagatggagtcttgctctgtcacccaggctggagtgcagtggcatgatctcggctcattacaacctccacctcccaggttcaagtgtttcttctgcctcagcctcctgagtagctgggactacaggcacgtggcaccacacccagctaattttttgtatttttagtagagatggggtttcaccgtgttagccaggatggtctcgatctcctcaccttgtgatccgcctgcctcggcttcccaaaatgctgggtttacaggcatgagccaccgtgcccggccctctctttttttattttttatttttatttttagactaagagggcagtacttttcagttattcttgttcagaaaagatttaatattcactctgagctcaaaatagtcacaccagactttaccactgctaagctgctgaactgctgtatggtaggccagttaggatattcagcttctatttttgacaaaaatccttaagaccaacttaggttaagtccatgagagcagatactgttgacattcccttgttcgatcacatataatagattcaaattttttgcataatatctgctggtgaataatatagtgaacaaccataggctccaactaagcctttttctgccccccacattcattataacacatcttagtggattccatttcagattgtactaaacttttctcaacttctttgaaaatgctcttatttgtagttgtttcatgctaattcttcaaacttggtattgactccccaagtaaacaacaactgaaaagtattggtaacgtctttagattcatcaagagccaaggaattgcattcttaaaccctcttggtggcttccctgtaaatgcttccaagatatgagcgaatgctatagaaattgcaggaaagtccaaagggctgcgcgtctcctgtggctcagtcttatttcatacctgcaacatcttttaagggaaatttgcaaaagggagaattatcaacttaaaaaaaaaatagccaaggaaacctcgactcttcaaggaagcaaggaaacgtgctctccttgggagtgacattagaggaggcccagtgtgagtcaggacttcatcaccacctggcggaaccagggagccccaccccatgtgtcagtggagatcatgtgctgtcttccctctccaagctagggtttgtcagcagaggcccaggagggagactgaatctcgcctgacagcaatgaactgataccttccttccctataagcaggtgacagacaatatttaataaaatcaaaaraggctgggtgcratggcttacacctgtaatcccaacactttgggaggccaaggtgggtggatcacttgaggccaggagtttgagaccagccccagcaacatggtgagaccctgtctttactaaaaatacaaaaaaataaattagccaggcgtggtggcacacgcctgtaatcacagctactctggtggctgaggcatgagaatcagttgaacctgggaggcagagattgcagtgcactgagatcacacaattgcactccagcctgggcaatagagacagactctgtctcaaaaataaaataggcttaaataagattcaggatcttaaagtacccagaatgcccagaatacaataaaaatcaatcactataccaagaaccacaaaactctcgaatgagaaaagagagtcaacagacaccagcatcaggatgacacagatgttggaattaagatatagagaagaatgaaacagatgtcttagaaccgaaatatacaatagtcaaaataggaaactgaatggatgactccacagcaaaatggaggagacagaagagagaatccatgaacttgaagttagagcagtagaaatcacctaacctaaacaacagaaaatagactgaaaaccaaaacaaaacaaatgaacagagcctcaggattttgtgggactaataacaaaagatctgactttcatgtcacccaagtcccaggagaagaagagaaagagagtgaggctgaaaagttatttaaaaaataatggcggccgggcacggtggctcactcctataatcccagcactttgggagacagaggtgggcagaatctcaggagttcattaccagactgggcaatgtggcaaaaccctgtctctactaaaaatacaaaaattagccaggtgtggtgaggcacacctgtagtcccacctactcaggaggcctgaggcaggaggatcccttgagcccggaggatccctcaagcccagaaagttgaggcttcagtgaacagtgattgcaccactatgcctccagcctgggtgatagagcaagaccttgtctcctaaaacaaaaaagaaaagaaaagaaaagttgctatattttgcaaaagacataaatctacagattcaagaaactgagtgaaccccacagaaggtaaacacaaagaaatctgcaccaacatctcagtacagataataaacttcctgggtactctggctattgtggctgtggagcgatctgtctgagtcactcttggacactgctttttaacaggtcaccttggagagtgtagtgttccccgagtacctctcagtccctgtgggttgcgctgtcaggcaacagtagggtatggttccatgagggttttccctcatcttgaagccactaaaccttggcagaggggcttgtgaacctgaatgaccccgctccccctgcagccagaaggtgcagcccctggtgccagagccttgtctaggtggccctgacatgacagtgacagctaaagggttgactaaattacaagttttattctttcctttcttgttactgctttgattggggtgtctgactcaccccaatatcagtgctgagttggttgctcaatcttttttacggaccagaagttgcaaacagtaaatgcaaaactgcaaatacttcctggaagataacctgttccagtgttgcaaatggttggcctcagagagcccttgtgttcttgcgtcattctccctttcagaagctggtgaggctcctgccagtgccccccagcctgtgtgctccctgatttatttgtccatcttgctcagtggtgtgtgggagggactggagctgttgcccttgattgctaccttggtgggaaccagccagctaccgaaattgacagggaatcgtggtcaagctatacatgcatagtttttacccttctctgtatgttgtattttataataatgaaaacatgtagagacctaatttataataaaagtcaggtctgctctatttagagttggggagatctagttggctggtattctgacatgtgcctttttctgtgcctaattttttcttgagacaggacctcactctgttgcctagactacagtgtagtggtgtgattatggctcaccgcaacctcaacctcctgggctcaggtgatcctcctacctcrgcctgccacatagctgggactacaggtgcgcaccgtcacacctggctaacttttgtattttgtggtagaagtggggttttgccatgttacccaggttggtctcaaactcctgagctcaagtaatctgcccgccttggcctcccaaagtgctgagattaaaggcatgagccactgcacccagctctgtacctaattttacagatgagaacatgaaagccttctgttggtaaggggtgtgtctggggtcccagccagctggtgtggcggggctgtggcaagagcctggtctagttcttgtttgctgtttggattgatactgtgtttggccccatgagctctgccttgtctcttgttccttttgctgaaggtataaagaagaaactcagagattaaagactctttcagggcagaaggctcacacaggcttccagaacctcctcggagcgaytgtagggactgcctgacccggaagagagttgtcagtcaagaccgccagagttttcccatcagagtatttggcatagcagaggtggctcccaaactgtgccagggcactgcagcaaactcacaagtgatcattctcaatgcggcggacgctcaagtctgttgaactccatgcgaagtgctagcttgggacagttcacrgttccaacgtgagatccttgctgcattccttcttaggattttacatctttgcgaagctgggtttgcagtggttgttcagacctaactatacgtggaactgttaggcatttttttttggcctacggataccattaaaaatttgctgagataccagggactccacaaacgaaggacatttgggatctgtccagacaggtacactggaagcccaatgtgtgttttatttgttaattgattgattgattgagacagtcttgctctgttgcccaggctggagtgcaagtggcacgatcttggctcactgcaacctccgcctcccgggttcaagcgattctcctgcctcagcctcccaaatagctgggattacaggtgtctgccaccatgacctgctcgcagcaccacgcccagctaatttttgtatttttagtagagacggggtttcaccatgttggccaggctggcctcaaactcctgacctcaagtgatatgcctgcctcagcctcccaaagtgctgtgattacaggcgttagccaccacggccggccccaatgtgtgttttaaatctttgcrcttaaatgtttttgatttytgcacattttgtgttgcacgtgtcataatgcattcaccgattcccttcattcccttgagtagttattgcgccctggattctgcgccaaggaagtgtgtgctggggaggggatggtggagctgaggtctgaagaatgagtacgaagcttcgagaggaggagcatctcagacacctgtcaggctctggggcaggaccgcagaggtgcaagctggagagtggctcagggtggggctggagagatgggtgtgtgtctgtgtgcgcgtcaaggggaaaacggttaagtttcttaacccaggggctcatttgtggcctcagcccccaggcacactgcttggatcctgggattcctccaagcttaacctccttgagaggccttcctttcgcaccgcatgccagacacagaggtgcctgagatgctgttcttccctcaaggagctcacaccgagtgagagagagacccatgtcctaagtagagggcggtgagcacagcccggtgggaagctgggcctgtttctcgttttgcccgagtgaggtgcttaccccgtgtggcctcatctgtagctcagggccttggataaagtgatggctgggtccttcccaccgcacctgtcttctctcagaagtagtttgatatttcagagtcaaagctgctgggaacattcttgttctgtggagcctccaggctgagcgctgggagtgcccagtgtgctggtcggggctggggggcactcagggccaagccccacccctgttggctgcaggaagtcagtcacagcctcaaggagcagctcctgttcgtttccttcgttttgcgtgttagtttccttacaggcgtgagactgtgtggtcctgactgtgaactccgggaagaggctgaaagaagctgtgagtgcaggtgttagagacaggcagcatgaagaggagggaatagagtcagcctcacagactgtcctgatggagttgcagtgtggttttcagattataaaggcattccatagtctgtatgccaagcactgccaatccaggtacccgaaaatcggaaggttcttgccttctattcacatgtttatttattcaacaaatcgacataaatgctcattatatgccagtctgtgaactaagccaagtccctgcccttgtggggtgaccctctagtcagggagagagccagtggtggggtaatgtataatataatgtgaggtggggataagctcagttgtgaggggtcagagggtggggattgtggccagggggcagttgtagattctgttctcaggcaaagtttctctgagatggtgacatctgagcagaaacttaaatgagggagtgaattttgcaaataatgagatggccatgtgcaaagtccctgaaacagaaggaggccagcgtgacctgcaaggtgtgaggaaggggagcgtagtaagaaatgtgggtggtgggagtgggttctgagggccggatcgtatgggccttatgagctgtgtaaggacttcagggctttgttgttgttgttgttgttgttgttgttgtttttgagacggagtctcactctgtcacccaggctggagtgcagtggcgtgatctcagctcactacaacctctgcctcccaggttcaagcgattctcctgcctcagcctccccaagtagctgggactacaggcacgcgtcaccatgcctggctaatttctgtatttttagtagagatggagtttcgctgtgttggccaggctggtcttgaactcctgacctcgtgatccacccgcctcggcctcccaaagtgatgggattacaggcgtgagccactgtgcctggccactttaggtttttgtacgaagtatgatgtgaagacatctcagggtttgttgttgttgttgttgttgtttgagatggagtctcactctgttctccagcactccaggctggagtctggagtgcagtggtgtgatctcagctcactgcaacctccgcttcctgggttcaaatgattctccagcctcagcctcctgagtagctgggattacaggcatgcgccactgcatccggctgatttttgtatttttagtagagacagggtttcaccatgttggccaggctggtctcaaacgcctgacctcaggtgatccacctgcctcggcctcccaaagtgctgggattacaggtgtgagccacygtgcccagcccatctcagggttttgatcagggaggggacatgacctgacttacttttttttttttttgagatggaatctcgctctgtcgcccaggctggagtgcagtggcacaatgtcagctcactgcaagctctgccttccgggttcacaccattctcccacctcacctccctcctcctgtttctgggactacaggtgcctgccaccacgcctggctaatttcttgtattttttttttttaagtagagacggggtttcactgtgttagccaggatggtctcgatctcctgacctcgtgatccacccgccttggcctcccaaagtgctgggattacaggcatgggccaccgtgcccggacgayctgacttactttttaaagcatccccctgtctgctgtgtggggaatggcccgtccatcagaattctcttgcggtgattacgtaggtgcagatgtaccgctaacctcactcccagcgtcgtcgatttattaatagaaactgccatgagttatgcaatcagcttgagtctgcgttgagaaggacttcacatcatgggcattagatctcttctggaaaatgaggggaccggtcacttggggagttagaagggaggagggtgagggacagggagcgcgagtttcttggctgctgccttgtgatggataacagctagacagmtaggggagctcctgtgtcaccatggcactcctgactggttccagtggggccctgactgtctgctgcctcatgactctgtgggacaagtccttccagaatctgtcagagcagatcctaaatgcctctctgtctggttctatgaaaatgtgacaggtggctcataagcttgacagagatcctgatatgactagcattaagtaaatattaaatgtgtttataagattaaatataaatagttttctctggggacaacagaattcactttgtcctttaatgtcatatcaaaaaagctggccaggtgcagtggctcacgcctgtcatcccagcactttgggaggccgaggcaggatcacgaggtcaggagtttgagaccagcctgaccaacatggtgaaactccatctctactaaaaatacagaaaattagccgggtgtggtggcacatgcctgtaatcccagctgctcaggagactgaggcaggagaattgcttgaatccgggaggcagaggttgcagtgagccgagatcgcaccactgcactccagcctgggtgacagagcgaggctctgtcccccggccccccccccccccgaaaaaaaaaaagtcatatcaaaaaagccaagttgaggccaggcacagtggctcacgcctgtaatcccagcactttgggaagccgaagcaggcagatcacctgaggtcaggagttcgagaccagcctggctgacatggtgaaaccccgtctctactaaaaatacaaaattagccaggtgtcgtggcgggcacccgtagtcccaggtaccctggaggctgaggcaagagaatcgcttgaacccaggaggcggaggttgcagtgagtcgagatggtgccattgcactctagccagggtgacagagagagactctatctcaaaaaaataaaataaaaaagaaagaaaaaagctaaattgagatgaactcaagccattggaaaagcagctcagattagtgagaaagcaaagacccaagcttgcgggcctgttctgaatggcctgttcccagcaggttgtgtagcagtagaccgatgcccacaaccctcggatgccctggcttcccagaccagccccatggtttcctggtgacagtgacagccatcagcagtcagctagaacatagtctctcattgcctaattgctgacacatgactaaggctttcctgattgagtctgggtgctctggttgtggtgaaaaacccagtcggtcatatccatgattgcaaaatggaatagtgtgaatttcagggctgagcccagcctccttggtaagcagcagaagctgctgtttcagggactctcacttggacctttgttgactcatgtcacgtctgcctaccaggtgtcgttggtggaaggaccagttgagcatcttatgagggaactaggctggtgacatgggggttcccccacctccctccyggacggggcggctggccgggcggggggctgacccccccacctccctcccggacggggcggctggcggggcagaggggctcctcactkcccagtaggggcggccgggcagaggtgcccctcacctcccggatggggtggctggccgggcggggggctgacccccccacctccctcccggacggggcagctggccgggcggggggctgacccccccacctccctcccggacggggcrgctggccgggcggggggctgacccccccacctccctcccggacggggcggctggccgggcggggggctgacccccccacctccctcccggacggggcggctggccgggcggggggctgacccccccacctccctcccggatggggcggctggccgggcaaaggggctcctcacttcccagtaggggcggctgggcagaggcgcccctcacctcccggacggggcrgctggccgggcggggggctgacccccccacctccctcccggacggagcggctggccgggcgggggctgacccccacctccctcccggacggggtggctgctgggcggagacgctcctcacttcccagatggggtggctgctggacggaggggctcctcacttctcagacggggcggttgccaggcagagggtctcctcacttctcagacggggcggccgggcagagacgctcctcacctcccagatggggtcgcggccgggcagaggcgctcctcacatcccagacggggcggcggggcagaggcgctccccacatctcagacgatgggcggccaggcagagacgctcctcacttcctagatgggatggcggtggagaagaggcgctcctcacttcctagatgggatggcggccgggcagagacgctcctcactttccagactgggcagccaggcagaggggctcctaacatcccagacgatgggcagccaggcagagacgctcctcacttcccagacggggtggcggccgggcagaggctgcaatctcggctctttgggaggccaaggcaggcggctgggaggtggttgtagcgagccgagatcaagccactgcactccagcctgggcaccattgagcactgagggaacgagactccgtctgcaatcccggcacctcgggaggccgaggctggaggatcactcgcggttaggagctggagaccagcccggccaacacagcgaaaccccgtttccaccaaaaaaatacgagaaccagtcaggcgtggcggcgcgcgcctgcaatcgcaggcactcggcaggctgaggcaggagaatcaggcagggaggttgcagtgagccgagatggcagcagtacagtccagcttcggctgggcatcagagggagaccgtggaaagagggagggggagggggagggggagggaccagactttgtctcttaaaaaaaaaaaaaaaagactcccaggcataggaaagcaggcattcaccataaatctcattgttaacaggaactaccttcatagcccaaggttttaggaatacagagacactcttgccagtcaggatagtccaaggctcgtgaatatcaggagccactcaagggccaggcctggagacttggaacatgcagggtttagggcaacccccgccagccacacagctggggaaagggtttgctgcgaaatggtccactcttgcgtgcacttcctcccgcctgccccccgtgcggtgtccttgtgggattagaggatgttccagcacactgagagtcagtggctgtcattttctctgtcttccagggacccagtcccagctgctgccttagcttgcaccccaggaccaccctgggctggtgctgacaccactgggggctgtctgttatgtcagccccagtccaagactgtggctgtcttggcaggaacctggctgagtgagccccttctcctaccccgtgcagtgaccatttcctgcagccccaggggcaaggcccagcatttaggtgggcaccccagccagcctcaggggcaccctgctaccctctgctgacatctgctgtttctgtctcctaacagtttcatgatcaacatgggrgactcccacgtggacaccagctccaccgtgtccgaggcggtggccgaagaagtatctcttttcagcatgacggacatgattctgttttcgctcatcgtgggtctcctaacctactggttcctcttcagaaagaaaaaagaagaagtccccgagttcaccaaaattcagacattgtaagtgccgcctctcagcctcctctctctgtccctcttctgtcaccactccaagcagtgtcctgcatgcgggcctcaggctgaaagaagcaaggctccttgtagcattttggggtgactcttgggttttgccttcttgctagattgtgcttgagctctcccttaatcatctcttatgtggggtttataaggsccttttctatctgctgtttatatgaccttcacaggaagcactgcgaaaatgacaccagtttacagattaagaaccgggggctcaagaatgttaacgggcctgccagggtcattagccagcaatagcagcgctagagctggaacccttttttccatttatttatttatttatttatttggagacatggtctcactgtattgcccaggctggagtgcaatggcggtggcacgatcaaggttcactgtaatctccacctcccaggctcaggcagtcttcccacctcagcctcccgagtagctgggactaaaggtgtgcaccactatgcccagctaatttttttttttttttttttgaagcagaatcttgttctttcaaccagtctggagtacagcggtgcgatctcggctcactgcaacctctgcctcccaggctcaagcaattcttctgcctcagcctcctgagtagcttggattacaggtgcccgccaccacgcctggctattttttgtatttttagtagagacagggtctcaccatgttggccaggctggtctcaaactcctgacctcaagtgatccgcccacctcggcctcccaaagtgctgggattacaggtgtgagccgttgcgcccagtcaatttttgtatttttttatagagacagggatttgccatgtcccgggctggtctcgaacacctggactcaagcaatccgcacaccttggtctcccagagtgtcgggattacaggcgtgagccactgtacccagcctagaattggcattttaaagtctttttaaggctgtagccacctggaaggctatgtgctaatgagcacaaaatctttggacaggccttattttgttgctcttttaaacttttcatgaagcttccttttaagaataagtgaaaaagatggattagttaaaagaaaaacgttaaggaaataatagtatagatggtatgtagacagaaaaaaatgataccgaaggtctgcctaagtgactgcatccctgtctctccaagattgatttccataagccacacggaaaagtcattctccagattttagggtcctgcggccagaattacttcctgcgrttacgcttggctgtgtttaacaccagtctcagactccaggggcccgcagccaggtttgagtggggacctgccaggtcaggtctgagccgagggaactccaggggcacgggcctgctgccttcagggactccctggatttggcaaggggcaggtctcaggggcaggattgggagccattctcagaccagaacccctttcattctgtctgtcttcaggggacccagtcccagctgcagccttagcttgcaccccagggccaccctgggctggtgctgacaccagtgggggccatctgtcatgtcagttccagtccaaggctgtggctgtcttggcaggaacaagccacacagaaaagtcattctccaaggctgggcatggtgaagcatgccgctcacatcaaatcccgattccctattccaatctgggtatcagccttccccgccagaacacttacagccttcacaccgtaaagcagatattcacacaacacagttcttataccatggacagggaattagttttacatttttaaaaactgggttcagggccaggcacagcggctcacgtctgtaattccaccactttgggaggccgaggcgggagaaatcacttgaggtcaggagttcgagaccagcctggccaacatggcgaaaccccgtctctaccgaaaatacaaaaactagctgggcgtggtggtgcatgcctgtaatttcagctactagggaagctgaggcagaagaatcgcttgaacccaggaggcagaggttgcagtgagccaagaatgcgccactgcattccagcctgggagacagagtccgtctcaaaaacaaaacaaaacaaaacaaaactgggttcaatcttatctccatcattgactcactgagcaaacatttcctgaggccctacctacagtgtcccagacactatgctaaggtgtgtggctgcagcagtgaagaaaatagatgaatgctgtcttcatcaagcttacgctctagtggtgagtgaaccctgggcgagaccttaacctcattctgcctcagtttcctcacctgctaaatggaggcagtattcccaatcttgtggggcttttgtcttaaatgaggaagagtctataaactcacctagcactgcccctgagggataggagctgtgtagtgtttgcgttgatcgtatttcgtgccaggcactatgacgggcacgatcaggaccacagagccagcatttatgttaagctggaaaatgagggtgttgcaacatagtttttttttttttgagacagacttttgctcttgtcactcaggctggagtgcagtggtgcaatctcggctcactgcaacctccgcctcccgggttcaggcgattctcgtgcctcagtctcccgagtgcctgggactacaggcacatgctaccacgcctggctaatttttgtatttttagtagagacggggtttcaccatgttggccaggctggtctcaaactcccgacctcaggtgagctgcctgcctctgcctcccatagtgctgggattataggcgtgagccaccacacccggccacagcgtactttttagaaatgctttgtgaactgctttaacctacattgtctaatcagggcctccttgcaacagcgccgtgcgttaggtagcgtgggttgcctcatttctgctctcagagaggttatgggatgtgcccagggcacaggctggagagacaggctccgccagctctaagagagaaggaattggtgyggggatcagaccaagtcctgcaggaggggtgttgggcaggttcttaaaggtagagccacaccctgaagctgaaaggactttagagcagagggcccgatataggaagggcagatcagctggaatccagcccatcctgtccagggctggtacacggggcattsctggtgtggaatagtacttttgataaaaaagcgtagtagtactcaagataaagagaccagggtccaggacccagctcctgaactggcccttgttccctcatctgtaaaatggaagttccgccccaccgccgtgagtgaggacgtgggttggccctgggagcctgcggagctgccaccaagggaggcagcattcctctcatagctcatctgttctcgctgtcacctccctggccttacaagaggaagttgacataaaacctgtagactgtgggagctgtagggtcccaaagcacttgtatttttttgttgattctcactgttcctctttgccaggatgctgaaattctgttccctccacctaatcatgatcttctaaccttatgtgtgtggagatatgcagtttccagagtcttgtctcttccctcattaaatcacactggatgcctgctgcagccagggcttttacctgtacgctgtacaagacaaatatttctagtaccatggctacattctggaccctgaagttgggtgctcaaggttgagtactgactctcccacattagccatctgacatcagccaggtgacttgatctttccaagtctgtgtccccaactgtaagctggaggtagtagtagtacttacctcataaggctgtgaaaactgagttaatccatcatagagctctttgctcagttcctggtgcatagtaggctctcaggtgttatggattgttactatttatttatttattttgaggcagggtctcactctgtcgttcaggctggaatacgctggcacgatctcggctcactgcaacctccgcctcccaggctcaagagatcctcccactttggcctcccaagtagctgggactacaggcgtgcaccaccacccttggctaatttttatattttttgtacaaatggacatctaacaatgttgcccaggctggtctgaaactcctgggctcaagcagtctgcctgcctcggcctcccaaagtgctgggattacaggcgtgagccaccatgcctggagtgtgttattatttttatcctttttattaataccatctccagtcttacaagagcccttccacgaagacatgagcagcccattttgcggatgaagaaaccgaggtgccagggattgcagagtttgcccaaggccacctaacttctaaatagcagcagagttggcttttgaatgaagtctgcaagctccacaagccatgttttctctactttgccatgctgctcctaatttagtgttaataggcctcctacgatagtgttagtctcctaagatagtgttaataggcctggcatggtggctcacgcctgtaatcccagtgcttagggaggctgaggcacaaagattgcttgagccaggagttcaagaccagcctgagcaacatagggagacccccacccccccgccatctctacaataaacaaaaaagagtggtgttaatttgttaatttaccgacaaggagagtattccttatctgaagtgcttgccagaagtgtttcagatcttggactttggaatgtttgcattatactcaccagatgagcatttcttatctgaaaatctgaaatgctccaatgattcttccctttgaggatcatgttgacgctcaaaaagtttcagatttcagattttagrttagggacattcagcctgtagatgttattttacagagcaggaagttgggtgtagtggttcacacttgtgatcccagctctttgggaggccaaggcaggaggattgcttaagcccaggagttggagaccagcctgggcaacgtagcaaggccctgtctctataaaaaataggagaaaactgaggctcagaaaggtcacctagctgatacaaccaggcctcaagcctagatctcctattctaaatcccacatcagtgtccctggctaccggtatttcagtgagcacaggtgatttctgttatagccacagagcagtagggagtaatagggcttagtgtgrggaaggtatgtggcccagggctatatcaggaactctcaccatgatttctggtggcttctagaattggcatttatttattttgttttagagacacggtctcgccctgtcacccaggctggagtgctatggcgcgatatcagttcactgcaacctctgcctctggggctcaagcgattctcttgcttcagcctcccaagttgctgggattacaggcacccaccatgatgcccggctaatttttgtatttttagtagagatggagtttcaccacgttggccaggctggtcttaaactcctgaccccaagtgatccatccgcctgggcgtcccaaaatactgggattacaggtgtgagccactgtacggggccaaacacatttttaaaacaaaaaacccagtgggatttttgttggaattggattgaatctgtatattaatatgggaagagttgacatcctacaatattgagctttctattccatgaacattgttttatccctcccggggaggtcttttggactgtttgtaatagcaattaatgacttgttagagaggagtggtaatgagcaacaagttctttttcataataatagtagcagtaatgataataaatggctcttcctgccaggtgtggtggctcacgcctggaatcccacacttcaggaggccgaggcaggtggattgctttgagcccaggagttcaagatcagcctggcaacatgacgaaaccctgtctctacggaaaaaatacaaaaattagccaggcacggtagcatacgcttgtagtcccagctactcaggaggctgaggtgagaggatcacctgagcctgggatgccaaggctgccgagcgccgagctcacaccgctgcactccagcctgggcgacagagcaagaccccctctcaaaataataataataataataataataatatataataatgactctttcacgtccactcccactcactcaggttgcacctctgaacagagcatttcgcactggggcagctcatgccctaagggagccccagggaatgctcagcctcttgagtagctggggtgacgggcacatgccaccatgcctggcttatttatttttttttaaagacatggtctcgctctgttgcccaggctgggtcttaacctcctggcctcaagcagtctccctgcctcagccttgcaaagttctgagatcrctcactgtgtaggatccaaagtcccacaggatccagggctcctgtgggctctctctcctgtgggcctggcagctttgctcacccttatggaacaacaccgcatggcgtgccctcttggtgatggaatttgtatttttgcctcccatggtgcagagagcgtcccatttccatctgggtccctaccttagtgcggggcygcctgtsggagggaagcttctcagagaatggccgttgaattaaccaaggctaaatctgtatgtgtggctgcctctagggaaacctgtggcctccaggctgggtttggcttacacagtatttttttaaaaaatattttaattagaacattaaaaagtgtggcagtatcaggcccagcgtggtggctgacacctgtaatcccagcactctgggaggccaaagcaggtggatcacatgaggccaggagttcragaccagcctggccaacatggcaaaaccctgtctctacaaaaagtacaaaaattagctgggcatggtggtgcgtgcctgtaatcccagctactcgggaggctgaggcaggagaatygcttgaatccaggaggtggaagttgcagtgagctgagatcacgctactgcattccagcctgggcgatgaagtgagaccaaaaaaaaaaaggcagtatcaaataaaaacttagacttacagcttctttaaaaaaaaaaaaaaaatagaggatctggtcatactggacccacagtgatgcccaccagctgtggrgcagctgagcagcggccccattctgcacgaggcctgtgcgctgcattcactctgaccctccagcccgctcaggctgctgtgctcatgttgcctctactggccctgagaagctctgcagtgccccctgcacctgtgctttgctcctggaaygctagagtgctttaaagaaaaataaagcttcttatggaacatttcaaacaccagagtgtagggcacaggagagtggaccccatacgcctccagcccccagttttcataactactcactcctcgccggtcttatttctttccgctgccccccaccgccgcaccagtcctggattattttaatgcaatccccagatgtcatatttcatcaggaaatgtttcagtcctctaaaattcaaggactcgccaggcatggcggctcatgcctgtaatcccagcacttcgggaggctgaggcaggagaatcacttgaagccaagtgttcgagatcagcctgggtagcatagcaagaccccgtctctacaaaaaacacaaacattagtcaagtgtggtggcacatgcctgtggtcccagttactcagaaggctgaggtgggaggatcacttgagcccaggaggttgaggctgcagtgagccatggttgtgccactgcactccaacctgggtgacagaacgagaccctgtctcaaaaaaaaaaaaaagtaaacttcaagtattctcctttctgaacataacacaacgccatcttcacaccttggaagtcaacagtaattcttcagcatcgttagatacccagacaacatttattcatagttccctgattgactgatgtttgattttgtttaacagtttttgtttgtttaattcaggatctaaacaagacccatacactgcagttgattaataaatctttcgtttgggagaggtcaggtatattcaggtataatttgcatacagtaaaatgcccccctcctcccttttttttgagacagggtcttgctctgtcacccaggctggagtgcaggggtgtgatcagggctcactacagcctctacctcccaggcttaaggggatcgtcccatctcagccccctgagtagctggggctacgggcatgtgccaccatactcggctaatttttatttttaattttagtagagacaaagtctcactatgttgcccaggctggtcttgttcgaacgtctgagttcaagtgatcctcttgcctcagcctcccaaagtgctaggattaggattacaggcatgagccactgcactgggccaacattttcctctttaagtgcaccagttcatgagtcttgacagatgtatgtgattctgtaatcagtatcataatcgaaatctagaacatttcatcactccgaaacagtcctgtcctacctctttgcaatcatcctcctccatcgggtaatcagcctctggcaactgccaatcttatttctgtccctgtagtttaacattttccaaagcgtcacataaatggaatgatagcaccgtgggctgctgtgccagcggtttttccttagcgacacgtcagctccctttccattcctaagcttcccttccatcccgtttcttccttgaaacatcatttgtatcacagtttcccacagtctggattttcctgattacgtccccctggagattgcttttgaaaagccacaaaagatctcattttcctgagtgaccttccttttggggcctgttcttgacagaaagcccgggaggccaggggtcagggctgccagcatcacgtgtctgttttttatctcctgagtgccaacagatgggaagtggatctgggggtcttgccacatccagttcagggtcactttctctgtagtgaggtccttggctccatcgagcatgaaaagagaaatacaaatgagactgacaaagaggaaagcattaggggaagcctgtggccacgagagtagacggtgcagggggcccactgcctcccgctgctgtgggaacggcgaggacatgggccagggtgtttctgccacttctgcaagcacagctctgggttttctgctgccatctgacctccaaagggacctcgcctcctctccttcctttcctggtccctgatgagatgggggaggtttctgtcactctgacaagtgcttgaaactccagacatgggctgtcgggaactgtcgggtactgccgtgcagagcgcatgttgtctgacctcctgacttcactgggccctgtcgggtgcaggagagggagctgtggatggcacagtgggacacgtgctctactggcctgggggtggtgggaatgcagaggaggggtatcccccattgggggtgtgtcagggatgagatgcccccacaggagcctaggaggccaagtgtggaggctgggaggtgaggacacgcggggctgttccaagggagccacatgctggtagagcccaggcacaggtcaccaagggagtcaggggtcgtggggggtcagaggtcataaaaggagttggggtcaccaaggaagtcaggtcatggagggagctgacacaggagagcatcttagagggccttgggaccttccaaggggtatggatttttttccccagctttattgaggtataaatgacaaaaattatatatatttatcagagcatctaagtttttttctttttctttctttcttttttttttttgagatggagtcttactctgtggcccaggctggagttcagtggcacaatcttggctcactgcaacctctgcctcctgggtccaagtgattctcctgcctcagcttcctgagtagctgggactacaggtgcctgccaccacgcccagctaatttttgtattttgagtagagatggggtttcaccatgttgaccgggctggtcttgaactcctgacctcaagtgatccacccacctcagcctcccaaagtgttgggattacaggcgtgagccaccatgcccagcctaagcatttttctttttttctttttgagactaagtctcgctcctgtcccccaggctgaagtgcaatggcgcaatctcggctcactgccacctccgcctcccggcttcaggcgattctcctgcttcagcctcccgagtagctgggattacaggcgcctgccaccacacccggctaatttttgtatttttagtagagacggggtttcaccatattggccaggctgatctcgaactgctgacctcaggtgatccgcctgcctcagccttccaaagtgttgggattacaggtgtgagccaccgcaccaggccagcatttttctttctttgtaaattttatttttcccagctttaaaatgacataattgacaaataaaaattttatacatatatttaaaattatgtaagttcaaagtatacagtgtgatgttctgatatacgtatcttagctgagcatggtggcttacacctgtaataccagctacttgggaggctgaggcgagaggatcacttgaagccaggaggtcaaggccagcttgggcaacatagcaagacatcgactctacaaaaacttaaaaataaattcaaaaattagctgggcatggtggtgtggacctgtcatcgcagcactttgggaggctgaggcaggagttggaggctgcagtgagctgtggtcacgccactgcactccagcctgggcaacggagcgaaccccgtctctagaaaaactaaaaaatcaatttaaaaaaatgacatatgtggatgacgctaacagggagctggggaagcctgtgtaggatggcggtgtctggagagcggtggccccatgaagcgccatttggagctggagtggagggagctgacttggaagcaggaagatgggccaggaggctgctggcctcagcctagcagaaattgaccagggccgctcggcacagatggagagccgagtgcaaatgcaggtgtcagtggatcagagaaagggctccaagccagtgcttttgaaaacataattctgggaccctcatcacccaccagaggtgatgttcttatctccattttacaaatggcagtgctgatcccaggagagggtgagtgacctggtcaaggctgacgttagcacatgagagctgggattccagcctggggcttcctgcaccacgcttttgctccctcggacccctagctcttgtcatggccaycccagcccacccctcctttccatcccctttgattgcacacaatagcagagccactttgtgccagatcagatgatcttactgtctgagggtatggccttttctttctgtcaccgatgggctgaataaccctgagtttctcttctctgtctccggaaaattagccctagtcctggccaccccctggctcagggtcactgctgaggtcgtcagaagagcatcaaggcttttgcgtgtgtggaacagcacagcaggctttctgagcttcacagacttgctcacggagtcctgatgtgaacacgtgctggaggacatggtcggggggaatgagggagcggcagcccaccagagccttagagcatcctgaggacacggccccaggatccttgggaagggctgtgagatgtgctgcctgaacgtgcccggggcgcactgcagacagggtaaagccgggggaggtgcaccttgcttggggagcagacaggaaccccgggtgctgggccactgggccctggagctttcacaggcctggagttgaattaccgcttcacccaccctgagcctcactgccttgtcaaggtggatagaaacccttgcgcactgcacagsgtggtgaggattaaacaaaataaaatagaaagcttcttgaatgctagccagcatgcagtaggcactcagtaagaagtcattcccttcgcctgttttgtctctgacctgtggccactcacacctgctttcacctccccctgcctgtagccagctgtctccagcagctgccctccccacgtgttcatcagagtccctgtccgcagagacagctgctggcttctgtctaagctccagcaaaccactttctgttttcaccaaagrctggcgtttccaaccattagccccatgccacaaggctctgaaggtcaagaaatctgggtccgcctagcagagcccactctccgtcctgccagagcaggctgcccccagctctgctgccatcgtgcctctgtgcctcagccgccaccccttctctcgccgtgggcacccatgaccctggagcctggagaacttggcagtagacgctaggttctgaaagggagctggtccaaagcagcttccccatgtgttgctaagggcaggggacagtctcaggagaaatcgagtccrctgcagaaaatccaaccggatttgcagtttccagaaatgttcctcagcgtcgcctgtgacgggaacaaaatgaaccgcacatctcggttcatctcggtccaagtgactcagtgcttttcccgccctccctcatcttccccacgcagtggactacagctgacttctgatcctgaacccagaaagactcctgctcccaatttaggcgtggagagccttaattggaacctttcatgctccgttctggagccacgtggtctgtgtgctccaggcctgggacagctgccacctctgtacggctggagccttgggctttctggttttgtttgttttttcttgagacagggtctcactctgtcaaccaggttggagtgcagtggcacaatcttggctcactgcaaccttcacctcagccttcaggctcaagtgatcctcctacctcagcctcccaagtagctgggatcacagacgcacacctctacacccggctaatttttgtatttttggtagagacaggctgtttcgccatgttgcccaggctggcctcaaactcctgagctatggcgtccacccacctcggcctcccaaagtgctgtactggtgtgagccactgcactccgccgagccttgggctttcggatgggctgtttgcactcgggaacctcagaagggtgctccccaagacagaacatcaccactgcaaacggagcccaccttgccaggcatttccccaactgccctgatgggaggggaaggtgtgtctttcatggcacacaggatgctycccgctgacatggacccagtgtcttaagctctgtttgcccgcaattcttttgtgtgggggaagacagggaccagacttaatttaatgtgattgtgtggcgccctggcagtgggatcagtgtggcttcctttatggagtgcagccctgccatagcmacctgcaggctgtcttctagagcctagaagagctttgttccgcagacatgacttcctttttttttttaatgggaaacggggagggcgtggggagaagggctctgatataaacagttaccaaggagacccgagtcggggttggaaaggttttctccttccctcggtccatacagagggaggaggggtgtgtgcccggtgcagggactcatgggaggcttcactctggaatcctgagtcctgcctgctggggctccagatgttgcagagttcttgggctcatgggggcagacgcaggcaggagctcagggaaattccgagaggactttggggtgtccaggagcactttgaggccacgggcccaggcaacttcctcaccagtacggaacaggggatgcacagggccgaactttccatctgctggcccctgctggtgtccaggagagagctgtgaccctcctttttccttaagtcctggagctgagagtgagaagccatggggtgcacgtactcrtctccacctgaggagcccgctctgagaaggtcagttcctgacactgtccctggcggcagactgccctcatgccccttggccaggggacgcctgcaccctcactcgagtgtgggagacttcctcctggyggggacctgctggaggcctgaagatgcggctgcctggagttaacagcaaggtcagccattcccagggttgctgcccctgtctctggcgagggactcagccaggcctaggcactggtggcccctctggtccaggacttgcacgctgcatttccctgcttccaaaggaaggaatttggactggagaccaggaaggcctcatgcaccctcttctctgcctataaataatcaggtcccccatgcaaatccaggtctgaggtcctccgatggaatggagcccattcagagcagtccagtgtgggccctctcaggctaagcccgtgaactttgcttcttggagcccccagcagggccttgggttgggaagggagtttcctggcaccctccccggcaggatgggtttaaccagcaggaacttgaaggaattgttctgtgttgcgccggtgacctagaggcacaggtccgcctccagctccttgggttcccttttcccccctggaccactcacacttcctgggtgaaccctagccttggggcagagcaggctggcacaccttgtccactctgacgttccagcccagaggctcccctgtccactcccagggccagccagcctggcattctgctttgtccaactgcgtcaggaggtcacatggaagccctcctcccccgccacttgccgggcttctgggatgggagccgagcttggaagttgccatcccttggcaccccgcttcccgtggggctgtctctccagggggccgttttctattcctgagaagacagcccagctcgtccaagaggcctttcccggtttcttcagccataagcgtctgctccctttgaagccctgtggcgtgaacctgtcctgtcccatccgtccctgtggcgtgaactgtgccatccatctatgtggtcttagcacatgccaccttgtgccatggatgtctttgaaatcacaggctgaccgccttccagggaatgcccttttttctactgggtgttaaccaagttccccagtcaggcactggggaggctgcaataaccagatgcagctctttaataatagtgtgggcacgagaggggcggggcctgtgcagtcccgtgcctgtctagtgtcagagccaggatttaaagccaggtccgccctgccacgtggctcttcccatcttgctgggatcctcctcggaggctgtcttcccctggctggaggattgggcctgtgaagtcacaggttgtctcgttctagtctcatgccctcggtgcctggcgcagtgcctcccgtgcccccacctggctggcctgtgttacccgccaggcactcacggggcactggagtttgctcttgtccttttcttcagcaaatcttcagatccactttgttggagatggaacttccctggaagcatctgtcctttgagtagagataggggttggcttttcagctgatgccaggtcagacctcagaggtggctagggagtgagaagtgccctcaacagcctcttagtccgcccctgccagcctcgtgctggacagagaactcagggctggccaccctaggaggagacacggcgtcctgtgccgtgtgctaggcgtcgcgctcatggcagggatacacagacagcccccaaggttattcaacccaggcttccagttaagccacaggaatgtgcagagtaaagtgccttggccgaccagtgtgtgtgccacagcgaagacggcgacagtagcgttgctgcgtgaggggcagggacggcctctgggagaggaaagttaagttctgtggtaaaggatgagtagaaggtgggaaggggtcacaggaagggccttgtaggcccagggagccgcgtggaaatgtgagtagcttagcgtagcccagagaggtgggaaatggggccgggccactgcgggaggggtgttcagaatcggccacttttctcttgtttaaaatatctgctctgctggggtccccttactcagggtgtagctattctaattatccttattgttggaggcttcaaaatcaatcagtcgggccccacatgtaccacttctgtttatttatatcggttggttggttgatttacagggtctccctctgtctcccgggctggaacccgggtgtttgaagctgcagtgagctatgatcgcaccgcacggtcatgtgatcgcacagtggtgagatcatcgcccactgcagcttcaaacacccaggttcaagggatcctcccacctcagcctcctgagtagctgggaccacaggcacagaccaccacaccgggctaattaaaaaaaatttttttttttagaggtagagtattgctgttttacccaggctggtctcaaactggcctcaagtgatcctcccaccttggtttcccaaagtgctggcattacaagtgtcggccactgagctaggttcttggatactctctttaagaaaatgcctcttcttggaagttgcagtgagccaagatcgtgccactgcactccagcctgggcgacaaagcgagactccatctcaaaaaaaaaaaagaaaaagaaaatgcctcttcaagtcttttgatagtttttctgatggaggatttgtctttttcctgttgatttgtagggctttcttacattctcgatcaaagtcttttgcccacatataagtacattacaaatatcctctcccacactgcagcttgcctttccttcctttaatggcgttttttattttattttattttattttattttattttattttttgagacagattctcactctgttgcccaggctggagtacagtggcgtgatctcggctcactgcaacctccgcctccctagttcaagtgattctcctgcctcagcctcccgagtaggtgagattacaggtgcgcgtcaccaggcccggctaatttttgtatttttagtagagacggggttttgccatgttggtcaggctgggctcaaactcctgactcaagtgatcctcccgcctcaacctcccaaagtgctggaattacgtgcatgagccactatgcccgaccaaaaatgtcattttaaatacaaaaatgtattttcatcttcaggtttgtcacttgattcagaatggccatatttcaaatctccaccacccagaggaaggtgtttcccaccttgctgtattcagccagcgtttttcacctccttcagcttgaaagtcctgggcaaggggcactgggcttgttcctctggccctgcaggcttggggcaagggtcagaaggaaacagaagaacggaaaatggggcggggtgaggggtggtgcgggggtagaaggccagaagtggacagtggacagaagattgtgtcaccccagcctgatcctgaggctggcgggcaccaggctgccctctggaggggatggaccaaggtgagggctgtagtcccaggaacgcagagaagggaaaaatgaaatgtggcccagtgcaggggaagcagagggggtctttgaatcccaggggagctgacccttgcgcaggaccttgagggcagagcgggggtcagccaggtgaggggactgtggcaggaaggctctgggtggaagcgatggcgtgcacaggattctgaggccaccatgcagggagggggtgtgaattaggcatcaagcttggtttgtggaggggagtggcaggtgacgctggagacagactctgaggggactcatgtgcccggatcccatgggtcgtgggagctgttgaagagcggagcagggaagtggcagatgtgagaggcaggggctggagaaggaagaggtgaagaggtggaaggtcaggctgaggtcaggccgtggggacctgggctgtgggtggggaggaagagggaagtggaaaccttggctcttccttgagggaaacaagcccatatctatctgggtgcaggagaggtcttggctttgcaaagcactggtgtcgcaagaggctttactgtaggggaaatgggaagggtgagctggtgcgggaggcctgggagccctggtgttggattagaggccagctgctggcttagcccctggggagtggcacgggacaaagctggaatgtcccctccctgtgctgccacagcatcccatgaaacctgcatctaaggacacccacgtcccgtgacacctgtgtcccatgacacctgcctcccacgctcattgcacacttttgtcttgcaggacctcctctgtcagagagagcagctttgtggaaaagatgaagaaaacggtgagtttcctgcatgtctttactcttctcaggaagcctcggccccgatgggcatgtaatcaagtctagcagacggctggcgtcaccrcatagaggatgtcccggtggccaggagagggaacgcagcccggctcgcttgggagtcattcttgcctaaccaaagccctgaagcagctctgctgttgctgggacagtttgtttccttgaatctttactttttgaacaaaccaaagtctaagaacagaccctccctctaactcacgaagcttctcccgtctggccctggcctgtccaggagcagaggtaaatctcacagagctgcggtcgtggcaccactgccattttctctccgctttgtttttgttacttttttttttttgagatggaatctcgctctgtcacccaggctggagtgcagtggcgcaatctcggttcactgcaagctccacctcccgggttcaagccattctcgtgcctcagcctcccgagtagctgggattacaggtgcgtgccaccacgcccagctaatttttgtatttttaatagagatgggatttcaccatgttggccagactggtcttgaactcctgacctcaggtgatccgcccgcctcagcctcccaaagtgctgggattacaggcgtgaaccaccgcacccagccaatttaactatttaattgtaggcatcagtactacatttacatagttaaaataaaaacatccactattcagtggaaagctcccctctgccacccactcatccccactgttcttattatttatggatccttctagagttcctgtatgaacatacaagtaaaacaaacagagactcttatttttaatttaaaaaaacctttattttattttagagacagggtctcactgtgttgcccaggctggagtgcagcggcgccatcatagctcactgcagcctcaaactcctagactcaagccatcctcctaccacagcctcccaagtagctgggactacaggtgcacaccaccacgcctggctaattttttaatttattcttcataggaacaggttctcgctatgttgcccaggctggtcttgaactcctggcctcaagcaatccttctgcctccgcctcccaaagtgctgggactgtaggtgcgagccattgcatccagcctacacttttcttaaaacacaaaacgtggcatactatgtgcactgttccagaccttgctttttttttttttttttttttttttttgagacagagtctcgctctgtcgcccaggctggagtgcaatggcacggtcttggctcactgcaaccttcacctcctcggttcaagtgattctcccgcatcagcctccggagtagttggggttagacgcctgccaccgtgcctggctaatttttgtatttttagtagagacggggtttcaccatgttgaccaggctggtctcaaactgctgacctcgtgatccatctgcctcggtctcccaaagtgctgggattacaggcgtgagccactgcgcccggctgaccttgctttaaaaaaaaaagaacacaaaacaacttgatatgtctcaaagatccttccatatcaatacaaagatactgccatcatcttagctgtaccatgattccattatatggccatctggattcactgtaacgcacttaaccctgtcctattaaagatgggcactggggctgttgctactctttggctcttaccaacaatgtcactgtgaatatgtagctcggtttgcacatttcaaatacaaagcagtcccagaagtggaattgctggattggaaggtagatgtgtttgcaatcatgatagaagctacaaatcgtccccgtaggagtcacaccgtggcacgcgctcaagaatagcgacrtgtgagaaaactgttccccacagccttgccaacagtttgttattaaagtttagatttttgtcagttttctaggcttaaaaaaaaaactcagtatagttgtaatttacatttttatgaatgagattcagtagattttcacccacctaggtctagatggcttcgtttctttttcttttttcttttcttttttttttttttttttttgagacagggtctcgctttgttgcccaggctggagtgcagtggtgtgatctcagctcactgcaatctccacctcccgggttcaagcaattctcatgcctcattctcctgagtagctgggattacaggtgcgtgctaccatgcctggctaacttttgtattttcagtagagacagggttttgccatgttggccaggctggtctcgaactcctgacctcaggtcatccactcaacttggcctcccaaagttctggaattacaggcctgaaccaccgcacccagcctcttttttctttttttaatagattctctcttcacatcttttgcctgcttttctgttgggattgatctttctccttgaaattattagggagatgaatctcttgtctgtgatataagttgaaaatatcttgcccgttaaagagtttgtcttttagtgagattccatctcttaaaaaaaagtttgtctttcaacctagctgatcgcatttttatttgttttgctgtgtaaaagttacagagtcacctatatgattctttcttttcgtgacttctggtcttagagtcataatttgaaggtcttccccatgctaaagagataaagatattcctgtattttttttttctagtacttttagggttttgtttttcatattcaaaatttaaaatctgatctattgggaatttatcctgatgtaagatgtgaggtatgaatccaactctacattttacatagctgtctaaacaccatgtattagagtccatctttcccccactggtttgaaatgccacctttatcatatacttaattcctgggctgggcgcagtggctcatgcctgtaatcccaacactttgggaggccgagatgggcaggtcgcttgagcccaggagtttgagaccagcctgggcaacatggcgaaaccccatctccacaaaaaatagaaaaattagtgggacacagtggtgcgcacctatagtccccgctacctgagaggctgaagtgggaggatagcttgagcttgggaggcacagattgcagtgaccactggactcaaacctgggcaacagctacaccctgtgtcaaataataataataatagctgggtctctgggttcttttcactgggcgcaacgtgttcaaggttcacccacactgtagcatatgttagtacttcctttttattgccaaataatgttttaatatatggattcttacttatttttccgtgacttttaggatcaatttgttgaggaaaaaaaagctgttcagatttttttttttttttttttttttggtagagactgggtctcactctgttgcccaggctgttctcaaactcctgggcttaagcagtcctcctggtgtggcctcccagggtactgggattacaggtgtgagccactgcacccagctggttcagatttctattacatcatgccacatttctctagtgacataaatagagctgccatttttgtgggtcgagactccctgtccataatcggggtgcttttccattggcgtgagtcctttgtgtgtagttcagtagcttctgacacatctcttacaaagtttatttctaggtattttatatattttgatgctcctgtaaatatttagctgctatcttaggtcatcttttgttctcttaacctgataatcatgagcactttctcttctattaagtatttttacggtgattattttaaaatatccttttgggcgaaaaccctgtctctactaaaaatacaaaaattagccgggcgtggtggcatgcacctgtagtcccaggtactcgggaggctgatgcaggagaatcacttgaacccgggaggcggaggttgcattgagccaagatcgcaccactgcactccagcctggccaacagagcaagattccatctaaaaaaaaaaaatccttttggccgggtgcagtggctcatgtctgtaatcccagcactttgggaggctgagacgggcggatcacctgaggtcaggagctttgagaccagctggaccaacatggtgaaaccctgtctctactaaaaacacaaaaaattagccaggcatggtgacggacacctgtaatcccagctattcaggaggctgaggcaggaaaatcgcttgaacccaggaggcagaggtttcagtgagccgagatcgcaccactgcactccagcctaggcgacaagagcaaaactctgtctcaagaaaaaaaaaaacaatttttaatgatttaacaatgatttgtrgaaaattcaggaactttaaaaagtataagaacatttattgtaatccctaagttttttttggtggtggttttgttttgagactcagtctcactcctgtcacccaggctggagtgcagtggctcaatcacagctcacttcagcctcaacctcccaggctcaagtgatcctcccacctcagcctcccaagtagctagaaccataggcatgcgccaccacacccagataaattttttgtatttttagtagagacagggttttgccatgttgcccaggctggtctcaaactcctgggctcaagtcatcctcttacctcggcctcccaaagtactaggattacagaagtgagccacggcacccggccgcgtaagttttattttgtatgaggtgggattcagtgtgaaaactagagactactttaggcattttaatctggaagggatttcacacagggaagggggtacttccaggttactggaggggctgaaggagcaggttggtctctaagatatcacagaagcaacctgcaaggtagctgctctgttcgaatgcagcctgaaactgttgagttcaggacacaccacgtgtagctgtgatccaggataagaagctacttctacagctgcctctgaacatcacataagccagtagccaggactaggaacttgcagtctggctaccaaaactattagaaatacctcaggtggctgggcgcggtggctcacgcccgtaatcccagcactttgggaggccaaggtgggcagatcacctgaggtcaggagttcgagaccagcctggccaacgtgttgaaacccagtctctactaaaaattcaaaaaaattagcctagcatagtggtgggtgcctgtaatcccagctactcaggaggctgaggcacgagaattgcttgaacccaggaggcagaggttgcagtgaactgagatcgtgccattacactccaatctgggcgtcagagcgagactccgtctcacacacaaaaataaaaaaaagaaaagaaaaaaagaaaaatgccttaggcactgaagaccaggcactgcagagaacctcacatgtgcatgaggggccaggaagccttggcctcccttccacccttcagatcttgcaaagcacgttcaattggctgaaccgaattggctgcaactccagccccaacgggctctggggaataggatttcaggcttttcaacagctgctggaggaggagggtggactgacgagtatgtgagccagcccctaggacctttccctgttgtaaaattttataatgaatatgtatttaaccagcaaaacacatccagaatgccccatttagggaccctcggtatatttcttgccagtctgttttctttgtgcctgtgggtatagaaagaaaatacatatgtatgttttgatatacatatctattatttatataacacaattggattgtatagccagccctgcatatccgtgagttcggagttcaagaattcaactgcagaytgaaaatatttggagaaaaaatggattgttgtgtctgtcctgaacacatactgtcatcttactgttccctaaacaatacagcatagcaactatttacagagaatttacattacattaagtattacattaataagtaatctagagatgatttaaagtatgttggaggatgtgtgtaggctacacacaaataccacatcattttatagcagggacttgagcatccttggatttttgttttttgggtttttttgtgatggagttttgctcttgtagcccaggstggagtgcaatggcgcgatctcggctcaccacaacctctgcctcccaggtccaagcgattctcctgcctcagcctcccaagtagctgggattacaggcatgtgccaccatgcccggctaattttgtatttttagtagagacagggttttctccatattggtcaggctggtcttgaactctcgacctcaagtcatccacccgccttggcctcccaaagtgctgggattataggcgtgagccactggaggtggagtcttgctctgtcacccaggctggagtgcagtggcgtgttctcagttcactgcaacctccacctcctgggttcaagctgttttcctgcctcagcctccctagtaactgggattacaggtgcacgccaccatgcccggctaatttttgtagttttagtagagatggagtttcaccatgttggtcaggctggtcttgaactcctgacctcaggtaatctgccagcctcagcctcccaaagtgctgggatcacaggtgtgagccaccacgcccggctgcatccttggatgtaagtatctatgggaggtcctggaaccattcccccacggataggggctatacatttggttactttttttaactttgttttttccccgtgtcatgaaaatgtcagaagtgtgatcttgagcagccgcgtgtgtgagattgccttggtgacctttgccctcctttgccacagtggctgtgacagtgagaagcaagtcccagaggaacttagaagggactcaaagccaggaaggaaagggggcggcctgkagggcccccgcctgccaggcctgcccagtgggtgttcaccggagccgtggctgaggtctgtggccctcaccaaccctgtgtctgccttccttaggggaggaacatcatcgtgttctacggctcccagacggggactgcagaggagtttgccaaccgcctgtccaaggacgcccaccgctacgggatgcgaggcatgtcagcggaccctgaggagtatgacctggtaagctgccaccgcgtgctggccccagatggaggcagtgggtaggacagggagcaggtctgtagggcgcccctcagcagggggaggcyggcagggagtggggtcctgggaagacgtcctcggaagttgccttcccgtgagggtcattgccatccctgcccgggctgactgacggaagggccattcctgcagttgcagccacgtgccaggcatcgtttccccaggactggccctcccctgagtgccggctgccctcctggcggccgccacatctcccaaaccaaacccaccctccccagctgctccactcccctctccttcgaggtcttggtgacgggcacyaccccacagccctctccaggctgcatttgcagttgatgaacagtttagttagatatcagtgtgcaccggggctgtgcggtgcctgggagctttggaatgaggttcccagggtggccccagacmtgcatcagctcargaggctgcattctgatggctcttttgtgccaagcttcactttcctctagaaacacatcctctccgctccagcctaacacgggtgaccttgtcctgcccacctggcacaaatgcccatgccccagcccctccgtgttgttacttctctctgatcccacgacactcagacatccctggcctggtgccaccctgggcaggacctggccttccccatctggtgcgggttgaaccttgaacaggctcagtcatggccggggcgcggtcctgtccctgtttctgcaggccgacctgagcagcctgccrgagatcgacaacgccctggtggttttctgcatggccacctacggtgagggagaccccaccgacaatgcccaggacttctacgactggctgcaggagacagacgtggatctctctggggtcaagttcgcggtgagtcacccagagactgctatgggctcccggtggcctgcggtgcctccctggggactccagatccatgtatctgaaaggcagccctccagacccccaccctgtcctcagcagccagggcaggccacttgtgagaccctctcctctgccccagaccccagcactacgagaatgtcccctccctgtccccagccccagtcggctccagggggcattgggtgctggagactaaaggcaagaaaggtctggctggacgactgagacctgcctggcctcggagagctggagccccagcccggtggggagggtgggctggccccgcttccctgtgggttgaggctggcagtggacggggcaggctgtgggctgcaggtcaaccagatgaagcctcttcagtggcccagtgttccttgcagtgcgaggcgcctggtggaacggaggcctgcaggtgttgccagcagctcagccagtgctgtggggcctcccgccctgcccccatggcccctcccactggtcaggtcgagggccaggcctcagagcggcccctgtgtccacgcaggtgtttggtcttgggaacaagacctacgagcacttcaatgccatgggcaagtacgtggacaagcggctggagcagctcggcgcccagcgcatctttgagctggggttgggcgacgacgatgggaagtgagtgcccaccctgccaccatgatcagcgcggcgggcttaggcaggggccgtggaacgtgaggggcgcgcacaccattgtgtcagctgagactcagcgacacgcacctccaacacagagggaaggggctctcctgcctctgccctgcccctgccagttttgcttttcggcttgcccaactccctggagccttcctgatgctctgggtttatgtcgctgggtgccccagggtgcacagtcctgagctttggggatggggtggggtcggggcntgcctggcaccaggtaccgttgccacatgggcctcccctgagccrctccccctctcctctcctcggcccagcttggaggaggacttcatcacctggcgagagcagttctggccggccgtgtgtgaacactttggggtggaagccactggcgaggagtccaggtgagcaagtgcccgcaggtgcggtgggtggcctgggcgggtcctgtgccgagggcagccaccctggaacaagggctggcagtgggtcgcagcaaggttagaagacactccgtcatagggtcgaggagggaccttggtcccagccaaggactcactctgccacgttgctctgcactgccctggggcagcggggtgcatcccacctctcgacaaggacacatcgcatcgggctctgtggctaggttcaactttggcaaaagggctcatttccttaaaatctgcctccacagacttggccaaaaacataacgttcctctctgtgcccttgatggcccctgggtgctgcccgggcttccttaccttctcccagatggaagcctgcccagccctgccccggcttctgggcgtctggcccccggcagctccacgcygcctccctccttgctccctcgcctgccctccttgtgcatctgcagcaggggctcccctgcttcttgtcgtatgtacctgggacctcaccccaaaggccatgcacggtctcccctgtagtccaacccctccctctcgggactgacccctgccgcttcccggcctcacccttggtctcccctttccagcattcgccagtacgagcttgtggtccacaccgacatagatgcggccaaggtgtacatgggggagatgggccggctgaagagctacgagaaccagaagccgtgagtggagggagcgtggcttggggcagacggctctatggccactggtgcaccccaggctcagtctgccgtgtatccccatatccccacagggcccttctcaccagaccccgtgncccgagtgggtgtgagtgtccacgacctgtccacggcccggccccaggagactggcactcgcccagtttgtactgagctcacttagccaccttactctgcactgcccagggcagcggggcacatcccacttctcgactaggacagtgcattggcctctgtggctaggatcctctttggcagaagggctcattttcttagaatctatctccatagatagacttgggggagaaacctggcgttcctctctgtgcccttgatggcccctggttgctgcccagattcctgcccgagccacccagggaagtcctcgtgccactgcatccaagaccagctgccctgctttctgtaggcctgccccagcctggctggagcgagaagccctgcatgtcggtggctttccggagtgcaagtttctctcttgtccacrgtgtagtccaggacgtgtgggggtgggggagctgtgctcctcatttggggaccagccaccttccagcctgtggcaccgtcagcttgggcctcacagttcttttaggggccagcctcagtttccacatctgtaaacagacactgatgacccagctctgcccatgtggtgggactatagagagaactgcattagggctgggcgaggtggctcacagctctaatcccagcactctgggaggccgaggtgggtgaatcacctgaggtcaggagttcaagaccagcctggccaacatggtgaaaccccgtctctagtaaaaatataaaagttaaccaggcatggtggcgaatgcctgtaattccagctgctcaggaggctgaggcaggagaattgcttgaacctgggaggcagaggttgcagtgagccgagatcgcgccgctgcactccagcctgggtggcagagcgaaactctgtctcaaaaaaaaaaagagaactgcattggaccaggctgggagagcccttgatgtaaccggtgagatttcctcatggagatctctgagattccctgtgctttgtgcaaccagaagggtccttggagacagagactcagatcaaagccccggccgctcactgtgcttctctcctccccacccagcccctttgatgccaagaatccgttcctggctgcagtcaccaccaaccggaagctgaaccagggaaccgagcgccacctcatgcacctggaattggacatctcggactccaaaatcaggtaccagctgccactgtcaccccctgaaccctcactctgggcctcctgacctggggcagggccagccttccgcccctcccgagcctcacatctccctccaggtatgaatctggggaccacgtggctgtgtacccagccaacgactctgctctcgtcaaccagctgggcaaaatcctgggtgccgacctggacgtcgtcatgtccctgaacaacctggatggtgagtgccacagtcagggcgccctgccgggctcaggcagccgcgggattgggcctgtaggaaggccctgggttgagcttctgcttaggcctgaagccccggtgcctgggaggcccttgcaccgagactccacggttacaggatcccaagcaaacgggaggcggggtggccctaggggtctagccctctctgtcggggttccccctaccccgtcactgtcatagtcctttaagggagtgaggtgctgaggcctggtggcagaggcagccctggctcccccatggccactgtgtcctgctgggaaggagggcctggctccacgacccacctctgccggcctggggctgcccccacctcctcactgaagtcaggagtcagcagccctcccaggcccccaagggtgcacagtggtgccgagtggcagtagccattacgcggggctgcctgggcctggtggggctgcccagcctgagcctcccgctgtgaagccctcggaccccactggtcaccaacctgggccgagcccacctcgccccacccctgcttgccggtcctcagctgccatgccagggctgcccttactgtcggcttccacagcccgcctgtagggaagcctgggcggggctgtgtcagaccgtgtagtgtgcggtgaaagcacagcgggtgcgttagtgtgcaggggctcccccgcacctcccctagcagggtcctgcctctgatgaggacttcctgtctggttggaggccccagacttggccccagggccagggaggcatcagagagcataggccttgtttccagcaccagctggggcacctgttgcygcagagctggcccaaggtgtcaccccctccngccgcagccacccatccccaggaggcggccgcctaccccaagtcctgcctgtstcttccctgcagaggagtccaacaagaagcacccattcccgtgccctacgtcctaccgcacggccctcacctactacctggacatcaccaacccgccgcgtaccaacgtgctgtacgagctggcgcagtacgcctcggagccctcggagcaggagctgctgcgcaagatggcctcctcctccggcgagggcaaggtgcgccccctyagcccccrcaacctccgccccgtcaccccgccgttttccgagctccgtgggccccaatcagccccatctcacccccgtgtctcttaggagctgtacctgagctgggtggtggaggcccggaggcacatcctggccatcctgcaggactgcccgtccctgcggccccccatcgaccacctgtgtgagctgctgccgcgcctgcaggcccgctactactccatcgcctcatcctccaaggtgagggccggcactgccctgccagccacacgctggaggcccagccctgctcacagcaggcagagtgcaaggcggcacaggagctccgagatctgagccctgagctccagttccagccccagcgcagctccaaatgcctccccaggctgtggactcagtcgggctggcttgtgagattctcagcatctgtccagccccagtccccagaaccagtccgggaagccgctggggagggggcctctgaggtttggrtgccaggtgggstggaagaggccctgggtgagtggggctggcctgcagaacgggacttggggccggggctgggcaagggcctcggyktggcggtggagctcacacggccctccccacaggtccaccccaactctgtgcacatctgtgcggtggttgtggagtacgagaccaaggcyggccgcatcaacaagggcgtggccaccaactggctgcgggccaaggagcctgycggggagaacggcggccgtgcgctggtgcccatgttcgtgcgcaagtcccagttccgcctgcccttcaaggccaccacgcctgtcatcatggtgggccccggcaccggggtggcacccttcataggcttcatccaggagcgggcctggctgcgacagcagggtgagtggggtcccatgggggagagggggtgaygaytgggagccccgcgctcaccccggcccctgccacgcaggcaaggaggtgggggagacgctgctgtactacggctgccgccgctcrgatgaggactacctgtaccgggaggagctggcgcagttccacagggacggtgcgctcacccagctcaacgtggccttctcccgggagcagtcccacaaggtgagacgggcgggcacccacgaaggtgggcatgaggctggcagggccacagccacagtgcccccctcacagcaccacccttggccccaggtctacgtccagcacctgctaaagcaagaccgagagcacctgtggaagttgatcgaaggcggtgcccacatctacgtctgtgggtgagtgagtggggtcactggaatagggggcagggaggacaaggccctgcctgccacagttggcccagcccccagcaccccctcttcctgcccagggatgcacggaacatggccagggatgtgcagaacaccttctacgacatcgtggctgagctcggggccatggagcacgcgcaggcggtggactacatcaagaaactgatgaccaagggccgctactccctggacgtgtggagctaggggcctgcctgccccacccaccccacagactccggcctgtaatcagctctcctggctccctcccgtagtctcctgggtgtgtttggcttggccttggcatgggcgcaggcccagtgacaaagactcctctgggcctggggtgcatcctcctcagcccccaggccaggtgaggtccaccggcccctggcagcacagcccagggcctgcatgggggcaccgggctccatgcctctggaggcytctggccctcggtggctgcacagaagggctctttctctctgctgagctgggcccagcccctccacrtgatttccagtgagtgtaaataattttaaataacctctggcccttggaataaagttctgttttctrtatttgcctggtattgtgtgagtagatctgggacctccacctgcatcaacttaactaactcagaccccaggaacccatgtggtggggccacccagccctcccctcccccaggagaacacacacgctcaggccacctctgggcctctctttattgagggcactgggcccaggtcttccttcagggcccacagcgcccataaaacccaagggagaatagaagagaccccctgatacacgcacactcgaggggcgcctcccatcccctcccacaacacacaggacagaagcccctctgggccggcaggggaaggcccagcctcaatccttcttgctcccgtgccgctgactgtgaaacttgtggtgcacaaccctcagggtggtgaagaaattgccgaggaaaaggagraggaagggaaagccgcacataagcacctgccggaggaatagggtgagggctggacatgggcctggccccccatccatcctgtccagggaccccggctcacctgccactccttgcactgagggtcctgggccaggttgaacaacgtcagcgcgttaaaaagctgccagaactaagcagggaggaggcattttactcagaagtaccagtccctgctggagcccgaaaccggcgcagaggacggacagacaggcagggacacagaggcacgacttacgtgtccaaagaaaagaaaaggcagcaggaaggtgaggccccgccacatccaggactggaagccctctgcggggaggaaggtcagggcacaggacggccagggacagaggggacgctaccactcagacccgggatgggaggaaaggggaatgtccagatgccagggccactcccgactcacccacagtgaggtccatggtgtgccgctcgcccagcgcccgcaggcggtagaggcagccgctctggtagtagtactggagaaactgcacgaagcctgggccgggcggaggacagaggagcagggctgagccccgggaggggttccctgcccctgccccccaccacgggtgcctccagggctcagcacagacatctgggacactcactctggtacatggaaaaggagaggaattggttccggaatttctggtacatgagaccgtcgggcctaaggtaaaaagtggagggcagtgtggggacccttggggatgccgtgtatcccctccttgtcccagctcctgcccctgccggggcccagccactcaccacgtcagcatgactcccgacaggaaggtggacacgtagtgatggaacacccaccagcctttgatcctggagcagagagccaccatcacccccagcgcctgttcctgcttcccggagggtcctggcaccccattccatgctcccctccctcagggcccgccctgcccaccgggagccgttgttgatgaggatgctctcccggatggtcagggtgcagtagtaccagaccagcaggaagttgaaggcagcatctgtcaccctgcggagggaggggaccgagggttggtactgcagcgactggggatggggtgggtcctcggccggggtgggacgcccacctggagttgagcaggaagcggcaagtgaaggagatgaggatgaggatgatggtgaggtagagcttgaacttctcatactcgtccttgtaggcaaacctggggggcgcaggccggtgagacgggtggggtgctggtggggcccatgtgtgcccccaccccgggagggcagctgagccaagggtagtcggatggaggagaaggccgggttggggggtggaggggaaggccaggtggggtggggggtggaggggaaaaccaggttggggggaaagccgggtggaggggtggaggggaaggccgggtggggggctggaggggaaggccaggtggggggctggaggggaagaaggccgggtggggggctggaggggaaggccgggtgggggggtggaggggaaggcggggagggggtgtggaggggaaggcggggagggggtgtggaggggaaggccgggtgggtgtgtggaggggaaggccgggtgggtgtgtggaggggaaggccgggtgggtgtgtggaggggaaggccgggtgggggggtggaggggaaggccgggtggggtggggggtggaggggaaggccgggtggggtggggggtggaggggaaggccgggttggggggtggaggggaaggccgggttccgggggaaggctgggtggaggggtggaggttgagggggggaggggggtagggggctaggggtggaggggtggaggttggggggtggaggctcggcctgattacttagcctgcttgctcaggagcgtgacgttgacgttccccagaaccaggctcaggtacaatctagggaagggggtggcggggtgaggagaagcccgagtgacagacaagccaccggtactcagccaagcctgccaggccagagcctgggccaccaccccaccccctcacccgctgctttccgcagggccttggcatcgggttctgaccttggaggctgcagacccactccctgccatgcccagccttcctggccgcctgctccggaatcctgacccccggaggaaacagtgttcccccccatctccagagtcttgcctgaaactcccccacctcagggcacaagagaacccggctctccctccctgctgagggccgtccccctgtccccgattgctcccctgtgcgatggccaccacctaccccccagctccctgccacctcccctccagaacctgcagtactaggttccacttcagagacccacacgcctggccacatctaggacgacctcccaaaccagaacagaaactcagagctctgactgtgggctgaccccaagtactcagcctcccggggcgtttcttcccaccacgaccccccttgtccctcaccgaggcccccacgctctccagtcccagatctcatcagagctggctgagtccccaggccacccgccaattacaccacttttttgccaatccccttcatgtccagcctccacacccaccaactgagatcatcttgcccttctctgccagagatactccaagaggtgacagcaaagtcacggtcactttctcagcacctgccccagacacatgggctcttgttcacactcaagccaaacagacagaggctcagcatggttaggcaatttgccccaaggccacaaagaacttctgggacagccatgcttctccctctacagaatgctcccggcacagtgctccccaagcaggccagcttcagcctccactgccaacccaccaggctgcggatgtgtccccactcagctcgccatctggttcccagcactcgcctctccacatcctctccccgaaaccctctaccctgtctcctcccacctcgggccccacctgcaacactgcagagaagacagcctgactcctgctctatggggagcactatgccaggagcactgtgccaggagcactcctcactctcatctctgcaccctccatcccccactagcccttctcgctctccccaggcttccctccatcacctcctgcccttctcctgggtctttcccctctcggcccctcttctcagcaggtggatgtgctcgagtcttcccagaggcaaagtaaccccacaaacaggcagtagctgcccctcaacccagtgctaatttccagttcctagttgctaattctctccctccactcacagccaagctctaaaaagtctcccagagggctgggtgcggtggctcacacctgtaatcccagcactttgggaggccgaggcgggtggatcatgaggtcagaagatcgagaccagcctgaccaacatggtgaaaccccatctctactaaaaatacaaaatacaaaaatacaaaaattagccgggtgtggtggcgggcacctgtaatcccagctactccggaggctgaggcaggagaatcgcttgaaccacggagacagaggttgcagtgagccgagatcaagtgactgcactccagcctagcgacagagtgagactctgtctcaaaaaaaaaaaaaaaaaaaaaaagtctcctagacttggctgtctcccttccttggctcttctgtcatccccaagatcgacatccatccccttccaccaaatggttctgccaagatgacccaacttccaggaagcgcatccccttccttatcacaggactgaccccaggctacggacactcctttcttctccctgccttctgggccacgccctctcccagctatctccctgcctgcagcctctgctgggattttttgctcagcagggggttttgcactgccccatccgtcctcctgggtgacagctgctggcctttccaggtgcacattccaccgcccccgcccgcctactgggctcaaggcaagagctgcagcccagcaaagcctctgatctcttggctgcctctcacctcccgccccgacctctagccactacaagttctcatggcccgtccacctgctgctacctctcgccctcagcccatgtgtctgcctcattttttttatttatttacttatttattttttaagacagagtctcactctgttgcccaggctacagtccggtggtgcgatctcagctcactgcagcctccgcctcccgggttcaagtgattctcctgtctcagcctcccaagtagctgggattacaggtgcatgccacaatgcccggctaatttttgtatttttagtagagatgggttttaccatgttgcccaggcgggtcttgaactcccgacctcaagcgatctgccttggcttcccaaaaaagtgctgggattacaggcatgagccaccgcgcccagcctatttgttctttttaaataaatagagacatagggtctcagtatgtcacccaggctggtcttgaactcctgagttcaagtgatcctcccacctccatctcccagagtgctgagattacaggtgaaagccaccacgcccggcccactctttattctgtaagactcagcccacccatcccctaatccaggaagccttctgcgacctcctggactgggtcaggtgtccctcactgtgccacctcattccccatgctacaaagcacctatcacagtgaaatgtcactctcagccaggtgtctcccctgaagtcagcactgtgcctcattgctcagcctgtactgggcccagggaacatttgctgactataatgaccaagaggaggcagcacccggcttcaggagtggctgtgaactgagctgggggtggcggtgggggccctcacccattcttcttaggcaaataggcctccatgtcaaagaagaggccttggcgctctttcatctggttctccagctcctgtgcggccccctcggcctctgctgggagggagggtttgcatctgcgggtaaggccagaaacagtcagggcaagaggactcccaagtgtcctccctgactcccacaggggcagaagggcaaacacggcccagagaggggaggggcggtgcccagggtctcacagcgccagccctcccaccccacactctgcccatggcgggtggggtaggggatcctaacttcttcagggcgagggccagctcctggagccgcttcttctgccgcgtgatggagctggtgcaattgttctraagtttggtcagctcctccagcttcaggcggtagagccgatgggtctcctgggggccggaggggagaggctcaggccagttggggagctactgagccagagcctgcaggcaggacgtggcgctcaggctcccccagggctgctgggagggtctcgctcagcgggaaaggaggtagaactgtgcctgcccagggatgaggtggctgtctccccaaggcaggcaaggacctgggtgtcctcctgtgagcccagagacccccacagcacccctcctccaaaaacagactaggtgtttttgtttttgtttttgttttgagacagtctcgttctgttgcccaggctgaagtgcaatggc

SEQ ID NO: 96072 - DNA, 59937 bp, Homo sapiens
  misc_feature (1)...(59937): n = A,T,C or G
ttacagagcatctataacatcccaacattgacctgggagctaacactgtaatgaagaatgacctagaactcttgtcctgcatgagctcagtctgattgagaaaaaaagaaatgtgcacaagtacagtgaagtgaagggagacaaggtctcattctccctgggagaggctgtagttgggaagacctgggggattcgtggagttgcctcagagttggccctcagaagcagcgtgggctctagggactgaggagggtgtggcagaccacggcaaaagcaaggtcacagagatgggacagctgagacaggccatgcatactgcatgcatcctgaccatagggacagcactgggctatggaccacatgcatcccacaggcatggaggaactggggcctgcaggtggctgacagctaagaaagctcatgagggcagtgagacgctctcctcaacccatgctgcatggcccctgtgttccgggaccttctcagctctctaacgccttcaccctcacctccctaaagtggggctggccagagtcaaacacctcccaagctccgcacatccagctccacaggtgctgccgccacagggcacccaggcctcacctcccacctttttgcccctccgtctctgctgggatacctgttcccaggcccagcatcccctgatgcagctgacacctgccccaatggtggcacttcttttggaagaagctggctattctaactgttcctccacttctgtttccataaagctcctcctcaggaggccagatgacacgggaagggacaagcctcagctctccagcccccaagcgcacggcaccccaactgcagcctcacattgcacttaccatgcccgccgcaggaggacacctctccaccaatgaggacacagaggactgggtaaagcggcagcttgtgcaaggtcacctagctagcaagtggtcaagccaggactcaacccagggcctctgacacacgctaggctagcactttctccaggcagaactgtgctctgcttttcggtctgggcttgtgactgctgcttagtaagcaataggatgacccctggtgttcacttaaaatgacagcagggccgggctcacgcctataatcccagtacttcggaaggctgaggtgggccgatcatttgagaccagcctggccaacatggtgaaaccctgtctctactaaagatacaaaaattagcctggcatgatggcgcacgcctataatcccagctactggagaggctgaggcacgagaataacctgagcctaggaagcagaggctgcagtgggctgagatcacatcactgcactccagcctgggcaacagagcaagactctgtctccaacaacaacaacaacaaaaaacacacaaaacaaaaaaacccgcaaatgacaggataccagcttggttgtttagccatctcttatccccacagatggctgacccaactacaagcatttccaggcagagtgaaaaaaatcaagggccagcaagactggtgttcggaggtgagagtcctgaaagagagtccatcatgtgagcagtgggcctgagtgaggaggcacacttctgggccgtggtgctcagagtgcagagcctctgcagcgcaacacctccgaggataggaaggtcacaaccaccgaagacatctctcctgctcgtgatttttaaagctgggcctcaggtaggccccagtctgcctgcctgtgtcggtgccggttccaccctctgagtgcttctcagggcccagcactgcactgtgctgtgtttttttggacatgcactaaacgtggacccttccgatggctctcaggtgggccccgggagcccttcagaggtgttcaacacgattgggtgactgaatgagatggttggtccgaatccagacagcgagtggtggcacaccaggacttgacccagaccacccactgctcccgctaactgccacagcccacaacagtttcatcttatcataccctcaggtggcgtctactgctcacctcccccaggaattctttgggtgagctgtagcccatcccattcccgtttggcctcgcaggggaccctccagggtgcagggctccccacacctgcccgctgcacctcatgcctgtgtaggatgctggaggcagatgctcccagcacccaacatctgcacgtgctctgaaggttgaaagagcacttacagggacagcagcctaaccctttcccccggagtcatctgtcccttctgatgggccttttgcttttatagagagatgctccctgcagtcgggctggcaatggcgacagataaattccatgtcttacctcacaccaaccgaatcagaacctcgagggcttgtgactcaggaatccatgattttaaaaactttccggccaggcacggtggctcacacctgtaatcccagcactttgggaggctgaggtgggcagaccacctaaggtcaggagttccagaccagcctggccaacatggtgaaaccctgtctctactaaaaatagaaaagttagccgggtgtggtggcaggcgcctgtaatcccagctactcaggacagtgaggcaagagaattgcttgaacccgggaggcggagattgcagtgagccaagatcgcgccattgcactccagcctggggtacaagagcgagacttcgttgcaaaaaaataaaaataaaaataaaaactttccctaataatgctgacacagctcggggacagatggggattggcaaccacctaggaactgcaaccccctcacatgacagacaaggaaatagaaaccagagagggggatgacttgccaaaagtaacacagtggtaggaactgggccctgtctagaagccaggcttcctgattctggctccaccacaccaatatacctcatccctatctggccaaggcccttccccaccacctggaaccagttacctctgcaagccaataagcttccacttctgaaaatccataatgtgcaaaggggaggaggcccaatgtttcacgggcttagcgtagcagccatagctggggacaaagatagccagtgcagtcacgagtttcctgactatggcctcatcttcccccaggaccacaagtgtcctcccactgagcagggagtagatggctgggtgggcaaaggggtactggcggatgaattttaaggcgttctggccagccctctttttatgcctatcggaagacaggccagcaggataagcagaggggatcctgtctgagctggtggacgctacactgctcacatagctggtggtgtctgagtagttgtccaggctggtcttactgatgtcccggctagccagcaggtggctcgggtccagctcataagcgggaaacccttcacaactgttgtctcgggaagaagggttggcattttccactgaaaagtctacacggaacccctggtccttctgcctgtggcgctgtggggggctgctcaccaccccatcctcgtcagagtgtgtgtgggctggagtggagggcagcaccaactgaccatcgctctccttcccaatacagcaggaggagtctatttgtgatggggtgttttctatgctgccttcctctgtctcacccagttctggaggactgatgcttgcctggaagtggatggctccttcattgccatctggatatgattcttcttcattaatggcacttgggtagctggccttaaagtcatcagggatgagggcctcagaggggcaggtactgaggacttcaatactgtcctcgctgatggtcctgtggctgactgctttgctccggaccacctgggggctcaatggtactgtgaggcttgcctggctgtcagatttagaaagcacggaggtggatttctccgtgcccaaaacttcaatactttcaccactgctgatactccctttcatatccatatccaggtagtccaagttttcctgggggtcgaaactgctcaactcagtcacttccacttccttgtactcctcatctcccagttcctgctccatcttgatcaacacagactccacactggacttgtaagaaccaacactaattaacactttaggaattgggcattcttctagagaactggaaggcggcctgtcttgactgggcttagagggtatgctttcttgtttctccaccatcctgtcatcgacctccacaaagtcttcaaagagaaagtttgttatatgctgttgttttagaagtgctctatcaatctgactggtcaggaggtaacacaggtctcctctgaacatgtgttcaatgtggctgagctgagccagggtctgggtgaaatattcagtgtcacagagctcctccaaggtcttcaacttcttgtcaaaacacttggtggactttgctttgataagttttggggtgtaggctggtctgcaggtgtaaaggtctgtgtcggcagactcatcagggttagaggtagtggatgcctggctggcctgatcctggatgtgctccatctcaccaggacacaaatcatgccccttcaacttccgatgagggtatgagcggatctgcttcagcaggtcttgatgttcaatgatggacttctccacactggccagttcattggctttctcaattgcctgagatgagtaaaagcctttgtcgttggctttcttctggatctccgtttctgtgtgtagcactgtcctggtgtaatccaagtctttcagctttttttcaagttccccagcaaatgccttcctgttgccagtcttcaagcactcagaagctctggaaaattcggctgaaagctcctggaactgctgcatgattttatgctggtctgcagagatataagccatgcaaaacggcctcacgaagccacgggcctccaggtcgtatagggtaaggtggtgcacgtatgcaaaggcgccctccttagaatctcccagcaccaccttggagtcctccacgaagttcagcttggggtaggcagatccaggaggatggcccacgaaggaagcctggtaatccacagacatgatacgcagggagaagtaattgagatcaaaagtgccaaaaactttggtgtcattggggatggtcagtaagggttggggtcccacctgctcagagaactcggaaataagaatgaagtccctcgaaaacttggccccggacagttttgaccaggggttagcaccctgactggcgaaggggaagagcggcaccgagtactcctcaggcagggccggctcattgtaaggctcttcttcatactcttcctctttggtgaaggccactacgtcaggggcgctgatcatatttccagatatatgaagaaaacattgagaggaagtgggaaagaatgcggtgttaatcgacgcgcagaaggcaggcctccggagaaggaagtgaagcccttacggccttctttgcgactccccgaacccggggtcctaggctgcttctcacacacccgaggagaagaactctagcagccccctcacagttgtagctcctccggagctctctgaggcctcatgaacgccaaggccgcaggcccaactgcccttctcttcttcgtccggcgagcgcggccagcacaagaaacctgctgcgagatcacctgcactctccggaacccactgcgacagcaaaagcccccgctctgaacaaggcttaacgcgaggctacgggacgccgcaggggtcagccaagcgctgctgcccctcactgcccgagggcagaaaccgtcgcggctcctaggacgccacaacccggatcctgctaccgcggcgccgccatcttgacatcacatgactcctggtgtccgcgccgcgtgacccggaagcgtcctcgtagacttccgagcaggagattaaaaagtcatgagaaagaggccttggatgggagtgtctggcggctccccgcaagaaggagtccgattaaccaaccactgccgggaaggaggggaaagaggggcggagtgagacgggggcggcgggaaggtggcagaggggaacgtgcttggacgaggggcgcgggacagtctgggagttgtagttccaggtcgctgtggggcgcgsgcctggcggaagtagctggagaaggcgggcggaagttccacgccaagatactggattcggtgctgaggcggcggctgcggcacgggaaaggctcagtgactgaagctccaaaggccagcaggytggtggggacgtgaccgaagcgaggctctggttccctttcggtgggcgccakttgagcctcatctctggcttccccaggatgcgccggcagccggggagcggctccgggcgcgaggtctgaggatgatctttcytgtcgcccgctacgcgctccggtggctgcgacggcccgaagaccgtgccttttcccgcgccgccatggagatggccctccgaggcgtgcggaaagtcctctgtgtggccgaaaaaaacgacgcrgccaaggggatcgccgacctgctgtcaaacggtcgcatgaggcgggtaagaaagcgcgttccgatcagctgcgtgccttaagggaggcccaccgagcgggacagcgtggtgggcgccaagaatcgagatgaaggcgattatctcccatttctcaggcctcactgcccctcgtctggattattgcagtggcctcctgtctgctctcggactggagtgcattttaaaacgtagttgatacatctcactcatttgcgtggaaaccttttgttttgcttgcgcttagcaggttcccaaacttgtctgattctcggaatcgcctcgggcgctggctgcccttcgggtcttgtgtgaggctggggaagtgtgtattttactgtttttccctagagattcagaaattcatttgggaactactgaccagattcccttaacttggcattcaagccctgcccgatcgttccccagccaacctagccctccccatcctgtgccacagccactgcattctacagcccttgtgactttccagcctcacagtgcacacttacagcaacacggtaaggtttggggattagatttgaagtcagccctgttcctacccgaatgaactgattctgagagaggtaagtggtaagaatgtgttctacacacacgggaggcacaaacgcaagggaggataagaaaaagtttcataaaggaggtgccacgggagacataaagagctgtccaggaaaatatctcagataacaaaagtagatcctgaaatggtttyctggagaacttttctaagagcatgggtggaagttccctgctcatttttctttagttcccagggtcctaagacctgtttccagatcaaggatagtgggagtggagccrgggttgtgtgaatgctggctgacagctttacctgtttccagtgctagaagtcctggtgaccagccccaaggtttgtctacttctagacaatgaagtagacattgaaaaatggttctcctacgcctaacttcttatccttcaaggctctgctgaattcattctctctctctcccttttttttttttttttttaagcaatccagaggtcttgtatttatctatttttaccctatcataccatgaatccatagggaataggttccagcggctcaggctcttttccattggttctcacaaagtgtacttccctcaatggaacaggctggcacttcagktgaaccctttctctttgacttgcttcttttttgatcattttccttcacacatttcaggaaagatcttggttcttagagtgcttaatatgctcaatagaaacattaattctttgggcaagaatctagcccttgttcgcagcagtgccaacagcatgctgggtaacatagacttttccagttctgccatgtaacatttgtgggtcattcccttttgaacagtatgcattctcacgaagtcctcaatatcaccttcattgtagattctggtgtctgtggccagagaaactccatatttttgttttgttttgtttgtttgttttgagatggagctttgctcttgttgcccagcctggagtgcaatggtgtgatctcagctcactgcaacctccgcctcccgggttcaagcgattctcctgcctcagcctccctagtagctgggattacaggtgcctgtcaccatgcccagctaattttttgtatttttagtagtttcactgtgttggccaggatggtcttgaactcctgacttcaggtgagccacccgccttagcctcccaaagtgttagggttacaggcgtgagccaccgtgcccagctcgaactccatgttttctataaggccaggagaacatacatcagatgcctcgtcctcttttcctttgtgttcgtcattttggcaaattactccaagatggcagttccagccaaaaggaaagacttttcttggaaagakaatttttatttttatgtacagaaaacacaacagtgtgtacttaacccagtttagtggcaaattctttagcctttgccttttctaggttggtaatgcaagctacagattttggacccagggcattgcctccccagtgacagcagatctcatatgtygttgtaatttgtcccaccagcttagccagagctcctttgtctaccagaaagttaacctttgtgaaggtgacagtggtgcaggtcttcctgtggaatttgacaccacagtcttgacggtgcagtagagaatccccatcttaggacacagcacaggcaggaagacaaccagctcaatgggatccaccaccagctgacccttcatgctctctaccaagttggtgacggtgtcaacccctgctcgaagtgtaggtggtctcttagtagcgacatcscctttgctggaagctttcttctcagcctgggccaacggtttcgatctcatcccttgctctgtctcttgtctgtactgtgggccagcttaagcaattgagtagcttaagtttggtagtctgaggcctgggtgaactggtcaatcccaggtggcacatcagccacttatagagtacagcggctctgccgcagcagccatttatagcgggactatttgacaaagtgggtgaggcccttaggctagatatccaatgccaaaattattagggcttttctcaaatgggatttaccacctttttggcctactgctgctccatgacaacaggggccagggccacttcttccccttggccatctttccttttggcatctggggcggctagaggagagaggctgctgaaatgtctcatcttcaaggaatccttccctcaccacctgttcccccacactaggtcagagacccttactgacatgctgtcatagcactctattctacttgaaaggcatmtactagttacagttaaataatgggatgtgcgatcatttatttgatttttgtcactgcctctccttggactctaaactccaaaggacagtgattatattttgttaattgctatgtcctaacgcctaatatggtgtctggaatgcaggaaactttcaataaatattaatacttgggctgagcgcagcggctcatgcctgtaatcccagcagttggggaggctcaagcgggcagaccacctgaggtcgtgagttcaagaccagcctggccaacatggcaaaaccccatctctactaaaaatacaaaaattagccaggtgtggtggcggggtcctgtaatcccagctactcacgaggctgaggcaggagaatcgcttcaacccgggaagtggagcttgcagtgagcctagattgcgccattrcattacagcctgggcgacagagtgagactccatctcaaaaaaaaattaggccaggcatggtggctcatacctgtaatcccagcactctgggaggcygaggtgggcggatcatgaggtcaagagattgagaccatcctggctaacacggtgaaaccctgtctctactaaaaatacaaaaaattagccgggcatgctggcagacgcctgtagtcccagctactcgggaggctgaggcagcagaatggcatgaacccgggaggtggagcttgcagtgagccgagattgtgccactgcactccagcctgggcaacagagtgagactctgtctcaaaaaaaaaaaaaaaaattcatagttgttgaatgcatgtttgagctgagcctgaaagttttaccaggcagtagaaactgtaaagaacaacctagtggcttgaaactgcttggcatattcagaaacagtgagaagttaggggtgtggtgtggtgggaagagacaccgatgagttaagcaagagcagcagttgagtgcagatcataagaatcttagagagccatgtaggttgagtggtaaaatgcacagaaaattgaccattttaatcattttgaagtatatagttcagtggaattttgtccactaaatgtgccaccatcatcattatctagttccagaaggttttttttcaccccaagaggaagcctcatatccattaagcagtcactccccttaccctctcctcagcccctcacaaccacgaatctgccttctttccccatggatttgcctgttctgggcatttcctataagtggacccatatcttacatgctcttttgtgtcaggtttctttcacttaacataatcttgaagtccatccatgttgtaccatgtattaatatcagttcttcattccttttttttggtttttgagaaggagtctctctcactgtcgctcaggctggagtgcagtgatgagatctcggctcattgtaaccaccgcctcccaggttcaagcgattctcctgcctcagcctcccaagtagctgggattacaggcacccaccaccacgcccagctaattttttgtatttttagtagagacagggtttcactatgttggccaggctggtctcaaactcctgacctcgtgatccgcccacctcagcctcccaaagtgctggaattacaggcatgagccattgcacctggcctcttcattcctttttatggctgaataatattctatcatatggatagatcatatttcattttaccatacatcagttgatggacatttgggttgttttcatcttttgactattgtgaatagaacttctatagacattcgctgggcgtggtggctcacacctgtaatcccagcactttgggaggccgaggcaggtggatcacgaggtcaggagattgagaacattctggctaacacggtgaaaccccatctctactaaaaatacaaaaaaattagccgggcgtggtggcaggtgcctgtagtcccagctactcgggaggctgaggcaggagaatggtgtgaacccgggaggyggagcttgcagtgagccgagatcacgccactggactccagcctgggcgacagagccagactccatctcaaaaaaaaaaaaaaaaaagaacttctatagactttcatgtacaagtttttgtttgaatgtgtttttttgtttgttttttgttttttgagacagtctcgctctgtcacccaggctagagtgcagtggcgccatctccactcactgcaacgtccacctcctgggctcaagtgattctcctgcctcagcctccccaagtaactgggattacaggcacacaccaccacacctggccaattgttgtatttttagtagagatggggtttcaccatgttggccaggctggtctcgractcctgacctaaagtgatccaactgtctcagcctcccaaagtgtatttgaatgcgtttttaattcttttgggtaaatttgtaggagtggaattgctgtgacatgtgataactctgtaactttttgaggaaacaccaamattttccagagtggccaaagcattttacatttccactgacaatgtccaatttctccacatcctcaacaacacttgttattttacttgttttttttattattctatttaattattatcctaatgggtatggagtggtacctcatcatggttttgatttgtgttttcctaatgattaataacattgagcatcttttcatatgcttgttggccatttcttatcttctttggagcaatgttggttatatttttggtatcataaccaagaaatcattgccaaattcaggatcagaaagaattatacaaaggaatccattgttttaaacgtaatttatattttttacttatttttgttttatagagagaaggactttcaaaattcaacaagatctatgaatttgattatcatctgtatggccaggtaggtgctaaaatatttctaaaatatttcaatcataagcaagagaaagtagtcagcctcgtcatatgtagaataygtcgctgtcttaagaataacaactgttaacaacctaaaggttcctggatatggggtgatcactttataatttatgaggagttctctttttaataaaatatggtcccatctcagctcttcattacaaaaaaaaaaagctaatatacaatagtttgaggaaaatttaactgatgcaagaggcgtcagttatacaccatatcattagaatggtgattgyattcctgtgacttttggctttgaagagcttatatttatgtttatttcttcccaatcaggtttttaaaaatgtctttaatagaagctcctccctctcattttaatgatttggcagaataataactgcaaaaagactaactgaattttgaattttgtcatcattcagaatgttaccatggtaatgacttcagtttctggacatttactggctcatgatttccagatgcagtttcgaaaatggtcagtacaattctcaagggaaggactttcagattatagtaagttgtgaaatttcacaggaattttgaggcatgttgatcttactgggtaatttttttttttttttttttttkttggagacaaagtttcagagtgagactctgtctcccaggctggagtgcagtggtgtgatctcggctcacagcaacctctgcctcctgggttcgagtgattctcctgcctcaccctcccgagtagctgggactataggcacgtgccaccacacctggctagtttttgtatttttagtagagacagggtttcaccatgttgaccaggctggtctcgaactcctgacctcaggtggtctgcccacctcagcctcctgaagtgctgggattacagaccgtgagccaccatgcccggtttttttttttttttttttttgagtcagggtctcgctgcrttacccaggctggagtgcagtggcgcaatctcgtctcactgcaacctccgcctcctgggttcaagcgattctcatgcctcagtttcccaagtaactggccttacagccatgtgccactacacccagctaattttttctattttagtagagatggagtttcaccctgttgcccaggctggtcttaaacaaagcagggtttgccttcttttgcctcccaaagtgctaggattacaggcgtgagccactgtgccttggtaatttatttatttatttatttattttatttattttttgagacggagttttattctgtcgcctaggctggagtgcagtggcacaatcttgactcattgtaacctccacctccygggttcaagcgattctcctgcctcagcctcccgagtagctgggactacaggtgcctgccaccacgcttggctaatttttcgtatttttagtagagacggggtttcaccgtgttagccaggctagtctcgatctcctgacctcgtgatccacccaccttggcctcccaacgtgctgggattacaggcgtgagctaccacgcccagcagtaatttataatactaagatgacctargattatctgatccattgtgaatttttattaaatctttaaacagtcacttttggtgttcctcaaaattgccagacctttttcatgcagccattggattgcatttacctgtgaaagggctccagaatgccatcttatcagtcctgttcacactcttggagaagtggacagtgtgtcatgcagagggtcatagccttactttcaattcaccgggaccttttcttttggggatacaccatgaacccattggaacagtttgctgtcattagattggagggctctctgtcatgtactgagttgggactctgttttcatttcttttvtaggcagagctgcaaccctcttgtcctctttgaagcagaaattgaaaagtactgcccagagaattttgtagacatcaaggtagggtcttttggaagacatatggcactgagtcaaaccacagagtcaaacagrgtgatttctttgtttttaatgcattggcatttggagataaggttttccaccaaagtcactaccatgatttaaaaagctggttcccacccattgtataaatgtggctaagtggccaagggactgaagtaaacttttttttatgaatggtagttgtttaaatcctaggaataaaggctggacatggtggtttatgcctgtaatcccagcaatttgtggggccaaggcaggatcacatgaactccaggaatttgagaccagcctgggcaacatagtgagaccctatctctcaaaaaaaaaaaaaaatttaaccaggcatggtgatgtatgcctatagtcccagctactagtaaggctgaggaaggaggattacttgatcccaggaggcaggaggttgaggctgcagtgagccgtaatcacaccaccacactccagcctggtgagaaagtgagaccctatcaaaaaataatcctaagtattgtaaattattagcgcgtagcccccatctcaccccttgttagatgaaagaggctacaaagtataaatgcctgtttgacagtaaattgccagttgtcaagcagtcagggcatgtatagttaatttatttttaatttttatttatttatttatttattttttgagacgaagtctcgctcttgtcccccaggctggagtatgatggtgcaatctcagctcactgcaacctctgcctccaggttcaagcgattctcttgccttagcctctcaagtagctgagattacaggcgcctgccaccacacccggctaatttgtgcatttttaacagagatggggtttcaccatgttggccaggctggtctcgaactcctgacctcacgtgatccacccgcctcagcctcctaaagttttgggattacaggtgtgagccaccgagcctggccagttaatttattgagaactgataaaactttggatgaaattcaattgggattcattttgttttgttttgttttgttttgttttgagatggagtcttgctctgtcacccaggctggactgcagtggtgcgatctcgactcactgcaagctgcgcctcccgggttcatgccattctcctgcctcagcttcccgagtagctgggactacaggtgcctgccaccatgcccagctaattttttgtatttttagtagagacagggtttcactgtgttaaccaggatggtctcgatctcctgacctcgtgatccacccacctcggcctcccaaagtgctgggattacaggcgtgagccaccacgcccagccggcttcgttttttttaactaggtcataatcagaacctctcgaagtgtgcgtgcgcgcgcgcgcgygygtgtgtgtgygygtgtatgtgtgttagagctgaatttcaggttttgtcatattggggaagttatattaaaccctctattctagaaactcgtttatggttctaaggggttgtatcatgattagcaccaatgagagcagttttctctgttctctttcccttgccaagttgtcacactccaagagcagcattaaccttcagtcagatccccttagcttagagatgtcaagtcactgttgtgcaattctgttctcaccactcttattccactgygaacttaagaaaactttggaacgagagactcgccagtgccaggctctggtkatctggactgactgtgatagagaaggcgaaaacatcgggtttgagattatccacgtgtgtaaggctggtaagtgctgctgctgctgctgactttctctactttggaactccataaatagagtgttcttgtttatatgtgcacatgggccacggatgagktcctctgcaggtactctccctcccagtctgtgagtcccaccagccatgtgtcctggagcaaatcactgagccattgggagcctcaacttccttgtctctaacatcaggccaatctgacatgtttcctgggactgccacagagattagatgagttaatgagtggtgtaaaccatttagcccaggactcatttcttgttaggtacaagcatacaagcagatacccggctccttgagaacagggactttatattctttttgttgttgttgttgttgttatatattgaattcttttagtatttggttaatggaagcaaaaatagaaaaataaaattacatattgaatatgtataaaagaatgaatataccacaagtaaagtacaaaaaataattataaaatgttctgttttcttttttaatctctcatattatacaatgctcgactattaataaataattgttgcagtggatttaaaggctctaacagtgttaatggttttgggtaacttagagggagtgatgaacaggccattctctggctcagagggtggggttgctactttcctttagtggttttgtgttcaaagctgtaatgactcctggaaatttaagtgcattaactttcaaggacagtgtgtatatgtcctatattctttgctgaagggacatgaaattcccctacagaaccctttaattgacaatatttttcttttctcaaaaggcctgagagagcaagtaagattaaagttgcaaaaggcagccaggcacggtggctcatgcctgtaatcccagcactttgggaggctgaggcaggtggatctcctgaggtcaggtgttcaagaccagcctggtcaacatggtgaaaccctgtctctactaaaaatacaaaaattagccaggtgtggtggcgggcgcctgtagtcccagctactcaggagaccaaggcaggagaattgcttgaacccaggaagcagaggttgcagtgagccgagattgcaccactgcactccagcctgggtgacagagtgagactgtctccaaaaaaaaaatgttcaccaagagcattttagtattttagttattggagggggcctgcccctccacacctgtgggtatttctcacaaggtggagacgagagactgagaaaagaaagaagacacacacaaagtaaaggggaagaaaagtgggcccaggggaccggcgctcagcaagtgaagacctacaccagtgctggtctcagttcctcagtatttatcaatcactatctttactatctcagggaggggaatgcagtgtgactatagggtgttggtggggagagggtcagcaggaaaacaaacaaaagactgtgtcataaataagtttaagggaaggtgctgtgcctggatgtgcacgtaggctagatttatgtttacctttacataaacatctcagtgcagtaaagagtaacagagcagtattgccgccgtgatgtctcgcctccagccataaggtggttttctcctatctcagaatagaatatatggtcggttgtacaccgagtcattccattcccagagacgtgcaggagacagatgccttcttatctcaaccgcatagaggccttactctttcactaatcctcctcagcactgaccctttacgagtgtcgggctggggggctgtaagtctttcccttcccacgaggccatatctcaggctgtctcagtcgggggaaaccttgacaatacccaggctttcttgggcaggggtccctgcggccttccacagtgcattgtgtctctggttaatagagagtggagaatggcgatgactttcacaaagcgtactgcctgcaaacacatttttaacaaagcacatcctgcacaggcctaaatcctttaaaccttgagtcaatacagcacatgtttttgtgagcacagggttgggacaagtcacagattattaacagcatctcaaagcagaacaatttttcttagtacagatcaaaatggagtttctttatgtcttcctttttctactagacacagtaacgatctgatctctcttttccccacagttactagctaaaattaactccatcactatttctgacagtacactcagtttaaaggttatggtgatgtttcctctttagacactgtacaccattgatttaacctaataggtaaattggtcatctcacagcttcttgaactggtttgcctttatttcaaggggctttaagaaaagtgagtcctttatgatggagggcagtgtgatttgactttgaccttggtaacaccttgtgttctgcagtaaagcccaatctgcaggtgttgcgagcccgattctctgagatcacaccccatgccgtcaggacagcttgtgaaaacctgaccgagcctgatcagagggtgagcgatgctgtggatgtgaggcaggagctggacctgaggattggtgaggagctaggcagacctctcccatggccacattaatgttgtgttatgggaccaaaaatgggctctgtgtcgatatgtgcagccagccctggactctcattatccatcattttcaccttccttcactctccaggagctgcctttactaggttccagaccctgcggcttcagaggatttttcctgaggtgctggcagagcagctcatcagttacggcagctgccagttccccacactgggctttgtggtggagcggttcaaagccattcaggcttttgtaccagaaatcttccacagaattaaaggtagggcctggagtgggtgttatggcctgggacctatgggctcaaggttaaggagggggactgtgagcattaatagcactaataaagatgtgatttattttagtcttgctgtcatcctccctggcccattacaatccacttaaagttccctttgttatccagaaactcctccctatttgatattcgtttgactttcaccacaataaacctttttctatctgtcatatcatgacatgtctctgagacacagcctttctgtttgtctctccttaatatagtaactcatgaccacaaagatggtatsgtagaattcaactggaaaaggcatcgactctttaaccacacggcttgcctagttctctatcagttgtgtgtggaggtaagaacccctaatgatctaggaaacattctgcacacctcccaaaccactcccactgtcggcagaggtgatctgtctcattctcccattggactttagctttaagtttgcatctcaggggatcactttttgggaaccaataagacgaaccccatgagaacagcactaaaaggaaaagggaagtatctacattatttttagataaaatcagaaattttgggaaacgtatagttgaaatcccctcttggggcatatactatcaccagaaattagcaaggattatctagaccagtccaggtcattgacttatagagctaggagagaatgaacagcatttggctcagccccctctttattggtcacatgaggacatctagagaagtgaaagtcacaaattagtgggctaattttatatagtgataaaagctaggaagaaaataaagcaaggtaaagggatagagaaaggccggagggacagtgaggggaggggtaacacttgagcagaggctggagagattagggaaagggctggcggggtgggtgggacacgcatgtgtcatagaagggagcaagactggcccgggtcataggccagttggtggcagagttgggacccaccctaatgtttcctggcccttgggctgattgtttactttctgatgccacttcctattagcacataacagcctggtttaacccaggggctgcacagagtcatgcttaagtaaaattccgagctctctaggcttaattcatggtgtgcttcttggctgtagcccactggcagatttgttactaattaggcaaagggatgtgataactgtgcagcacccgctatggaccaggtacacttcgttatgtgttgttttgtttaatcctaataatgcctctgaaggcagtgatagcatccacattttccagatgaggaagctaaagaaagtgaagagacttaacccacagacacgtgagagctgtacatggcagagtcctagtgtgtccctgccccttctgcagaccatgctgccttctccatctctctctcactccaccctttgaccctggaccactgggagtctctgtgacactgtacaattatttgttaaataaaaagaccaccagcctgggtttcatagtgaaaccccatctttctaaaaaagaaaaattagctgggcgtggtggtacctgcatatagttccatctacttgggaggctgaggtgggagaatcgcttgagcccagcagattgaggctgcagtgagccatgattatgccactgcacttcagcctgagtgacagaacgagatactgcctcaaaaaaaaaatcaaataataataaaatataaaagtaagtaataaaaagacctgccctgtttctccttcactcggatgtggtgcgggactacgtggtgggtgatgtaaactatgaagctggttttaagattaaaggtctccaacttgtacaatttctcctatttcttttttttttctcccccgagacaaagtctagctcatttgccaggctggagtgcaatggcacgatctcagctcactgcaacctctacctcccgggttcaagcgattctcctgcctcagcctccccagtagctggaactacaggcgtgcaccaccacgcccagctaatttttgtatttttagtagagatggattttcaccatgttggccaggatggtctagctctcgaccttgtaatccgcccgcctcggcctcccaaagtggtgggattacaggcgtgagccactgtgcccagcaatttctcctatttctaactgtattatcctgaattttttttttaaaggagcactgggccaagcatggtggcttatgggagtattgcttgagcccaggacttctgggccagcctgggcaacatagcaagaccccatctctgtattttaaagaaaacaacaacagaaagagcactgtgcacgtgtacatagaaaactgtactcaggtgatgcataggctgttggatttcataggctctggtggaagcaccttaaggcttgtgaaattgcccttcacaatcttggtttgagtgggaaagtagtgatggtgtctaccatactgtcagctacaagcgacattaagtggggcactcttctaggctgtcactgcgggcttagctggcggtggtcagtgtgatctagaaggattggcatgggctatccataggaaggatgganatgatgcactaacaggttaacatggtcttttctttcctggctttctaggatcccatggcaactgtggtagaggtcagatctaagcccaagagcaagtggcggcctcaagccttggacactgtggtatgttccagacaggctgtttcaggcactcggggaacacttactgttttgaggctgtggttctaccgcctagactgtggcttggtggaagaaaatatcacccatcaccaggccacacaagaaaacactggagaaagacacggtcctgcttagcctcactgtttgtttttttgtttattttgtttttgtagactyaaacttctgggctcaagagatcttcccacctcagcctcccaagtagctgggactatagtcatgtaccactatgaccagctaattatttttaaaattttttggtagagatggaatctcactatgttgactaggctagtctcaagcttctggcctcaagtgattctccagccccagcctcccaaagtactgggattacaggcataagccaccacacccaaccactgcttggcctgttattttttattttttattttttgagatggagtttygctcttttttttttttaattttaattttatttttattttttttaattgatcattcttgggtgttyctcacagagggggatttggcagggtcacaggacaatagtggagggaaggtcagcagataaacaagtgaacaaaggtctctggttttcctaggcagaggaccctgcggccttccgcagtgtttgtgtccctgggtacttgagattagggagtggtgatgactcttaaggagcatgctgccttcaagcatctgtttaacaaagcacatcttgcactgcccttaattcattcaaccctgagtggatacagcacatgtttcagatagcacagggttgggggtaaggtcacagatcaacaggatcccaaggcagaakaatttttcttagtacagaacaaaatgaaaagtctcccacgtctacctctttctacacagacacggcaaccatccgatttctcaatcttttccccacccttcccccctttctattccacaaaacctccattgtcatcatggcccgttctcaatgagctgttgggtacacctcccagacagggtggtggccgggcagaggggmtcctcacttcccagtaggggcagccgggcagaggcgcccctcacctcccggacggggcggctggccgggcggggggctgacccccccacctccctcccggacggggaggctggccgggtggggggctgacccccccacctccctcccggatggggcggctggccgggcggggggctgaccctcccacctccctgccggacgaggtggctgctgggcagagacgctcctcacttcccagacggggtggctgctgggcggaggggcttctcacttctcagacggcgcggctgctgggcggaggggctcctcacttctcagacggggcggttgccgggcggaggggctcctcacttctcagacggggtggttgccaggcagagggtctcctcacctctcagacggggcggccgggcagagacgctcctcacatcccagacggggcggcagggcagaggtgctccccacatctcagacgatgggcggccgggcagagacgctcctcacttcccagatgggatggcggccgggaagaggcgctcctcacttcctagatgggatggcggccgggcagagacgctcctcactttccagactgggcagccaggcagaggggctcctcacatcccagacgatgggcggctgggcagagacgctcctcacttcccagatggggtggcggccgggcagaggctgcaatctcggcactttgggaggccaaggcaggctgctgggaggtgaaggttgtagcgagccgagatcacgccactgcactccagcctgggcaccattgagcacggagtgaacgagactccgtctgcaatcccggcacctcaggatgccgaggctggcggatcactcgcggttaggagctggagaccagcccagccaacacagcgaaaccccgtctccaccaaaaaaatacgaaaaccagtcaggtgtggcggcgcgcgcctgcaatcgcaggcagtccgcaggctgaggcaggagaatcaggcagcagtaccgtccagcttcagctcggcatcagagggagaccgtggagagagggagagggagaccgtggggagagggasmgggacagggacagggacagggcgcagtttcgctcttgttgcctaggctggagtgcaatggtgcggtctcagctcaccacaacttctgcctcccgggttcaagtgattctcctgcctcagcctcccaagtagctgggattataggcatgcaccaccatgcctggctaattttgtgtttgtagtagagacagggtttctccatgttggtcaggctggtctcgaacttctgacctcaggtgatctgcccacctcagcctcccaaagtgctgggattagaggcgtgagccaccgcgcctggccttttttttgttgtttttgttaacaaatgcaatataactgcattgtatgaggtttgggaaacaaaaagaggaagacaacctatggcttcaccatccttacataattactagtatctcttcctgttttttaatatgcatatttttacagcattataattagagtagcttttccacccaagcatttttttcatgttgctgtataatctgtataaatattgctttaaataatctgctatatgaacctactttagaacagggcttctcaaattatttgaccccagaaagagccaccctgacagaacataagtctgagtaaatcacattaggagtatgccttctcagtcaccacttagcaggaaaatttgggatagaattactattagaattcactctggaggttggacatacagaacactcaggctaacaagcatggaggctaagaagcacacagggactggtggtcagtgcgttcttttgtcttggtcaagccacaataaatgtgtatatgtgtggagggattgcatgggggaagttatgcattttgtttgtttgtttgtttgttttttgagacagagtcttgctctgtcgccaggctggagtgcagtggcgtgatcttggttcactgcaacctccgtctcccgggctcaagcgagtctcctgcctcagcctcctgagtagctgggactataggtgmgcgccaccacacccagctaatttttgtatttttagtagagatggggtttcaccatgttggccagggtagtctcaatctattgaacttgtgatccgcccgcctcggcctcccaaagtgctgggattagaggcatgacccaccgtgcccagctgcattgattttatatagtaggcatatgtgttttagtcctccctggttaagtgtgctgtagtgtgacgtatagtcatcagcattgttagcttgtcacctagggaaaagaacagctcattattttcaccctccaggagaatttactggggcttgggtggtattcccaaagtgtggttctcagactgtctgtgttaaagcagtgtattagactgcttgttaaaaaatgtagatttcgggccgggcgcagtggctcacgcctgtaatctcagcactttgggaggctgaggcgggcagatcacgaggtaggagatcgagaccatcctggctaacatggtgaaaccctgtctctactaaaaatagaaaaaatcagccaggcgtggtggcaggtgcctgtagtcccagctactcgggaggctgaggcaggagaattggcgtgaacccaggaggcagagcttacagtgagccgagatcacgccactgcactccagcctggatgacagagcaagactccatgtgaaaaaaaaaaaaaatgtagatttctgggccasacgcrgtggctcacgcctgtaatcacagcactttgggaggccaaggcaggcagatcacctgaggtcaggaatttgagaccagcctggccaacatggcaaaaccccgtctctactgaaaacacaagaattagccagccatggtgagcacctgtagtcccagctactcaggaggctgaggcaggagaatcgcatgaacccaggaggcagaggttgcagtgagccgagatcgtgccactgccctgcagtctgggcaacaagagcgagactgtctcgaaaataaaaaaatttttaaaatgcagagttttggccagacgtggtggctcacttctgtaatcccagcactttgggaggccgaggcgggcagatcacctgaggtcaggtgttcgagaccagccaggccagcatggcaaaaccccatctctactaaaaatacaaaaatttgccaagcatggtggtgatgtaatctcagctacttgggaggctgaagcaggagaatcacttgaacccaggaagtggaggttgcagtgggccgagatcatgctactgcactccagcctaggcgacagggcgagactccgtctcaaaaaaaaaaatgtggagtttgggctggatatggtagctcacgcttgtgatcctagcattttgggaggccaaggcgggaggattgcttgaggccaggagttcaagatcagcctgcgcaacatagcaccttccccagtggtcagggccccaaatctgctggcttcccagttgagtcctgcacacattaaagtctgagaaccactaggctaggatctgactctgcttggcaggcccagaaatcgttgttgggcagccttttcagctctgtttgacagaagcacctggagtgacacgggccagatttgactgaagatgagttgtgtatttgagttgtgctgcctgacccatgcagtacacctaacatgcctgttgacccatttcacaggagcttgagaagctggcttctcgaaagttgagaataaatgctaaagaaaccatgaggattgctgagaagctctacactcaagggtaagtattttgggtttgggagtagaatttgaaccgtctttatcaggatgaaatatttgagaaayagagtttatgggttgggcacggtggctcacacctgtaatcccatcactttgggtggctgaggcnggcagatcacgaggtcaagagatcaagaccatcctggccaacatggtgaaatcccatctgtattaaaaatacaaaaattagctggacgtggtggcgtgcgcctgtagtcccagctactggggaggctgaggcaggagaaccgtttgaacccaggaggcggaggttgcagtgaggtgagatcacaccgctgcactccagcctggtgagtgagygagactccatctcaaaaaaaaaaggaaaaagaaagaaataaagaaataagagtttatggggaaaaactgattgtctagatagcacccaagctctgaggtaggattttgactttgacttctcttttctgatacagaaaaggtgtttctatgtaaaaacccatagagtagattcagatcttacttttgactcctcagccatctccctgtggccctggcaagtggcagacagtgggtggcacctttaaaagttgtttgcctgtgaaactcctccccgccccagtcatatacaccccagcactgaggtcctctaactgtgctgtccagcctgcagctattgagcagttgaaattcaagttgtccaaattgggatgcgctatagatgtaaaatatacattgggttttgaagacttctatgaaatagaatgtaatctcagtaacttaagtgactaattgaaaattttaaattatgctgggcgtggtggctcacgcctgtaatcctagcactttgggaggccgaggtgggtggatcatgaggtcaggagttcgagaccagcctggccaacatggtgaaaccccatctctactaaaaatacaaaaattagccaggtgtggtggcaggcacctgtaatcccagctacttaggaggctgaggcaagagaattgcttgaacccgggaggcagaggttgtactgagctgagatcacgccactgcactccagcctgggtgacacagcaagactccgtctcttggggggaaacaaaaattacaaatagagactgggtatgttgggtcacacctgaaatctgagcactttgggaggcctaggcaggaggatcacttgagctcaggagttcaagaccgacctgagcaacatgacaaaaccctgtctctacaaaaaaaaaaaaaaattagccaggcatggtgccacacacttgtagtcccagctattcaggaggctgaggcaggaggatcactttagcttgggagacggaggccacagtgagccaagcttgcgctgctacactccagcctgggtgccacagcaagactatctcaaaaatgaaaaagaaaaaacaaatagagtccacattacagtttatcggacagcattgttctttgtgtactctaagaaaagtcttgaagcacacgctggtggaacttgtcagggtcagtgagtctcatgtgctgcatcagggctggtctgtcagactgaccctcagagtggccagtgacaagccccaggctatgaggctgctggcctttttcctgtgctgtgctgccccttttggcttctttgagtgtgctagcaggagagccagctgcttttcatcccatgagggggtgcatctcatctcagaacttttctgaagcaggtaatgtaggctgccttcagttgagttggctacatcagatgagtgtttgcaggtgttagtgtgtgctttcagttgtttatagaccaatcagagagcctagcaatttctttttctgtttgtttgccttggttttaggtacatcagctatccccgaacagaaacaaacatttttcccagagacttaaacctgacggtgttggtggaacagcagacccccgatccacgctggggggcctttgcccagagcattctagagcggggtggtcccaccccacgcaatgggaacaagtctgaccaagctcaccctcccattcaccccaccaaatacaccaacaacttacaggttggtttccctgaatgtactgcctgctggaacccatagggaagtgctgggggtcagtagtaaggtttgaatttactctgtgggctgtgattgtaaaaacaagtgattttgagatctctctcatttcacaatcctctgcctggctttgataaagaccgcctcatccctccccgtggtgggcccccgtcttaatccagctccacatcccactctccatcagctcctgctgcttccctgctagtccttcataggcaacccctgtgcagacccccacctccactgtgagccttgtggccttcccagtccctggaactagagaattctatccatcctcccaaggctggctcagttttggttgcctcctgaaactttgctgccaccccagtcgtgccaccccctgtcactgcagtttcccacacagctctgcttgtctgtctcagtcatttcctcagccaggggcaggctctgcaggcacaggagccattaggcttgtttacatctgtaggcttctcacaragttggggaaatgcttgtttacatctgtaggcttctcacaaagctggggaaatcttagtcttttgttcttctcctccttcttttaataaaatacattctttctgattttaaaaatatggccggacgcggtggcttatgcttgtaatcccaacactktgggaggacaaggcgggtrgatcacgaggtcaggaaattgagaccatcttggccaacatggtgaaaccccatctctactagaaatagaaaaattagttggacggggtggcatgtgcctgtagtcccaactctcaggaggctgaggcaggagaatcgcttgaacccaggaggcggaggttgcaataagccgagattgcaccactgcactccagcctggcgacagagtgagactctgtctcggaaaaaaaaaaattacatgttcattttagacaaattaagaaatacaaaagtttataagggggtaaaattgcctattaagcatgatatttaacaattacaaagatgtgccataatttattttgccaaatctgttttttgtgtgtttttgatactatagttaacatttgtagacataaatatttttgtggttctccagttatttcctttgaagaaatccttagaaggggaattattggatatgtgtataaatgtctcatgggcttttgatagactgaggctcactaaatcattgattacctaattgaaaattaccctgaaaattactgcttaaatgtgtgcatgaagttgggctaaggccaccaggtgcaatgttgctgtctcttgtatttgaggagtgtcttgctaacttcttacgctttcatcttgttttctgcttagattgcgtttacatcaaagaaccacttcccagtctggaagggaagatgactcctttgcttatctttgccagatttgagttgtgagatgtgtcaacctaaacccatcctctccccaggacttgtttgcctggcactccatgttagtgcagggcctgaggagcagtgtggcctcttctgtgcaggacattaggctaaggctaccagtgatgctcctgtccttgagaggtgatattctagggggagtttcrtactcctcttttcttcctagggagatgaacagcgactgtacgagtttattgttcgccatttcctggcttgctgctcccaggatgctcaggggcaggagaccacagtggagatcracatcgctcaggaacgctttgtggcccatggcctcatgattctggcccgaaactatctggatgtgtatccatatgatcactggagtgacaaggtaataaagagtggtccccagtgagagggaggacagttgtgttgtgagccctgagttctctagtggagcaggatcatgttccttgaaatgaggttattttttgcctgagtgtgctgatggaatcayctgactgttgcacctgccnctccctgtagatcctccctgtctatgagcaaggatcccactttcagcccagcaccgtggagatggtggayggggagaccagcccacccaagctgctcaccgaggccgacctcattgccctcatggagaagcatggcattggtcagtggctcctctgggtaactcgcatctcttgagctaaggcttacagtgtaccaggtacaggtttcctctagtcttcaaaccattctctaatgcagctgctatatctttatcccattttatagttgaaataaggctcagagaggttaagaacttacctaagttcacaaagtgtgtattattaaaacctggtctgaataactccacagtcagtgctcttaaaccatgcactgtgctgtccacatagtaacagagacttttcccatggctttgagggcccaactgggagcacccattggccacatgaggatttgttgttctttcgaataagaacagcatgtaaggaaccaacaattaaaacttgggacagttatcataaaatctatcttcattttgaagtgtcagatagagccctgagcctccttcccatgtggagcattgggtgagggtggcagctgtctctgcaggtctgaacccacactgctcactcaggctgctcacgctggcctcatgtatgtgccaggaccctgctgataagtcccatggctcaagctttgcaggtagggccttgtaactaatctgctgtcccctccattcgtttttgtcaaggctctcaagggctttctctggcaaacctagtccaggaatacctgcagcacagtggaggggaagcagagctccctgggcatgtgttacataagcagctgcgtcatccacaaagggagtttcttaggcctatgacttgggaagcagtgcttcaacgtgaagtccttgaccatcactaggacatccagaaaccctgcaggtttaggtaaaattagtagaggttcacccgtcatgatttatttgataaaaatgtatgaaggctgggtgtggtggctcacacctgtaatcccagcattttgggaggccaagacgggtgaatcacttgagcccaggaattcaagaccagcttgggcaacacggtaaaaccccatcttgctgggcgcagtggctcackcctgtaatcccaacacttcaggaggctgagctgggtggatcacctgaggtagggagtttaagaccaccaacctgaccaacatggtgaaactctgtctctactaaaaatacaaaaattagccaggcatggcggtgggcacctgtagctgagattgtgccattgtactccagcctgggcaacaacagcaaaactctgtcttaaaacaaacaaacaaacaacaacaacaacaacaaaacagatctggctgggcacggtggctcatgcctgtaatcttagtactttgggaggccaaggcgggtggatcacctaaggtcaggagttcgagaccagcctggccaacatggcaaaaccccatcactactaaaaaaatacaaaaattagctaggcgtggtggcacatgcctgtaatcccagctacttgggaggctgaggcaggagaattgcatgaacccgggaggtggaggatgcagtgagccagcatcgcagcactgcactccagcctgggtgacagagtgagactccatctcaaaaaaaacatttctacaaaaaattaggtgcatgcctataggtagggaggctgaggtgggaggatcacttgagcccggaaggcagagactgaggtacaaagtgtgaggcccacaagagtgagagcttggactaagcaccagggacacaaagaggaataagacctcattttttaagttctcaatctaacagaagaaccaaaccaacacattgaatacaatgtaatagttctgcagggagtaggcagggaagaaaatgtgatgggtggactggcatttgagctggaccaaaacctcatagtaagacttctggatcagcgaagggcagcccagtgcagggtaggcctgaggaagggcacaggagcaggaaagcagaagcctgctgtagctggattggaggggggtggccatagaaggtgagcctggaaagatgatccaagcctgactttgcagggccttggcttgcccagttgaagggcttagatggtggtacatggtcagcagggagtcttccaggatttctaagtaaaggaaccacatagaggtacacttacaaaaaaataataataatatttttaaaagattattaacaggctgggcattgtgtctcacacctataatcccagcactttgggagaccaaggtagggggtcaggagttcaagaccagcctggacaacatggtgaaactccatctctactaaaaatacaaaaaattgctaggtgttatggctgacgcctgtaatcccagctacttaggaggctgaggcaggagaattgcttgaacccgggaggtggaggttgcagtgagccaagattgtgccactgcacttcagccttggtgacagagagagactccatctaaaaaaaaaaaaaaaaaaaatttatatatatatataattattaacagctttatttatataccatacagtttatctccttcaaatgtataatgtacattttttagcatattcacaaagttgtgcagctatcaccacagtcagtttttttgttttttttgttgtttgtttgagatggagttttgctcttgttgctgcaggctggagtggagtggcacaatctctgctcactgcaacttccgccacccaggttcaagcgattctcctgtctcagcctcccgagtagctaggcttacaggcatgcaccaccacacccagctaatttttgttatttttagtagagacagggtttcaccatgttggccaggttggctggtctcaaactcctgacctcatgatccgcccacctaggcctcccaaagtgttaggattacaggtgttagccaccatgcccggcccctaaaaaaatttgttttggagagatagcatcttactctgtcacccaggctaggtcacagccatgaaccctgggtttcaagggatccttccacctcagcttcccaagtagctgggactacaggcatgtgttgccatacccagctaatttttttgttgggttttttgtttgtttgttttgttttgtttgagacagagtcttactctgtcacccaggctggagtgtagtggcacgatttcagctcactgcaacctccgcctcccaggttcaagagattctcctgcctcagcctcctgagtagctgggactacaggtgcgcatcactggctaatttttgtatttttagtagagatggggtttcactgttagctaagctggtctcgaattcctgacctcaaatgatccacccgcctcggtctcccaaagtgctgggattataggcctgagccaccatgcccagccagacttttttgttttatgtagggacagggtcttgctatgttgcctagtctggtcttgaacttgcaccctcaaactgtcctcctacctcaacctcccaaagtgttgggattacaggagtgagccactgcacctggccagatttgcctactttagttatttcctataaagagccaggcacagtggctcacacctgtaatcccagcactttgggaggccaaggtgggccaatcacttgaggtcaggagttcgagaccagcttcaccaacatggtgaaacactttctctactaaaaatgaaaaaattagctgggcttggtggcaggcgcctgtaatcccagctactcgggaggctgaggcaagagaatcacttgaacccggaaggcagaggttgcagttgatggacacttgagttgtttctactctttggctattataaataatcctgctgtgaacagttttgtacaaggttttgtgtggatatgtgttttcatttctcttgggtagacttaggagtgggattgctggtttacttggtaactctacatttaacatttttaggaaccaccaaacttttctgaagtggctgtaccgtttttcatttccaccagcraggcactaggattccagtttatccacatccttactaacacttagtattatctctctttttgattttgccagtaggtctgaactgctatttcactggtttttttggttgtttttttgttgttattgttgaggtggagtctcgctctgttgcccaggctggaatgcagtggctcgatctccgctcactgcaggctccgcctcccaggttcatgccattcttctgtgtcagcctcctgagtagctgggactacaggtgcccgccaccacacccggctaattttttttttttttttttgtatttttagtagagacggggtttcaccgtgttagcaaggatggtcttgatctcctgacctcgtgatctgcccgcttcggcttcccaaattgctgggattacaggcgtgagccaccacgcccagcccttttttttttctttttttttttaaagagagtctcactccatcacccaggctggagtgcaacggtgccatctcagctcgttgcagcctctgtctcctgggttcaagtgattctcctgcctcagcctcctgagcagctgggactacaggtgcgtgccgccacaccctgctaatttttgtatttttgatagagacagggtttcagcatgttggccaggctggtctcgaactcctgacctcagatgatctgcccaccttggcctcccaaaatgctgggattacaggcatragccactgctcccagccttcactgcagttttaatttgcatttccttcatggcagagctacattttgaaaggtccctttggccacagcttaaagaatggttagggtagaggaagagactagaaatagggacacaagctgcaagtatggcttggacacatggggaagagaatttttaaaaagagctttgaagctggaattgacagctttcctgagtaatgggatgtgagggaacaagagagttgaggttgccattgtgatttcttgaatgagctatatgggaatgaaatgaaggcatcttacctgcataggctgtccaggcaaaggagggattccggggtgagcaaggtgcccatgcgccacccggntggagctgttgtctgtattacctcagagtaaccagcaagtggcttccaggtacggatgccactcatgcggagcacatcgagaccatcaaagcccggatgtacgtgggcctcaccccagacaagcggttcctccctgggcacctgggcatgggacttgtggaaggtaagrgaggacagagcttgcagtgggtagtgggtggtgtcgcccaagtccctgagggtctcaggtgggccctcactgagctcgactctctccctgcaggttatgattccatgggctatgaaatgtctaagcctgacckccgggctgaactggaagctgatctgaagctgatctgtgatggcaaaaaggacaaatttgtggttctaaggcagcaagtgcagaaatacaagcaggttttcattgaagcggtggctaaagcaaagaagtaagtccttaaaagaaatacagaggggtctcactatgttgcccaggctggtcttgaactcctggcctcaagagatcttcccacctcagcctcccaaagtgtggggattacaggygtgagccaccgcatctgggccagtcagagtttataaccctgccagattcatcctcaccagtggcctcctggcctggaggttttccacataccccttttctttggactttcttctctgggttcttttacaactctccatagagctttgtcagtatagaaacagtaatcggaacagtctccttcagttattctgaactattggctttagaaataccattctcttgattttaattatcttttttttttctgctttaattacatgacacattaattatcttgagttaggcaacaaagtcttttaaatcagtaaacccaagtgctggagtgtgatccatttgttttctggagcatttagaggtggatatttagcaagcagcatgtgtgtattttgttagaaatgatgtgttttctacctgtgatattatgatttataataagatatatatatttggacttcattttctgatacccttggaattttttaagtgctgtgtctgttgtatacaaatgagatgactagtggccaagggctcctgggtagccttgggatcggtctggttgtcagggaaccaaccctgtgattagaaggttgggactttgagtcccacccctacctcaggaagagcagaggggctggaggttgagttgatcacacgtggccagtgatttgtcaatcatgcctaagtaataaatcctccataaaatccccaaacaagggtcgggcacggtggctcacgcctgtaatcccagcactttgggaggccgaggcgggtagatcacaaggtcaggagttcaagaccagcctggccaacacagtgaaacccctttctctgctaaaaaaaaaaaaaaaaaatacaaaaattagccaggcatggtggtgcgtacctgtagtcccagctacctgggaggctgaggcaggagaactgcttgaacccggaaggtggaggttgcaatgagccgagattgccccactgcagtccagcttgggcaacagagtgagacttcttcaacaacaacaaaaacaaatcaaacaattgggtttggggcacatccaaatagctaaacaggtaaagactcctggagggtgggtgtttgggagagggcatggaagctaccccttccccacatcccttgccctgtgcattgcttccatctgggtattcacctggatcctttgtaattaacgggtaagcataagtaaagtgtttccctgagctctgtgagccactctattgagaatcaaaccaaggagggggtctgaggaaccccagtttatagccagtcagtcagaagcacaggtcacagcctgggatttgtgactgacatctgagggaatttggggcagcagtcttctgggactgagcccttaaccgttagatggatctccaggtgcatagtgtcagaattgaattgaattagaggatgtccaactggtgtgtggcgggagagttgcttggtgtatggggaaaactcccatacatctggtgtctgatgtgtgttgtgagactgtaatagaagataacagtttgttattttctgttctttagagtaccccatgccagttgtgaaaaggcaggcatgagctagtttagacttaatacagacagacactcctggagtttgtacatggaccctgtgcagttttactttttttttttgagatggagtttcgctcttgttgcccaggctagggtgcaatggcgtgatcttggctcaccacaacctctgcctcctgggttcaagcgattctcctgcctcagcctcctgagtagcttggattacaggcatgcgccaccatgcctggctaattttgtatttttagtagagacggggtttcaccatgttggtcaggctggtctcgaaattmcaacctcaggtgatccgcccgcctcggcctgggattacaggcgtgagccaccacatttggcccagttttactttttaatgtgggctggtgacaagcagaagcatctgcctgtatctggactctcctcccaagagttggttcggcaccagggcccatggtgagctcagtcttctgtctgccgtctgttctctgcaggaggcctgcggctyactgaccagctggttctcaaggtcacgcctgttgtgtgcatgtaagagtgttgtaggtgcctttgcagcgattgctggctgatgggtgtctgtctttgccttttcttcagattggacgaggccttggcccagtactttgggaatgggacagagttggcccagcaagaagatatctacccagccatgccagagcccatcaggaagtgcccacagtgcaacaaggacatggtccttaagaccaagaagaatggcgggtgagtgcgctgccttctgcccccacctctgctccccagcacctgcggtgtcagccgtagctcgaaagaccctgccatttcactccatggaatctttcaagacaggcctgttgttgccaacctgcaggcaaggtgttggcctaaaagcatagcagggtgggatcaggcctttgaggtgtaaagcactatgggaattcagagcaggtgagaaactgaatgatagtggggtttttttgtcccctgtggataggacatcatatacccaatgtgtaacacatggaggagcatgagcttcagatctaggtgggtctgggttcaaatgccacttatgccgcatataagtggtgtggcctgaagcaagttacttacctgctctgaaccccaatttcttcttttataaaatgtcagtacttacaaggctgtgttaagggtgaggatttggtgaaaatggtcaggactatatagcacattgcctgatgtgttgtagatactcagcagataytacttttgttctctcctagttttagttctgaatggggcctgaaaatctcaactcccttttcgctttaaatatagtagatctgagtgggcaatttagcttcacatcaggttgttggagccagtggctggccactggaggaagttcacggggaaagacgaggtggaggggtggcagccatcattcatcaggtgccgtccctcactggtgtaatgcagggtggtgctctgtaagcattacctcatcccattctcctaactaccctgcaaggcagggatttttatgcagcttagagggctgaggtgcttgcttggagtcaagcagccgtggtgggcagcagagtttgaaaccgggttttcactgcctttttccatcctgcctggcccacctgggactgctgtgctccttgctgctgaataagaaaggaggtttctcaactcctcacctccagccatcattaacctggctggcccaagtgaagagaaggccacccaggctctcagaaacaagaggtctatgggccagacctggaagcaggtgtcagggctcgcgtcactcacagacagaagccagtgccactctaggcttagcccaatgactgggcgtatatttcagcacttaataaatgctgtcgatgggttttccttgctatcggtaggttattggattagtactcattggaatataaggagagagaataactacttttgttttagctctgaattctccaattctctgaattggagaattattattattctttagttattcgtttgttcttctgttattcttttgtaatgcttctctgagttactccagaaggtcaggagattatcttgtgggatttgccactccatgatttatctgttaatttccatttctgagattgtaaatttcttatttaaatgattggagttcggggcttttttttccttcatagtgtacccaggcacactcatgaggaatttgtaaatcacatgcatattagctagtcaaaccctaacgtttcatgactgcaaggtgttgaaaaacattggccaggagagaccgggatgggatggatgggcagtgggtggggtgtagatgttgcaggtgaggctttgtcacaaacagatgggtttccattcctggctcccatccacacatgcatgcatgtctctgggcaggtttccaggccacaccaagccactgtttactcacatgcaaactgagggggcccctgacactgcccagacttggcacgaggcagaaaggcaagaatgtgtgagtgcacagcacagagcccctggcgtcagcttggttggttgttggttttctaaatagaaagcagggccagcaatagctgctttgtgcttttgggatgtgagaaggctcatttttcccaatcaattcaatatgagtgcttgtgtatccagttaagtgtcatccagaaaagggartgttgtcctcgggcagctgaggaaaggctgccttagctgatggccaacagcggagagcatctmctgcactcctatcatctgacatggcactttgtccccaggttctacctcagctgcatgggtttcccagagtgtcgctcagctgtgtggcttcctgactcggtgctggaggccagcagggacagcagtgtgtgtccagtttgtcagccacaccctgtgtacaggtgagctgggcacctgagtcaggtgcctcctctggagtgtgtacaccatctttcccttgctcctgccagaacccagagaggagtgtcggggattccactcaggccctgcaggggcgtagctgtgttctgcagcagccagttcagcagggctggtccagttctgttgtgttccatgctgtcactgctttggcaggtatgaccctgtttggagtgggccatgggcaaagaaccatgaagggctctttccctgccctctccagatagatgattgctacaccaggcttaggaaattattcacatattaaatacaacatccaagcttgggctacgtagcaagaccccatctctttaaaaaaaaaaaaawttttatttaaaaaaaaattttttttaagacagtctcgctgggttgcccaggctgaagtgcagtggcgcagtcttgactcactgcaacctccgccttctgggttgaagtgattcttctgcctcagcgtcctgagtagctgggattacaggcatgcaccactatgcctgaccactttttgtatttttagtagagacagggtttcaccatgttggccaggctggtctcgaactcctggccccaagtgatccacccaccttggcctcccaaagtgctgggattatagatgtgagccactgcacctggccaaaaaaaattttaaattagccagatgtggtgacatatgcctataggccaagctggtcaggaggctgaggcaggaggatcgcttgatcctagaggtctaggctgtagtgagccatgatttcaccactgctctccagcctggaatgacagagccagaccctgtctctagaaataaatgaataggccgagcctggtggctcaggcctgtaatcccagcattttgggaggccgagacaggcggatcacgaggacaggagatcgagaccatcctggctaacatggtgagacactgtctctactaaaaatacaaaaaatggccaggcgtggtggctcacgcctgtaatcccaacactttgggaggccgaggtgggtggatcacgaggtcaggagatcgagaccatcctggctaacatggtgaaaccccgtctctactaaaaatacaaaaaatcagccaggcgtactggtgggcgcctgtagtcccagctactcggcaggctgaggcaggagaatggcgtgaacccaggaggcagaactttcagtgagccgagattgcaccactgcacaccagcctgggcgacagaatgatactctgtctcaaaaaaaaaaattttaataatttatttctagtaaatgcattgcatactactgtaaataacttgttttttagggtaataaaatacctattttcaaaagcaaaataataatgacattaatgacattgttttacattttgcaatttgtatgtctggcttaatagaagagagctggattcccgtatctgcttctgcagtcagcctgctgagtcattgcatgtgctggaacctccaggaaactccgttgtatacacatggaagaataagagcaaaatagacataacctcttagaattttttttgagacagagtcttgctctgtcaccaggctggagtgcagtggcacaatcttggctcactgcaacctctgactcccaggttcaagaggttctcctgcctcagcctcccgagtagctgggactacaggcgcgtgycaccatgcccagctaatttttgtatttttggtagagatggggtttcaccatgttggtcaggatggtctcaatctcttgattttgtgatccgcccgcctcagcctcccaaagtgctgggattacaggtttgagccaccacacctggcctataaaagagttttgcactctccttgaaagggctcaggcaccctggaaccacacttggagaactgctgatacagagacatgggacttctcagaggtgtttttattttagtgaattactgggatcttagatttcatctgcactgtttcccactgtccactcctgtgatgactggtgggggcttgtggtgggctgatagagggcctcacaggggacttgygtgggcttcctgatgcataaggaatggtggagagaggcctagggctaaagcagccctcactggactaaggagaagctggcatctggttgttaatgttttttctcatcttctggcctcactaggttaaagttaaagtttaagcgcggtagccttcccccgaccatgcctctggagtttgtttgctgcatcggcggatgcgacracaccctgagggagatcctggacctgagattttcagggggcccccccagggctagccagccctctggccgcctgcaggctaaccagtccctgracaggatggacaacagccagcacccccagcctgctgacagcagacagactgggtcctcaaaggctctggcccagaccctcccaccacccacggctgctggtgaaagcaattctgtgacctgcaactgtggccaggaggctgtgctgctcactgtccgtaaggagggccccaaccggggccggcagttctttaagtgcaacggaggtagctgcaacttcttcctgtgggcagacagccccaatccgggagcaggagggcctcctgccttggcatatagacccctgggcgcctccctgggatgcccaccaggcccagggatccayctaggtgggtttggcaaccctggtgatggcagtggtagtggcacatcctgcctttgcagccagccctccgtcacacggactgtgcagaaggatggacccaacaaggggcgccagttccacacatgtgccaagccgagagagcagcagtgtggctttttccagtgggtcgatgagaacaccgctccaggtgaggcagggaggggcatgggaatccctgccttcagttttcaggtgtttacctcagagactggggacagcagaaagaaggcaaggcagggtcatggtgggattgggaggggcacctgggctgccttgcacctcacttttcctcacttgatcactttcagcaaggtgataattgtacagtcctcattccaaattaaagggtagctaccagtaatggtgtcacttgccctatgcctggcactatgctaagtatacttcctgtgcatcttccatcctcattgggtaagcattatgatcacaattttacttataagtgagaaaggtgagacccagacacatgaagtgggtattgctcagggtcccatagcaacagacaccaggatgartacataggccttcccagtcccatggccatgtgcccttgcagctgtcgtgacccttggcagaccataagcatcagcctcatttctttttttttttttttttttttggagactgagttttgctcttgttgcccagactggagtgcaatggtgcaatcttggttcactgcaacttccacctcccaggttcaaatgattctcctgcctcagcctcccaggtagctgggattacaggcatgcaccaccacgcacagctaattttgtatttttagtagagacgggggtttcaccctgttggttaggctggtctcgaacyccacctcaggtgatccacctgccttggcctctcaaagtgctgggattacaggcgtgagccaccgtgcctggcccagcctcatttcttcagatgaagatgccaaccccgatgatatttaggaacctgcccagggtgacacagcttgggccaatgtccgggaactgggtgtcatgagaagtggcacctggacattgcatcaagttgaatggtgtacgtggaggcactttgaatggttcctcctgctccagtgcacaacagagcttaagtagctgagaatgacccaaaggcctagtgggagctttggagttgagcaaatctggttccaaagctcagcagtataaccttgaacaaatgacttagcctctctgcctcaagtttgctcaacaagatggtccctgcctacattcatagggttcctgttttagaaaggagtttagtctcagactatgattcttacacatgtgtcactagcccggcatgcacagaaagaaaccagaggtttggtaaaaactgtgggacttggaactggctaccagtgctaatggggcccagagatggccattgcagtgagagacccacatttgaagtgagatgcagtctggcctcttgtctccccacttggaaggacatggtatctgacctccaggctggctgactgactgtcctgggtaaatgagcagctggtctggaaaggcctgttgaggggacaggaagggatccagagctggactttcctgcatggaggtgggccgcaggttgccggtcataggctgcttgtctttcccaccctaccacacaggccagcttgcttgggtttctgcctctgtaaaaagggccggcatgaaagtccacttaccaagtgagtgtgggacaatgtctccaaagcttaggattcttgagggagaggtgtcaggtaacataaggcagcaggcacatcgcacctcaaccttacagagttggacacagtgtgaagggaggctggctggtggggtgtacatggctgtataaaaactgattcagccggtcgggcgcggtggctcatgcctgtaatcccagcactttgggaggccgaggcgggtggatcacgaggtcaggagatcgagaccatcctggctaacacagtgaaaccccgtctctactaaaaatacaaacaattagccgggcatggtggtcggtccctgtagtcccagctactctcgggaggctgagacaggacaatggcgtgaacccgggaggcggagcttgcagtgagccaagattgcaccactgcattccagcctaggcgacagagccagactccacctcaaaaaaaaaaggccgggcacggtggctcacgcctgtaatcccagcacttcgggaggccaaggcgggcggatcacaaggttaggagatcgagaccatcctggctaacatgatgaaacccgtctctactaaaaatacaaaaaataaagtagccgggcgtggtggcgggtgcctgtagtcccagctactcgggaggctgaggcaggagaatggcgtgaacccgggaggtggagcttgcagtgagtggagatcacgccactgcactccacactccagcctgggtgacagagcgaagactccatctcaaaaaaaaaaaaaaaaaaaagttggttcagccttatcgtctgctgctctttttttttttttttttttttttgagacagggtcttgctctgttgcccaggctggagtgcagtggtgtgatcacagctcactgtagcctcccaggctcaggcatcctcccgagtagctgtgaccacaggcatacaccacacctggctaatttttgcattttttaaagacaaggtttcaccatgttgcccaggctgatcttgaactcctgggctcaagcaatcctcctccctcagcttcctaaagtgctgggattacaggcatgagccaccgtgttcaggacttgccacttctgcatgtcagttctaacctcacccctcccctgactctcccgacagggacttctggagccccgtcctggacaggagacagaggaagaaccctggagtcggaagccagaagcaaaaggccccgggccagttcctcagacatggggtccacagcaaagaaaccccggaaatgcagcctttgccaccagcctggacacacccgtcccttttgtcctcagaacagatgagctcagggtagggtagagaacgccactttctcagacctgtcccctttgtgtttagaaatgagttaaccaggaccaagtggccatttagtgtcctggaaacttagaggacagtgttggcctttggagtcgggccttcttgtgttaaggggcacaaggtccagatcactctgsagcaggccagctctgctggacagtgaccctcttcccaggcctcaggagtgaccatagccactgctgaaaagtcacgcagctgctccctcggaccccccaaggatggttgctgttagcagaggattggtgcagtcccagctgaagcccactgtgtgccaaaggaagaagctcccagggctgcttccttcacctgcagaaagccccaagtgagscaccagcactcatggggyagtccctgtccaggctgcccagggcttctcatagacgtcctgagaaggacggtgtaatgcaaggaaatggctgtggtaacactgatccttcagaagaagcttcattccctcttaatctagttaagccaggacatccmgaattcattgctttaataaagaacccaggccgggtgcagtggctcatgcctgtaatcccagcactttgggaggctgtggggggcggattgcctgagctcaggagttcgagaccagccagggcaacatggtgaaaccctgtctctactaaaatacaaaaaattagccaggtgtggcggtgtgcgcctgtagacccggctactcaggaggctgaggcaggagaattgcttgaacccgggaggcggaggttgcagttagctgagattgcgccactggacgacagagcgagactcagtctcaaaaaaaatttaaaaatttaaaaaaataaaaagaatccaaccccggcagggcgtggaggctcacacctgtaatccagcacttagggaggccaaggctggaggattgcttgagatcaggagttcaagaccagcctgggcaacatagttagaccttgtctctatttttaaaaatataacaagcacagttgtacacgtctttagttcagctgctcaggaggctgaagtgggaggatcctttgaacccaagagtttgaggctgcagcaagccatgatcacaccactgcactccagcctgggtgacagagtaagaccctgtctcaaactttttttaaaatgaaagaatccaacctttttttactctgacctgcgagagtgcagagggtctggggaacatttgcagaagcaacaggtaccagccagtgctggaaggagctcaccctgggaggtctcgtcagcctctgtccttcatggctgtcccttgtgtcccatgtggagagcccttcctccctttccacatggtaagcactgagcccaatttcttctcaccccacagatggtccctcagagcagagatgtctaatgaaaggttcagattcagatcactaactttccatcttccactttttccagtggtggccatgttcccccgtttgccttcacaaaaaccttgtgaataatacaagccatatggactctgatttacagtttagaagatgagcagaggtgggtgtgagttgcccagtcatgttgctagttgttgaagaaactaggattgttctcaggtcttgggctcctggcccatagaccagtggctctgtgttctgatggggtattggggaggatttttacaaatgcagattcctgagattgttcctggaacatctccgagtgggtgtgggttgtggccctgcgtgtgtgattttgcctatcccagctccggggtaccaccaaccactttttgtctctgtgggtttacctactctggatattttgtttaaatggaatcataccaggctgggcacagtggctcacgcctgtaatcctagcactttgggaggccaaggtgggcagatcacctgaggtcaggagttcgagaccagcctgaccaatatgatgaaaccccgtctctaaaaaaatacaaaaattagccgggcgtggtgtcaggcacctgtaatcccagctactcaggaagcagaggttgcagtgagctgagatcgggccattgcactccagcctgggcaaaaagagtgaaactctgtctcaagaaaaaaaaaaaaaatgaaatcctaccatacatgacatcctgtgtctggtttctttgacttggctgatgtttgtcaggctcatccacattgtagcatgtcagtcctcgatgtttatgataagctgatagcccactgtatgaatataccacacgattatccatttgtcagttgatggacattgggttgtttccactttttggctattgtgaatagcactgttgtgaacattggtgtatgagtgtctgatgacttgttttcagttattttgggcatatgccgaggaatggaattgtagttttataccataactccatgttttgactttttgaggaacctacaaattttccacagtggatgcaccactttacacccaccagcagcacaccagggttactgcttctccatatccttgtgaacacttgttcctttccttttcttgtattatagccatcctagtgttttgtcatcctagtgggtatgaagtggcgtgtcattgtggttttgttttgcattttcctagtcattaatgacattgaccatctttccacaggcttactggccattggtatacattctttggagaatgtcgatttaagttcttcacccattttttattttttattttttatttttttttgagatggagtttcgctcttgtgcccaggctggagtgcagtggtgcgatcttggctcactgcaacctctgcctcctgggttcaagcagttctcctgcctcagcctcccaagtagctggaattacaggcatctgcctccacacccagctaatttgtttagtatttttagtaaagacggggtttcacwatgttggccaggctggtctcaaactcgtgacctcaggtgatctaccagcctcggcctcccaaagtgctaggattaacaggcaggagccatcacacctggtctcttcccccatttttaaattgtgttgtctgtctttgttgttgagttgtaggagttcttaatagtttctggatatcagatgcctttgtggttttcacatctctgcaggcaactgtgtgtctcaaaagcaaactgcaggattgggctgcaccatggactgggccaggcatctgagatcagacagacccaggctcagctcccacttcctggcctcttctgccaccctgggtgtgcagcctcatccttggagccccagttgcctcatccgtaatggggtgtccttgttcatattgaggctctctagtgaaggcttacggtcaggcacgactgcaaattaaagcttcacaaatcaaacctgttggaatttctaagtctctctcgatggcccactcaggttagcagcatgcagctcattctaccccgtcaacgttgactggaagggtttttagtccctgtgttgagccacatctgcagcttgtgcaatgcaaaaccaaggaaaagaaaatggaccccccccgccccccccttgatggatctagctgagactaggcactggccaggctgtcacctacagtggtttcaacctcctgctgccagcaagacagcatctcctgtcctttttgtgcaggaaccatagctctgttgggttaagtgttttcctctaccaagcagctaacctggccttgaaacctaatctctgatgccatgtccccccaagccccatcagagttttgtaaaaagcccctccctgctctccacaccaatgmtgagagcccatggggtaactggaggcttccctgccatcttggcaaagaagcctggctgacgtcctgcacatgcttccccaggtgattgcttgcacttaacagcagaggaaacgagaccaccccacacaacttgtagcagttgaggagtctctgcctgatcccaccccggatacttagagcatccagaattaaaaataagccttgtcaccaacatccggctcccccactccccagagccaggctcaatgtgcccaacagcgctggggcccgcacctggaggcactggcttttgagacactgggcagagaccccactgccctttgggatgaattcaccacctgcctcttayagaatccggccgaagacctgggatgttcacattcagctggatctcyaggtttcttggactggaacacaggtggccccagctcaatatgctcaccagggtgttgccactcacctgttgaccgtccctaccagggacagatctgtgcaccccatccccaccttagaccaccagctcacacacaggtggtgttggtgcagtggttaatgttaggtgtcaacttcactagattaagggatgccgagatggctggtattttttctgggtgtctgtaagggtgttgccagaggagagtgacatgactcggtggactgagaaaggaagaccyaccctcaatgtgggtgggtaccatccaatcagctgccagcacggccagaacaacaggtggaagaagggggatgagcaccttgctgagtcttctccagccctctccctcttccgtgccagatgcttgcttcctcttctctgctgttggacatcagactccaggttcttcggcatttggactctgggacttgcaccagcagcttcctggagccttctgccacagactgaaggctgcactgtgggctttctggttttgaggcttttggacttggactcagctatgctaccggcttctttccacagcttgtagatggcctattctgggacttcaccttgtaatcctgtgagccacttctccctaattaactcgctttctatatattacatacagcctattggttctgtccctctggaaaacactaatatagagtcagggtctggcctgcagtctgaacctgaaaggttccttctgaaacccacgcaagcgagccccagtggcctccctgcctgccagaggcygcagcccactgaactgattggtcttatcgtctcaggaattcggcaagcaatgcagagatgacccagtgcaggtcaccagagtcaccggtgtttgtctttggaacacacctgggttttctccactacaaccttagctttctcaaggaattaagattatatatatatcctgattacaaaagaaaagtgtcattaaaaacgcaaatgttggccgggcacaagtggctgacacctgtaatccyaacacttcgggaggctgaggcaggcagatcatttgaggtcaggagttcgagaccagcccaggcaacatggcgaaaccgtctctactaaaaatgcaaaaatcagccgagtgtggtggtgcatgcctgcaaacccggctacccaagaggctgagaggcaggagaattgcttgaaccagggaggtggagattatagtgaacagagattgggccactgtactccagtctgagtgacagagcaagactccgtttcaaaaaaaaaaaaaaagcaaatgttggctacacacagtggctcacgcctataatcccagtacttagggtggccgagctgggaggactgcttgaagccaggagtttgagaccagcttgtaatcccaggggtaatcatggctcactgcagcctcgccctgctagactcaagccatcctcccacctcagcctcctgaatagctgggcccataggtatataccacacctggctaattattttttgtagagatgaggtctatgttgcccctgctggtctcgaacccctggcctcaggcagtcctcccgcttcaacctccaaaacgctgggattacaagcataagccactgtacctggcctgtttttttgtttgcttttttaaatattagcagatacggaaacgagctgaacaggtcagctctacgggaataaatggtccccctttgaggacaatcccacagctaagtattcctgaagagaagtgcgtacaagtggatttacaaaaaggaaatgctatttggtcaaatttattacagttagtggtagaggatctatgggtgacattttcaaaggactacatttagattctccatttttggagtcctttttttttttctaaaatcttccctagcgacccttgcattctgagcaggggtagtcactgccttaccagagtcatcaaggatcctggctctgggttacttggtgaaggtaaaacaaggaatttsagtcaccacagtgttaagacactgaggcctaggcaagcccataccgtgctcccaggcaggcagggcagaggctgtccttgcctcgcggggaggggagtgggtgggatttcacagcccatcaggacagcccaggacccggcagccctgggagtgggtgggatttcacagcccatcaggacagcccaggacccggcagcctagggcgtgaggtcatgcaaagctcctagcaaaacagtgatttgtttccagttctctggctagaaacggaagacccagacattaaccttggctaggtgatgaaaccacgaacacttttaactcatcctggattttttttttttaagccatggtatgagacagtacatttagagctacctgaagcaagtggcttctacatcaggcttgtgttggggtctggtcgtcgaaggagtggcactctagactgagcttgcttcctggacagctgcgctctgaccaggggctggagtggcatctgggagcaccttgctgtgctggggcttggatgtggctggagggtggggcacagctaggcccaccagtcctcgttcccaggcattatgttaagcactgcccaccccagttaatcgtcacaagcacctggggttgggtattacatgaccctccccagttaagagatgagaagactgaggcacaggctctgccccagactgttcccttgctgccccaacaccgccaaggaaactgctcaaagctctccagcatcaaggcatcaagtgattggaatggacctcagccaagtgtctcccaccttggacccttataatatcctctacaaggagccctcgtgcccgcctcttgccctacacccaacacctagaggcctacaccactattccatttgcttggcacagtcctgcttcccttgggtcctgcagtcacagctggaaggggtaggggagtcccctcaggacrtaagtcggggaaggaccagcagggtgcgagtggcacagctaggctggaagcagccctgcacgcagaccagagccctccccagcccacatgtgtcatctggtgataggaagtgagccctggctttggctcttgcgggtgagagggttaagatgccctggcctctcacctgcacaaggcggggcaagtttcctccccacttgtgcagccacaaagaggtgcaagggaggtagagaacacacatttctggccgggtgcggtggcccatgcctgtaatcccagcactttgggaggccaaggcaggcagatcacaaggtcaagagatcaagaccatcctggccaacatggtgaaaatccatctctactaaaaatacaaaaattagccgagcgtggtagcgcgcacttgtagtcccagctactcgggaggctgaggcagaagaattgctttaacccgggaggcagaggttgcagtgagccgagatcgcaccactgcactccagcctgggcgacagagtgatactcactctcaaaagaaaaaaaacacaggtttctaaaaaatgatgagcatggctgaagggctgtcaacagcccactaattacagaaagtatggtgcagggctcagcagttcagccttgcgggaagaaacatcccaaactggctggttcccattactaaagcaacaccaagcttttcatcttttccttccacttaccttacttgtcacggacagaaagtctgtgtccccttcaacttgtatgctgaaatcctaacccccaaggcactgctaacaggagatggggtctttgggaagtgattcgatcatgaatgtgggcccccaccccatgggtgggcttagtttccttataagagaccctaggagagcatttccccccttcctccacatgaggacagctagatggggacacctatgaaccaggatgtgggctctcaaccaaacatggaatctgtgactcactcttggatttctagcctccaaaatggtaagacataaatttctgatgtttataagccacctagtctatggcattttgttatcacagcccaaacagactgagatgctaatttattattactattattattttattttattttattttgagacagagtttcactcttgttgcctaggctggagtgcactggcacgatctcagctcaccacaacctccgcctcccgggttcaagcaattctcctgcctcagcctcccaagtagctgggattacaggcatgtgccaccatgcccagctaatttttttgaatttttaccagagatggagtttctccacgttggtcagcctggtcttgaattcccaacctcaggtgatctaccggcctcggcttcccaaagtgctgggattataggcgtgagccacagcgcggggccaagatgcttatttatttatttttttgagacagagtcttgctctgtcgccagtctggagtgcagtggtgcaatttcagctcattgcaacctctacctcccgggttcaagcaattctcctgcctcggcctcccgagtagctgggactataggtgcgtgccaccacgcccagctaatttttgtctttttagtagagttggggtttcatcatgttggtcaggatggtctcgatctcttgacctcgtgatccgcccgcctcggcctcccgatgtgctgggattacagatgcgagccaccacacccggccaagatgctactttttaaagtaaactctaccacctccaattgacctcaagcactcttgccaaagtgccaggacaagccacaggacttacagaaaaccctcaacagctgcgtatgaaagcaccaagactcccttatccagcctgagttatatatacattagaattttttccttttattcttgttcacatcttcgaagctgagcttcgtttcaaaaggaaggataccagaggcaggaggagggtcacttgggaggggaggtggaatctccctcctctagcccccttgctacctcttaacaggcttcaaagtcagaatacagccatcagctgagagcagttcattttggcacactgggaggccggctgtgcacaccggacctctctagtgggggatcaggtcctctgctctccagtggggcctggaacagctccagtgagatgccccagctgtgggctgggggtgcagcacagagcctcagctcccccaggaccctcagctgcctgaagaaaacactcacctggctggagggaaaaagggccttgccctgaggtatcaggtgggtggcaagtcatactgagctcccgctcagcaagaaaactaaacgcacagaagacagcaggaaaatgccatcctttaacagccaaaaatctgtccttcaggggcaccaggtgactccagcccctgggggacagaacaaacacaccatacctaccatcaggcaccagacgcctcaaaacgcctggagctagggccggaaaaggcgttaagtcaccttctctcagcagaaatgtgaagctggccttcagcttctgcccaggatggcagaaaccacattctgttggtggattggttgctggtgatggacagagccaaaggtcctggggttggccccaagagctgaaacggtgcttgcaggaatggctggcactccaagctgcctgaggcagcccagctgcactcaggtgacagtgacccaagctctctgggctcagggtttatggccaccatagcccaagcacatcctgatgccctgggtttaagtaatgtaccctcctttgttctggcaaaaagctagagaaaaaccactattcaaatccctggaagggaggtgggtgcagctccccagcattagaaaacatggcaaccacccgtttccacccacctagagcagcccctcgggctcctgtaggccactgtatagcgcatagccaatgtcgtcaatctcctcctcacgcaagctgctgaagaggttcacgctggggttgaagtggcagggcaggctggcctgctccaggctgccgatgagcagctccagggcttgcaggaagcgctcacccaaggcctcctccgtccaatccacgttgtcctcccccagacgcaggaccacctgggtcaggtgaccccggcctagctgccccagagccgagcaaccacggcagacagcacacagcagcagcagcagccgccggcgagtcccagcgtcatggtcgtccagggctcgcagcctagcagcctccactggatacaggtcctgcagccagaggttccccgccagcycctccaggggccaggccaagaggaggcggtcgtcagcatcgaccccagggactgccacaagcacagccacagtgagctccaggcgttcgtgctgcacctcgagcagcagctcctccgaggccatgctgggccggatcaggcacccgagaaggctgccaatggccggccagttgacagargcagccagcgccttgcggagtagctccagcaggacgcgggaggagaggtagcccccgaccaggaagcggtcccaggggctgctcccacgggggcagaactcaagctgmgtcctgcgcacggcccagcagcgagggtccctcgccacagtgtccacgcccggcaccaggctccacaggcccggctccagcaccagtggcaccaggagacgcacatggtccgcagcccccgcctgcagcccgtcgtagagcggccccccaggcacgaatgccccaaagggcagttccgggaacttgctccgaaagtaggcctgcagctccagggcgatgtcgccagccagctgtttggccaaagccacctgggctgctgggatggtcacacggtcccgctcgaaggccagcagcctctcctgcagtgtcagacacagcggtgctggggagctgagctgtggtgtcacctcaggatcagtttctgcaggcccttctgcagagtgaaggggcggggaacatgtcggaacagcctgtgattagttaagaaaacgccaccgagaactagctgtgtgatgtcccagggcctcacttttctcacctgcagtggcacctgagaaggcactcagttcagatcctcacatatagtgagctcttggtgacgagttctcattgccccagagtccaacaccctggcgacaacagcttcatgcagagtaggtaggtatgtcacgcccctctggacctcagtttccccatctaaagctccccaccatcacaacgctaccaccttgctccaggaacagggcaaagaaacaccacccccattaaatatctgaggagcccacaaccgagagagaagcagggactcgcgcagggtcacacagtcagtcagggcaaagcctgggctgcgtctcttgaatgtgacaccaaaagaggggaaggagtgccactcacctggggcagacgacgagggggccaagggcaacactggctggctaagggcagcaggtggaggccggggctgcaggtgtggtgtggccttgagcaggctcagttccttccagctgtctgccttggtgtcatcctcatcccgcgggctagtggccctgtcaatgaactgcaagcacagtcacacagatcagtgtatatgaaatctgggcagtcatagcaaagcccagggcaaagcagaccagcgtgctgggtggagaagcaggtgccctgggctcccatgaaggccttgggcagtccccacccctccccagggcccctctgaaaagcccaaccctgttgtcctcctctaggagcttcaggcatgacccgcccacttggccttacccgcttcacggccagggtggcaatgcccagcacagcagccccgcccacgcccagcaccaggcgggcattggccaggaggaagtccaccatgctgcccagcccttcgtcgctacgccgcttcccccgtttctgggagaactctgccatggtctgcctgtaagagagccaggggtgaaggggcagctcaggtgcaggtggccaggctgggagaggggctgctgtggacaggtgctctagctgtccttatgctgggtaacagagctgagcccatgaggggggctttctgagaatttctcagagaaaggggccacccatccacaggggaggacaccgaggccctgggaaatcacgtaaagtacctgagaaagggcagggatgggatatgagcttgggttttggggtcccaagcccccatctctcatgaggagatgagggagctgccaagccccttctcccaaagctgcctggaaagaagctcacaaaggccctgaggcttgtgcaggtataggaaggggcctctctccctggagcccaccctccaggacctctgacatcaccagggtgtcatcatcactacccctatgttacagagctacaggctgccagctcacaagtgagtggtaaggtctccaacccatgactgcaaggcctccagactctcatccgcccacagagtctgacggattctccctgtgccaggtgcccaggtcctcagcagcagcctcatctgaaggttcctacccagagggcacagcagccctctatgataacctcttcagaagagcccaaagtccagagaagaccaacaatttggggccccagccagtctgggggaccactgggaccagttacccccaaatcttgacagggtagcccaagaggcagagctaccaagtcagagcacgggcagagtaagacggcccaagctgcccaggcaggccaatgcagatgtgcttgtcagggttgaagcccctttggcagggcagaaagggctgcccagtgcctctgtacagggggctctctgggcctctcagtcttgggacaatgtgtaggtagtggtgggtgatgcttctcaactgccggaaggccaagcaacacagaaagtaaggtgaaggcctgggccccagcctgtttgctcacctgtaagatggcataggcagcagtgaggggcagatgtgggcagccttgaagtgtgtggctgggtgggggccagcacttgggaagtggaggcaaagatctcctagggcccagtccacattcctcacgttctgcgagggggacactgccctcaggccctgggagctgagaagggctgggaccttaggacatcagttagacaccaagcagaactctcccggggaggcctgagcagatgaccatgaggtcacagcctgcccgggcaccaaggacttctacctgccctgccagagtgtgggtgccaggggcccagttgccaggtgaccagatgcctggagtagctgaagcctgaagcgctgtgtgactcagccccgtacacccgcccattcgcyccagactawaaataagacggtctctggggcgatcccaggccaaccgggtgacccgccacggccccagggccggtttcaatctcctcatcggtgactcggggatcaatactgccacccgcccccagagagaccaggaatctactttgcaaactgtaaagcgctttaaatactcccaacctgtctaaattgggactcagccccatctctggcggggtcgcgcaggcctca

SEQ ID NO: 96073 - DNA, 22155 bp, Homo sapiens
gtttcacctgctttgcctggaaacttgaatctaagatgtgtgcccaccctaccaacgaggaacaatggatcagctggcatcgagggcattctttcccaagaaacccagctttaaaatgtttccacagtgggctggattgaagtgcatttgaaagcacaacgggttgaatcctgttttgttgtccccatccctgatgacacagccccactgtgttcttcttattacataaagggcaccccttctgagtaaagatgaagtcagggagtttctgtagagcgggcctcccacactgggccagctggacggggtgaagcaaggggagctcagggcctgtctggggcatttaaatgaactgtgggaagggctgagatgaacctgggccagagaactttcaagaacagccagtttggccgggcgcggtggctcacgcctgtaatcccagtactttgggaggccgaggtgggcggatcacgaggtcaggagatcgagaccatcctggctaacacggtgaaaccccgtctctactaaaaacacacatacaaaaaaaatcagccaggtgtggtggtgggcacctgtagtcccagctactcgggaggctgaggcagcagaatggcgtgaacccaggaggcggagcttaaaatgagccaagatcgcaccactgcactccagcctgggtgacagagcgagactccgtctcaaaaaacaaacaaacaaaaaaaaagaacagccagttggtggaaaggcacgttgggccagaaagcagaggctcccatgcttctcttcccaagtctagctgaaggcttctggctctccctgcccccagcaggcatgcccccattcccataacctgcggcaccaggcacttgacagcaggtgctctcaagaattttatcctcctcaatcctcacaaagcaggggagattattctctcagcattgctggggagcccaggctcagagaggtgatgtcgcttgcctcaggacacacagcaaaggtaagtctgattggtctgcccccaacgcctgtgttctttgaccaccctgagcctccctggaaaaggagactgaggctggggaatggatgagatgacctcttgtactcaactactagagttaacatccctcaggccactggtaggtgtggatttttaaggccaggaaaagctgtctggcgctttctccttttactaaggaatccagagcaggcagccccagaaggcaaccccttaaccctagccaggaagaggcagccctgcaccttccctcctccctcagccaagctcccagccctgggagggagagataggcagagtggattttcagtcccatacagcagcccgggagccacaccatggagccgtgacctttccctcagcccctgggcttgcttacagctcaccccacccacagcagtagccttgggaaacagccccaacttgaagcctgccgacctggggtcaagtctctgccactttgtcttaacagagaagccccttccttgtccccacccacaaagtgggacccagcctacctacccctgcctgcctccccttgcagggctgctgtaggtgtccagaagagactatataaaaagcgttctgtaaataaaagtgctcattagcgggtcgataccctcctcccttcttcaccctcactccctccaagaagggaggcaaagaaaattaagtcgataaagaaactgggctggataaactcctactctgcctctctcacttcctccagccctcctctcaggtgagcagcgctcctttcacgaacaacagttagcggtgaaggcactagcctgaggctaagcatcagtatcacacctggatggaacctcagatctggctgactccaggactaagggcttgtggaggcacaaaactacagccaaagaggaaggcgcttgcctaaggtgagcaggaagtggccgccaggtgtctaagctctgcttctcgctccatttagggtcattccttccagagaagatcagggccaatgcctgacccccaggtctgccacccccatgcccctgtgtgttacatctggaccgctgaacctacagggtgcctccctgatcccacaccacgctgggaaccataaacttggcagagcctcatgtgcctttgtgtccccaaaatatcttgtatgggaggccagcaaagcctcttggaggagggggttgggggggaagtgccacaccctccaggatttgtatcgttccttacccttcttgaaatccctttccagccactgctacttttttttttttttttttttttttttgagacagagtcttgttctgttgcccaggctggagtgcagtggcgcgatcttggctcactgcaacctccacctcccgggttcaagcgattctcctgcctcagcctcccaagtagctaggattacaggcacgtaccaccaacgcctggctaatttttttttcattttagtagcgacggggtttcaccatgttggtcaggctggtctcgaactcccgagctcatgatccgcccaccttggtctcccaaggtgctgggattacaggcgtgagccaccacgcccggccgccactgctacatttaaacaaatgcatactcatgtgggtagggctggcgtgactcttctcattttatgataaggaaacccagagaggccaagcaactggactgaggtcactccaaggaggagtggctgagctgaaatgagaatccatgttccctgatgctcctgagggaaactgaaggaggtgtgaacacaattacagaggaggaacttcagcatcccgggccttcaggaggcattacccactgcaggccattctcctcctctgagcctcagtttcctcatctgtaaaatgggtgaggacattgggcctggcacctccaagctgtcccttccacttatttcttaggttgcttcagggcaggctgggaagcagcaagagaaccaattccactgatcctcccccatgacagcttaaatcccaaggagaagaggcgtcttgaaccaaggccaggagagggctgcaggcgttcccagccaggattctctgggaggtgccaaatgaacttgaatcttcaactccagaccttcagagagcaagcaggcaagaaaaatatggggcctggaaaaagctgcgctggaaagggcagagaccctgctgtcctggctctgtcactaactagctatgcggccttggcccctgcctctgtgcacctcagtctcccctctgtcaggtgaggtcaccgttcaggccctccagctctaagagtgtgcagaacagttttcccagcattctctctgtaggaggtacagacaggaagagatgtttttcaacaagtcaggcaaaatgttgcacacgagttagattctgtagagaaggagctctgactgaggaaagagccaccaaggaggtgcccagagacaagagagggccctgctcctggaaatggccaggcagggactggagggcactcagcaggagtgatggcagcgagacggcagtcctgcctctagaaaagggaagacctccgaggttctgtctggctaggaggttctagaactcagcatttcctctcctgaggctctccccaaccctcaagcagtatccaatccacctggccttcccttccacaggaggggaacttctgagtcgccttcctggggcaactagcagaggggactccctcctggccctgggaagtaggggtagggcagcattgggtgcgtcctggtttatagccctggtttgaaacaaggcagcattggattcgaatcctgccttccaccactttatgtcctggcatctcagtccccccaccccccgctgccaaaacaggggcattgagctttgttcgctgagataatgcggtgccaagtgtctggcatgaaatggcagctgctgttacaactctgccgacgggctgcagctgcctggaaaggttatggaacctttgcaaacagcaggcaggggccccaggagagctagatttggggagagggggatcctgcggggagggacactgttgatgtctataagggtttctgcgggacgagagaggcctggagaagctggatgtgtccgtgggaggtttctgtacagcaatgcaaacgctggctcaggggcatgacacccttaggtatatcctagtacatgtggggcagctggtgcctgggagtggaggtggtggacatgtcaccagtgacttctgctcacacagatgctaggtggcttcttagcacatggctatgaggacacattcttgggtccttgtgcatccaagctgaaaaagcctttaggtttgtctccactttctggttttatcgatggaaagactgaggcctacatgggaggattgaaggcatgggacggaccctggagagggtcccagtcatccttactccctatccttccatggggcaatactccccagggaccacccagcactgggacacctacctactgcatccggctccggctcggtgcccaggaaccgcccttgagaccttgaatccaccagctggaacctcttagattcaaggttctccagcacctgctcgtaggtcttgagcagggagcggtccagtgtggctttgaagacggccggttctgggcgtgagggctcggatgtcaccgggtggccctccttcagccagttccggaagccaccattgagcactgatacggtgcggtggccaaacacacggaacatccaccagacccggggagcatagaagctgcccaggtgttcaccatcatacaccaccacgtgcgtgtggttgctgatgcccaggcggcccacatactcggcgaagccagcctcgctgggcagcatcatctcgtagggcgacgccgtgtcccggcactcttctatgtcaaagaaagaggcgccgggtacgtggcgctcgaggtactccttgcgggcctctcgggtgcctggtgagtaccaggacgcgtccagcacccgcaggccgggccccagcttgccagtcctgatggactccgccagccacttggtggagaccagcgcccggtagagcacctgatgaaccatggcttcagctctgcgtgtcacctggcacgggtgggaaccaggaaagagagacaggcgtgaggaaggaagtcggtgtgtgcagtagggtgaggcctgggagaagctctttctccctccgcactcccccgggttccttgtttacagcaagccagcgaggctggggcgtgcagcgggataagtttgcagattccctctggaaagccggccccgcccctcccagccggcccgggggcccagcgcagaagcgggtggggcaagagtttccgaggactccaagtaggggcgcttcctggggcggggatctggctcctagaagttacagtactcgatcccgccaggaaagagcaatgaaagcatgcccgggatggggggcgatggcatcttgggcttagaatcccctttccttccaaggcagagggggtgggcgcacggctaggaagctccgcgagccgcgcacacgccatcgcctgcggcctccccaggcagcccgagctcgcccgcctccagagtgcccgagtccggcccgtagctcgctgccctctgccctaggtggatcaggggttcccggggcaccccgtcccactctcgcaacgctatccttccccgggcagcaggtggcccgaccggcggcccaggcgcccggccgctgcccccgccccgcactcactcgccccggacgccgcgctggcgctcgccccggccggctggagaagttggccggttcaaacccccggccgcagctccccaggcggcgcgcaccatcgcgccaccgccagagggggaccctgcgccgcccgccgccatcccgcgcctcccccgcgcggccgcttcgcgcccggcacctgccaacctcgcgcgcggggcctccgggacccgcgggggtctgagggggacgccgggtggcgcgggggccgcgcgggcctgggctgggcggagcgggcgtacccccacggcccggccagtggaaggcgcgggcagcagcggctccgagtggccgcggcggtgggctgtgccggagtctcctccctttggtccgctgcaggttggtggcgggaggaggggacagctgcgggcgcggggagggggcgccgcgccgcgggggccatggcggagccaggaagccgggagtccgagacccgggtaactgccgcggcgtggcggcttgcctttctggagggggagggagtggctctttgggggtgctcggcgcggggctcccgcgcgggacctgggcggaagagggggcttagtctaggagagaaggcgcgccgctacgttggcactaagggtgactgtccgcttggggcggcctgccgggtggggtcgtggcgagtggcgggtggggagccttgggtggaagtgggtgacctggtggcaccagagagggcgggggagagagaggaggacagggagacgagaccccgctgacccagaggccccaggaagagacactagccaataacttgttagtgagtgaaaggaactaacattgtccagccctgcttggtgtggcactttgctgggtactcccgtggtgtgacttaattcccacaataaccctgaggagtaggccagaaacttactaagacaggagagagcggcagagcgagttgctggaggacacacccagagttgaggccgggcctgatccctggtctgaagcccacgtggtaccagctgcctttgtttacctggctcttccctgaaggttcatgctttttaaaaaattgcctgttttgaacttagcccgtttaatcataagttgatgtaattcaatttttaataatagctgtatttaacaaccagttggcaaaattcctgaaaagctcgccatgggctcttgcaaactgggggacaccattgcccctccctagcttttgcagaggccagcctggaagctttccctgtttcccaaccctgaccttttgttttgttttgttttttgagacaggctgtggttctgtggcccagactggagtgcagtggcgccatctcagctcactgcaacctccgcctcccaggctcawgcratcctcccaccttagcctcccaagtaggtgggaccacaggcatgtgccaccattcccggctaatttttaaatttttggtagagatggggtttcaccatgttgtccaggctggtcttgaactcctgggctcaagtgatctgcccatctcagcctcccaaagtgctgagattacaggcatgagccaccatccctggcctcatccctctttttaaaaaaaggttttgttctaaaatgctcacagcaatcctcaaagcctagtgtctggtggttgggggagggggtgggcaggagggaccaggctggggaggtccaagaggagctcccaagctctgctcctcaaggggtaccctggatccagcctgcggctcacgcttgcttcagtgcagctgtgtayccttctgacatgagcctggggcggttacgtcctggggtcctccactcccagggcaccctcacctacagtgatcccggcttctgaatcacacaggcacctggtttctacccctccctgacacccacagcctgccttcacaccctcctttatggcccacagacctttgtgagaagtgccaatcaagcagggagactggggcagggtgacctcagatctctgaagtcccaccaagccctgaaattctaagattttagatttgctgctggcagttccagggccaccaatgagagtaatggaagaaataatgcaatattattattattattattattttgagatggagtctcactctgttgcccaggctggagtgcagtggcgcgatctcggctcactgtaacctctgcctcccaggttcaagcgattctcctgcctcagcctcccgggtagctgggactacaggctcatgccaccatgcccagctaatttttgtatttttagtagagatgaggtttcaccatgttagtcaggctggtcttgaactcttgacctcgttatccgcccgccttggcctcccgaagtgctgggattgcaggtgtgagccaccacgcccgacctaaaccgtttttaatgattattaaaaccagccagatgtaatgcatggtggttgcccctctacatttattgtttaatcttggctctaagaggtggaggtgagaagctccattataaggaacagaaaccacccagagaccctacacacccacatcacacaaccagttaagcagtggagtggggtttacattgatttggggggctctctggctcctaaaccagggctctttctactgtaaatggatgattgggtgagggaaacaaggatcctcaagaataggggacagtgtttgggggtgcacaggggctgctgtggttcccacaatagggttcctcaggaaggaacctgcagcatctgccagcacagcgccccctagctgtgctgtaacgcagataatggggatcaccccttagccaaacaccccttggcagcctccctaccctaaagaccgtgctgaggcttcctgggcccctggaaaagtcagattagtctggacttcctcctactccaggaagccttcccacctcttctgctgccaccccaggcaaacataggggccctctgtgctcaacactgaattctaaactatcctcaatttcactctctcttgcctgcagcctgacgtttccccccagggcttggcaaaggcaagagtgcctcggtgtccggcacaaggcctgaccgcatgggtgaagtaggttcctaaaagccagctgcggccagactgtgggggtgggcacagggtgtcaccctagaactcattaggccctggtcatcatggcacctggggcaggggaagtccagcctgaggggtcaaattctggctgcaaatcctgaggctgcctcctgtgaccacgggcaaggcacttattcttctaattgccagtggcctcattcataaagcaggcgtcctaatacccgcccaaggctgcggtgcctagcatgtgacctggcccacagaggcactcggtccacagatgttgttctctacctgcccccttcatttcgctggcaggactgcatgcagtgggtgtcaaggttgggcctcacacaggggataagtgagggctgatctgcagcccatactccacacacccagccatgtgccctggtgggggctcagcctctgcctggcagaaggggccctttcctctcacctgcacaacggtggcttcccagcacaaagggcttaaagtgtttgggaagtttacacccaggaaggctgtgggctggcctggcatagtgggctggcgagctggtgcactgtctctggtatgcaggaaagatagagaggagagggagggaggtgcgaagtcactgttgctgctgctagaagggccagagagagcccaggctggacaggcaaaacctggcctcgccagactcctggagcctgcacagagtgtgtgkctgagaagtccggattctggtgccagactgactgcctagtgagaagcctggcaccgccgggtcaggctagtgcactttttcttgtttgttttttgtttttgagacagagttttgctcttgttccccaggctggattgcaatggcacgatctcggctcactgcaacctccgcctcctgggttcaagcagttctcctgcctcagcctcccgagtagctgggattacaggtgccctccactaagcccggctaattttttgtatttttggtagagacggggtttcaccatgttggccagactggtttcaaacttctgacctcaggtgatccacctgcctgggcctcccaaagtgctgggattacaagcgtgagccaccgcaccaggccaggttagtgcacttctgtgagcctgagtgtcctccttgaaacggtgacaataatataccaggcctcttaagatcactcattcaacacatactggagagtctactgtgtcaggcattgttctaggatattgttaggattcagtggtacccagcaaggactcagtaaattccagctactgttcctattaggtcgccaatataaatgcttgatgagtgaatgaatgacttccgtctgggacttggttgcaaataaagccgagctgcatcttagggaggggtggagactttgcccctgtttgtgccttgaagccagcagggccttgccctaggatacctccacccaccctcctgcccagcaagtggaggtgaggggcgtggcctggggctctccgggaggtcatggtcattgggtcactcggagcttgtgtttatatgaggcctggcagagggaggcccctggctacccacctttgtgcccgggttcaccaccactggtttctgcgttccctggactctgccstgcacgggccgcacctcccccgccggccctcgcccatgctccagccccagccctagccccaacagcggcctctccctgcttcccttctgacatcctccctgtcgcccaggcccgcagcccgagtgtcgccgccatggcttcgccgcagctctgccgcgcgctggtgtcggcgcaatgggtggcggaggcgctgcgggccccgcgcgctgggcagcctctgcagctgctggacgcctcctggtacctgccgaagctggggcgcgacgcgcgacgcgagttcgaggagcgccacatcccgggcgccgctttcttcgacatcgaccagtgcagcgaccgcacctcgccctacgaccacatgctgcccggggccgagcatttcgcggagtacgcaggccgcctgggcgtgggcgcggccacccacgtcgtgatctacgacgccagcgaccagggcctctactccgccccgcgcgtctggtggatgttccgcgccttcggccaccacgccgtgtcactgcttgatggcggcctccgccactggctgcgccagaacctcccgctcagctccggcaagagccaacctgctcccgccgagttccgcgctcagctcgaccccgccttcatcaagacctacgaggacatcaaggagaacctggaatcccggcgcttccaggtggtggactcccgagccactggcaggttccgcggcaccgagcccgagccccgagacggtaacgcgggggaagggggcaggaggtcgtcgggggcgyggcctctacgccctgagcagtgccctggacttgacctttcttttatttttttaatttatcttgctttcatttcctttccttttttctttcctttccttccctttcccttccctcctttcccccttttccctacccttgccttcttttcacagggtctggctctaccgcccaggctggagtgcagtggcacaatcatggctcactgcagcctcaacctcctgggctcaggtgaccctccccgctcagcctgaccttgcctttaaaggccactgcatgaggtggggaaggagatttgacttccacttgcctcggtgactttgtctgttaagcagaaccataatactggcccttcccctcctgtgctttgggcagtgactctccctagctcattgggaaccctggttgcccaaacagctctcaatccaacactagaggtgtggggggtcactgtggaatgttggggggcaggccccagtatgagagaaaaacccagagggatggtcctgatcagggctacccatgcccctgaggatggtggaatgaaggcagagtcgggggctgcataaaggaaagtctctyccagggaccaaagcttggagaactgagggtggaagggggattaaacagaagtgggtagggcagagccttctgcctgtgggctggatttcctcaggcaagaagcctgtgggtaagctctgtataatgcgaggagkmgtccccacaaagcaggctggtcagtggtcacgctagtgtgagtctttcaaacatcccgtgtaagtagatactgtcattgcacagaggaggaaatggarcctggcccaaggtctcaagaaacaacccagccgggattcagactcggcagcctgcgcacttaacagccgtgagcaaccaggaactccccagccctttctcttgtgccttcaagagtgcaagaaactgaccactgcccctagagagctctctgaagagcattcccatggctacagattgggtttggagccgcttgggctcaccatgggccagcattgttttggatggcctgagggcaaggactgtccctgctcttcatgcatcctgaagattagctcagtacctggcacagagtcgatgttccagagaggtttggtgaatacagaaggtccctgttgcatggaatcctgcaaagcaatgttggtgttaccggaaccataggaaacagctgatatccaaccatttttgaacctacacaggtgtcagtttcatgtggttcagcctaatgagagcaccaccttaatcctgttgggttctccatctcagccccaggggaatgagcaacacaggggagctagctggtggtgccagactggggttcagatccctgccacatttacatgggctttgtgacacacgacgggtcatctaatgtctctgaactgcagcttctgcctatgtagaatgggagcagtaacacagagcataaagacatgataggggcaaggagagcaagtgtgtaaagcactsagctccgggttttcatgcacaagtgtgctgcacacttgtgcctgacacttattcagtcgcactagctcatctatagaatgggaggtgatacacgcctagcaggcttgttgtcaaaacaaactaagctcactgcagctggatcagtgatgaatgtcactgtcgtcatcattcccactccacagcctgaggcctggccaagtgctcctgtgatgtgccacaccagtccagcaggcaggggaaacatgctttgcttggtgggattcaaggtgtagggatggccctccctttacagtcaccaccctgggttgagagtttgttcctcctccttgctctgggctggtctctatgtgatatctgaccaagcccggtaactgtgtctgttaggtgggatgcatgacccattccagcctctccacagactcgggagtgctgtctctatgccagggtctgagaatagataccgatacatgggtcagcagctcctgtgggggtgtcactccactgcggagggaaaccaaggcagaagctggacaagagtctgaatggctcagatttgaatcattcgtttttggggggttttttgtttgtgtttgtttctgttgttgttgttgttattgttttgagacggagttttgctcttgtttcccagctggagtacagtggcgcaatctcggctcaccacaacctccgcctcccgggttcaagtgattctcctgccttagcctcccgagtagctgggattacaggcatgygccaccacgcccggctaatgtttgtattattagtagagacggggtttctccatgttggtcaggctggtctcgaactcccaacctcaggtaatctgcccccctcggcctcccaaagtgctgggattacaggcgtgagccaccgtgcccagcccaagcgttagttgtgaaggtttattttgttgcaaatcccagtcctgcatgaaaatgggaatgttagtaacccctgcctcaaggtggggcagtgaaaacaaaaaacaccctgggagtctgcagaggtgtgggcctttcccatcccattctttctgctacaatcaaaatgatcgtttaaaaatggaaatctagrktgggcaaggtaactcctacctataatcctcacactttggaaggctgaggtgggaggatcccttgagcccaggagttcaagaccatcctggacatgatggcaagccccttctcaataaaaaaaattaaaagtaacagtaaaaaagtaaacgcagaagcctgagttccccctgcagtcaggtcaaagcccccaagtcttactccaggcctgctaaggcgttcccatccccttcagcttcccctttgggcctctggcttctcactgtctgggctttcgtgacaatgacctttaacccctccgggcaacaggtggttccctcgcctttcagattccctctgcctgggatgctctaggcctccatccacccagacccctttatgtgactgaatcctactcatccttcggggcattctcagagaaacttcctccacccactgagcccccagccagtgtggcgtgaaggtgggaagcatagacttgcctgggtttactcctccctgccctctgctagcttgcacaagctagtctttgtacttcattctcttcatctttacaaaagagaggataataatttctttcccagagaattttggggtggattcaaggagaaagtatagctgaccgtctccaaacagtgcctggcagaaagtaagcattcaataacatcagctattggccaggcaaggtggcttactcctatattcccagcactttgggaagctgaggcagaaggattacttgaggccaggaattcaagaccatcctgagccacatactgagaccccatgtctataaaaaccaaattaggccaggcgtggtggttcacacctgtaatcccagcactttgggaggccaaggcaggtggatcatctgaggtcaggagttcgagaccaccctggccaatatggtgaaaccccgtctctactaaaaatacaaaaattagccaggtgtgatgggtgcctgtaatcccagctactcaggaggctgaggcaggagaatcacttgaacccaggaggtggaggttgcagtaagccaagatcatgccactgcactccagcctgggcaacaagagcaaaactccatctcaaaaaaaaaaaaaagaacaaaaaaaggaaattagctgagcatggtggcatgtgcctgtagtagtcccagcccctcggggggaagctgaggcaggaggattgcttgagcccaggaggttgaggctgcagtgagccttgatcatgccactgcacttcagcctgggcaacagaatgagaccctgtctcagtaataataatatcagctattgctgttactggcgttattttttttttacatgccccaggccacccagtagggcacttttggaacacccattatgcttgtaattattcagttgcctgtctgccctgccagattaaagctccttgcctgcaggtactgcacgttctagctaggcaggggtcttgtttattgctttgctgtccctagggtgcatagtcaggaaaccttggggcccagttcttaggttcaaagttcagtcagcaatttgctagatgtgttagcctcaggtggtacttaacctcagcatcaccgtgtataaaatgggggctcctctaaacagtgctcaggttttatggttgtgagaattaaatgagatggtggatataaaggatttagcaccatgcttgcatgggatgctctcaatatctcgagcaccacaaatacgarrtaccattcatagcatccttctatttgtcccctcctccctgctcccctgctgtaggcattgaacctggccacatcccaggtaccgtgaacatccccttcacagacttcctgagccaggaggggctggagaagagccctgaggagatccgccatctgttccaggagaagaaagtggacctgtctaagccactggtggccacgtgtggctctggcgtcacagcctgccacgtggcactaggggcctacctctgcggcaagccagacgtgcccatctacgatggctcctgggtggagtggtacatgcgcgcccggcccgaggatgtcatctcagagggccgggggaagacccactgaagctgggcaggacacaggcgagctcaggtgatgccrgccaccagcaatgcctggcctggtagctccgcttctgctttcacmaagagagtgtttcttcactcaactcaggtggcatttggggtgacatctcaaaggccaggaattccgttgacttgttggctgccagtaggggcgggaggaaaggcggaggcgagccctggaggagggaggccacaacwccgagctgcccacctggtgctgagctggggccccgcctcctttctgttttatttttgaggaaataaaataaccaagtgctaaatcttgtagctctggggctgcctcggttttcctaaggagccaggggttctgtcatgcccagcaaaggtcactctggggagcctgagggtcttggagatcctgtctctgccttccaagcagtgctggggccccagagctccccacttctgtgactgagctagcccctagcaagctgtccctcaccccataatcctgggcgttctcccttctggcatctgggctatttaaggtgaattttgctgtgacatgtctgtggtcccacccaaagctactctcccaccacctgcccttctagcaggtaaatagtacatctcatttccagaagaagatggggccagagcttaacagaagcctgtgccatgccaaggaggaatgtcccagcccagctgggatgttctagggaagggctaagctgagctgaattggaggagaacctggctctaaactctggaagctcacacttgggggctggtctgtggaattcccggagtgggtggacccagggagtttgattctttctgctcaaagagaacatctctccccatttcccaagggtaggggttccatcctccttgcccgggatttatcctttgtgcagaggtggacgtaggtgtctgagaaggccccaaactcccccctgcccatcacgacctggattgcccctccccgtctttccagccctcaggcaccatctcagcagcgcaggggcagtgtcctgccaggcggtactggggagagctcgaagttatcttattggcccttcctttggaaacgagaccagagaggggcagtgacttaccaaggccacactgaatttatgaagagccagggccagatccagattccctgactcagtttattcctcttttcacctgactgtatcccctcaacttccccctgatgctgagtcatttcccaagtccgcagggacgggagaaatcgacacagcctagaatcttggttttccaagtaagagctctaaagtaactcccaacctctcggagcctcagtttcctcccctaaaacatgggaatcgtgtacttccgaagaagaaactcagatgagagcccttccaagagtccactgcagagtccccgttttccacaccgggggttctcagcctcagtgctgctgacatttacactgaatgattccttgtcatgggggccgtcctgtgtgctgggggatgcttggccgcgtttctggcctctgcccactagatgccagtaacactgcccagttatgacaactgaaagtctccagatgtggccggatgtcccctggggggcaaaaatcacccccagtcaagaaccactgccctaggggcaaataacacaattgaccactgcagtcaggaacagtgtagacagggaaccccaacatggaggggctccccgactccccatcataagcaccttctcccagaagtggaagtgaggcagtttagacactcccccctttctggccggtctcagacaagctttagttttccttcctggaatggctctgccactttgaggagacaagtttgtctgcaaacatgtgaggttctgatccagcttccagtcccaaccactccacacaaggcagcctgacctcgaacatgctgcccagcctctgcaggcttccgtttctttyttcccccccaccccgagataagagtcttgctctgttgcgcgggctggagtgcaatggcacgatctcggctccctgaaacctctgcctcgcgggttcaagcgattctcctacctcagcctcctgagtagctgggattacaggcactcaccatcacgcccggctaatttttgtatttttagtagagacagggtttcaccatgttggccaggctggtctcaaactcctgccctcgtgatccaccttcctcggcctcccaaagtgttgggattacaggcgtgagccacagcgcccagacccgtttcttcacctgtaaaacgggcaaaatagtaccttcctggccagcacggtggctcacgcctgtaacctcaacactttgggaggcataggtgggaggatcacttgaactcaggagttcaagaccagcctggacaacatagtgagacctcatctgtaggcaaaaataagaaaaaagatgagccgggcagagtggcatgtgcctgtagtcacagctacttgggaggctgaagtgcaaagatcgcttgagcctgggaggtcaaggctgcagtgagctgtgatgacaccaccgcactccagcctgggaaacagagcaagatcgtatctcaaaaaaagaagtaccttcctgagcagtatgaggattacatgagataatccacagaaactgttttgcttggtgcagagtaaacaccaagggtttcttcccattagttttaaaggagttttacttattcagcatgttaagtgccttctgcacttccggcattggaggagagagagtgacaaatagaattgtgtcccagccctctcaaagcttccaaactagggaggagaaactagtcttttagagtacatttccagagagaagggggtgctgtgaaatgatctatttcacaacagactaattttacaggtgggaaaacaagctcagagaggttcagtgatttgcctcagggcacacagctagtttgctagaggaacctaactggagttagaattctccaggggaggagtttctccagcggatcttgcctgccatggttttccagattccaggatcaaggtgagaacagaaacgcatgagaagctcggggaagatggccacgtgtttctcagctccacagggaaaccttgagcagtggaatttaaccaatgggtttgggttaggcgcccttcccctaccctagtccaacctgcagcaaggaaaccaaggctgattccagcccgggcttttttctcctgggaaggtcctccttgggtctggacaggctcggaggtgacctgcctagaggtgggcgatctagccgcacctttctaggactacagagcttcagtttaactttgcaggagtttgttaggaatgaactagacacgcaccctccgcccagctccgtcccgcctcctgcaagcctgaactcttagaataattaaccactgactgcaggatcctggcctctgccagggcccgccctacccaacctgtgtgttcgaggcaggaacttgcaacactgagcaacaagaatgatgaaatttttatccacttggcaaatatttgctcggcgccccctctgtgtcaggaacagttggaaatgcgtttcccaaccttgcctaaccagctgccctggaatgttttccacttcctgggtcattgcctccagagatcaaagcccccatccacacagtgggctgaatatggatccatgcagcgatctggtcctggtgctgtggaatcagctttgcacaaggccccagaaggtctgcgttccagagccttcctgttggggcctcagtcttctcatctgaaaaatgggagcaaactcagttctgccatgcccagtgtgggtgtgatgtcacatcaggtaaggctcaaaatgaagtcaggtgtcacacctactggaataacctcagctctataagcacaatggagctttattatccttaactcatggaggatgaatcacttgggggaagatgaaatgttgaaatattcaggttaacggaaagtgttattttaagcacctaaattttttgcctattaacctagtaggggtggaacttggtaggctgatcttgcctgaacttctgggggctttgtttgatcccttgattgcacagcgatacctgcaggggctccttgcccctcaactgtcaggatgttgaggtcttcaggtcctcgatactgaatcctagctgactgcccttctggtttcccgtctgtgttctctggagtctccctcggcctgcttcgaggcgggcccgctctctagataatgctgccattcggatggtttcaacgactgtgctgagccagtgactctggaatcggggcctcccgcaactcgattcctcctgaactcagatccctgagtcatggcctcccagccccaagcctgctcctccacctgtgtcccctgtctcagtgtgcacggtcaccacttgtgggtcacccaggcccacacctggcagcaagtgatctgagactctgtcccacttacctacagccggtcagacctccacctctactcccattgcctttgtccaagtcccccactcagcccgcacccagcactcagcctgtctcctccattcattccagggtacttcctagggacaggccctgtggcaggatctgggggcatggaggataaagaccagccctgagagggggcattcgccccatggggagggacagacatggatcctggcaacagcgtggcgaggagtatctgagaagtggaaacacagagaaccgccatgggttggggggctggttctgggtctgagaggcacctccacacccacgcatagtcccttttatgaattccctggactgtgccctcttgctccagggagagctgcagcaggggacggttcaaagggcagcctccggagcaccctgacctccaactccctggccgtgagtgtgggcagaggggcctggatttcctcatctgagacgtggcaataatccactttataggattgctgtgaggatgaagtgatttggttcatacatagcactgagagcagaagctgacctcataagcaccaaatccacgggcttgtttgtttgtttgttgtttgttttaagatggagtctcgctctgtcacccaggctgaagtgcaatggcaagatctcagctcactgcaacctccacctcccagtttcaagcgattcttgtgcctcagcctctggagtagctgggattacaggtgcccaccaccacacctggctgatttttgtatttttagtagagacggggtttcaccatgttggtcaggctggtctcaaactcctgacctcaagtgttctgcctgccttggcctctcaaagtgctgggattacaggcctgagccactgtgcccgaccaccatgttgtattgttactgttactgctctcctgtcctgcacctgccctgcctgcctcccttggctgggctgtaaaaccttgaggggtaacgtatcttattcatgtttcttgtcctggtaccagcacagcaactgacatggatggggggttaggggctcagaaagcgttgccctaaaatatggcgctctgacatgaagcagcctcaaggtctatctgacctccctgcctccttctctgaatcctctgtctctctcaaagtgcaggatgacgctgttctctgaagtttctttatctgcctagaaacgggacctgccaaaggggaacacaattaccttccctggaatatcattagctagaggttaaaactcatatcctagaggatatgagactgaacattaaacaccacacctacagcccagataaacttcatcccaaaccattatctgctctctttccctttcaatgtccaaagaaattattaattatcatctggacgctggactcattcatttcccccctaaaaaccattgactgtccttcaaattgccacgtgtcccccatctctccttcccccgtgaagaagggcgcatgcacctgtaccccactgggttattgggtaacttctgtgattccctcatgctctgcacgttgaaataaattttgtcttttctccaattaatcttccttttgtctgttgattttcagcgagccttcacgaggagaaagggaagctttccctttgtctctgcaggggccaatgaatgtttaatattacacaagtacactctcagggctgagaggcaccttaataacccctcctgtttactgtttccatgtgccagagaggatgctaagtgctttgcctccatttactctaaccactccgagaaacaggtgttattatcctccataagtcaggtgattgaggtcaggagttcgtgacagcctggccaacatagtcaaaccccgtctctactaaaaatacaaaac

SEQ ID NO: 96074 - DNA, 20673 bp, Homo sapiens
ggcttcttgcctgaggaaatccagcccacaggcagaaggctctgccctacccacttctgtttaatcccccttccaccctcagttctccaagctttggtccctggaagagactttcctttatgcagcccccgactctgccttcattccaccatcctcaggggcatgggtagccctgatcaggaccatccctctgggtttttctctcatactggggcctgccccccaacattccacagtgaccccccacacctctagtgttggattgagagctgtttgggcaaccagggttcccaatgagctagggagagtcactgcccaaagcacaggaggggaagggccagtattatggttctgcttaacagacaaagtcaccgaggcaagtggaagtcaaatctccttccccacctcatgcagtggcctttaaaggcaaggtcaggctgagcggggagggtcacctgagcccaggaggttgaggctgcagtgagccatgattgtgccactgcactccagcctgggcggtagagccagaccctgtgaaaagaaggcaagggtagggaaaagggggaaaggagggaagggaaagggaaggaaaggaaagaaaaaaggaaaggaaatgaaagcaagataaattaaaaaaataaaagaaaggtcaagtccagggcactgctcagggcgtagaggccrcgcccccgacgacctcctgcccccttcccccgcgttaccgtctcggggctcgggctcggtgccgcggaacctgccagtggctcgggagtccaccacctggaagcgccgggattccaggttctccttgatgtcctcgtaggtcttgatgaaggcggggtcgagctgagcgcggaactcggcgggagcaggttggctcttgccggagctgagcgggaggttctggcgcagccagtggcggaggccgccatcaagcagtgacacggcgtggtggccgaaggcgcggaacatccaccagacgcgcggggcggagtagaggccctggtcgctggcgtcgtagatcacgacgtgggtggccgcgcccacgcccaggcggcctgcgtactccgcgaaatgctcggccccgggcagcatgtggtcgtagggcgaggtgcggtcgctgcactggtcgatgtcgaagaaagcggcgcccgggatgtggcgctcctcgaactcgcgtcgcgcgtcgcgccccagcttcggcaggtaccaggaggcgtccagcagctgcagaggctgcccagcgcgcggggcccgcagcgcctccgccacccattgcgccgacaccagcgcgcggcagagctgcggcgaagccatggcggcgacactcgggctgcgggcctgggcgacagggaggatgtcagaagggaagcagggagaggccgctgttggggctagggctggggctggagcatgggcgagggccggcgggggaggtgcggcccgtgcacggcagagtccagggaacgcagaaaccagtggtggtgaacccgggcacaaaggtgggtagccaggggcctccctctgccaggcctcatataaacacaagctccgagtgacccaatgaccatgacctcccggagagccccaggccacgcccctcacctccacttgctgggcaggagggtgggtggaggtatcctagggcaaggccctgctggcttcaaggcacaaacaggggcaaagtctccacccctccctaagatgcagctcggctttatttgcaaccaagtcccagacggaagtcattcattcactcatcaagcatttatattggcgacctaataggaacagtagctggaatttactgagtccttgctgggtaccactgaatcctaacaatatcctagaacaatgcctgacacagtagactctccagtatgtgttgaatgagtgatcttaagaggcctggtatattattgtcaccgtttcaaggaggacactcaggctcacagaagtgcactaacctggcctggtgcggtggctcacgcttgtaatcccagcactttgggaggcccaggcaggtggatcacctgaggtcagaagtttgaaaccagtctggccaacatggtgaaaccccgtctctaccaaaaatacaaaaaattagccgggcttagtggagggcacctgtaatcccagctactcgggaggctgaggcaggagaactgcttgaacccaggaggcggaggttgcagtgagccgagatcgtgccattgcaatccagcctggggaacaagagcaaaactctgtctcaaaaacaaaaaacaaacaagaaaaagtgcactagcctgacccggcggtgccaggcttctcactaggcagtcagtctggcaccagaatccggacttctcagacacacactctgtgcaggctccaggagtctggcgaggccaggttttgcctgtccagcctgggctctctctggcccttctagcagcagcaacagtgacttcgcacctccctccctctcctctctatctttcctgcataccagagacagtgcaccagctcgccagcccactatgccaggccagcccacagccttcctgggtgtaaacttcccaaacactttaagccctttgtgctgggaagccaccgttgtgcaggtgagaggaaagggccccttctgccaggcagaggctgagcccccaccagggcacatggctgggtgtgtggagtatgggctgcagatcagccctcacttatcccctgtgtgaggcccaaccttgacacccactgcatgcagtcctgccagcgaaatgaagggggcaggtagagaacaacatctgtggaccgagtgcctctgtgggccaggtcacatgctaggcaccgcagccttgggcgggtattaggacgcctgctttatgaatgaggccactggcaattagaagaataagtgccttgcccgtggtcacaggaggcagcctcaggatttgcagccagaatttgacccctcaggctggacttcccctgccccaggtgccatgatgaccagggcctaatgagttctagggtgacaccctgtgcccacccccacagtctggccgcagctggcttttaggaacctacttcacccatgcggtcaggccttgtgccggacaccgaggcactcttgcctttgccaagccctggggggaaacgtcaggctgcaggcaagagagagtgaaattgaggatagtttagaattcagtgttgagcacagagggcccctatgtttgcctggggtggcagcagaagaggtgggaaggcttcctggagtaggaggaagtccagactaatctgacttttccaggggcccaggaagcctcagcacggtctttagggtagggaggctgccaaggggtgtttggctaaggggtgatccccattatctgcgttacagcacagctagggggcgctgtgctggcagatgctgcaggttccttcctgaggaaccctattgtgggaaccacagcagcccctgtgcacccccaaacactgtcccctattcttgaggatccttgtttccctcacccaatcatccatttacagtagaaagagccctggtttaggagccagagagccccccaaatcaatgtaaaccccactccactgcttaactggttgtgtgatgtgggtgtgtagggtctctgggtggtttctgttccttataatggagcttctcacctccacctcttagagccaagattaaacaataaatgtagaggggcaaccaccatgcattacatctggctggttttaataatcattaaaaacggtttaggtcgggcgtggtggctcacacctgcaatcccagcacttcgggaggccaaggcgggcggataacgaggtcaagagttcaagaccagcctgactaacatggtgaaacctcatctctactaaaaatacaaaaattagctgggcatggtggcatgagcctgtagtcccagctacccgggaggctgaggcaggagaatcgcttgaacctgggaggcagaggttacagtgagccgagatcgcgccactgcactccagcctgggcaacagagtgagactccatctcaaaataataataataataataatattgcattatttcttccattactctcattggtggccctggaactgccagcagcaaatctaaaatcttagaatttcagggcttggtgggacttcagagatctgaggtcaccctgccccagtctccctgcttgattggcacttctcacaaaggtctgtgggccataaaggagggtgtgaaggcaggctgtgggtgtcagggaggggtagaaaccaggtgcctgtgtgattcagaagccgggatcactgtaggtgagggtgccctgggagtggaggaccccaggacgtaaccgccccaggctcatgtcagaaggatacacagctgcactgaagcaagcgtgagccgcaggctggatccagggtaccccttgaggagcagagcttgggagctcctcttggacctccccagcctggtccctcctgcccaccccctcccccaaccaccagacactaggctttgaggattgctgtgagcattttagaacaaaacctttttttaaaaagagggatgaggccagggatggtggctcatgcctgtaatctcagcactttgggaggctgagatgggcagatcacttgagcccaggagttcaagaccagcctggacaacatggtgaaaccccatctctaccaaaaatttaaaaattagccgggaatggtggcacatgcctgtggtcccacctacttgggaggctaaggtgggaggatcgcttgagcctgggaggcggaggttgcagtgagctgagatggcgccactgcactccagtctgggccacagaaccacagcctgtctcaaaaaacaaaacaaaacaaaaggtcagggttgggaaacagggaaagcttccaggctggcctctgcaaaagctagggaggggcaatggtgtcccccagtttgcaagagcccatggcgagcttttcaggaattttgccaactggttgttaaatacagctattattaaaaattgaattacatcaacttatgattaaacgggctaagttcaaaacaggcaattttttaaaaagcatgaaccttcagggaagagccaggtaaacaaaggcagctggtaccacgtgggcttcagaccagggatcaggcccggcctcaactctgggtgtgtcctccagcaactcgctctgccgctctctcctgtcttagtaagtttctggcctactcctcagggttattgtgggaattaagtcacaccacgggagtacccagcaaagtgccacaccaagcagggctggacaatgttagttcctttcactcactaacaagttattggctagtgtctcttcctggggcctctgggtcagcggggtctcgtctccctgtcctcctctctctcccccgccctctctggtgccaccaggtcacccacttccacccaaggctccccacccgccactcgccacgaccccacccggcaggccgccccaagcggacagtcacccttagtgccaacgtagcggcgcgccttctctcctagactaagccccctcttccgcccaggtcccgcgcgggagccccgcgccgagcacccccaaagagccactccctccccctccagaaaggcaagccgccacgccgcggcagttacccgggtctcggactcccggcttcctggctccgccatggcccccgcggcgcggcgccccctccccgcgcccgcagctgtcccctcctcccgccaccaacctgcagcggaccaaagggaggagactccggcacagcccaccgccgcggccactcggagccgctgctgcccgcgccttccactggccgggccgtgggggtacgcccgctccgcccagcccaggcccgcgcggcccccgcgccacccggcgtccccctcagacccccgcgggtcccggaggccccgcgcgcgaggttggcaggtgccgggcgcgaagcggccgcgcgggggaggcgcgggatggcggcgggcggcgcagggtccccctctggcggtggcgcgatggtgcgcgccgcctggggagctgcggccgggggtttgaaccggccaacttctccagccggccggggcgagcgccagcgcggcgtccggggcgagtgagtgcggggcgggggcagcggccgggcgcctgggccgccggtcgggccacctgctgcccggggaaggatagcgttgcgagagtgggacggggtgccccgggaacccctgatccacctagggcagagggcagcgagctacgggccggactcgggcactctggaggcgggcgagctcgggctgcctggggaggccgcaggcgatggcgtgtgcgcggctcgcggagcttcctagccgtgcgcccaccccctctgccttggaaggaaaggggattctaagcccaagatgccatcgccccccatcccgggcatgctttcattgctctttcctggcgggatcgagtactgtaacttctaggagccagatccccgccccaggaagcgcccctacttggagtcctcggaaactcttgccccacccgcttctgcgctgggcccccgggccggctgggaggggcggggccggctttccagagggaatctgcaaacttatcccgctgcacgccccagcctcgctggcttgctgtaaacaaggaacccgggggagtgcggagggagaaagagcttctcccaggcctcaccctactgcacacaccgacttccttcctcacgcctgtctctctttcctggttcccacccrtgccaggtgacacgcagagctgaagccatggttcatcaggtgctctaccgggcgctggtctccaccaagtggctggcggagtccatcaggactggcaagctggggcccggcctgcgggtgctggacgcgtcctggtactcaccaggcacccgagaggcccgcaaggagtacctcgagcgccacgtacccggcgcctctttctttgacatagaagagtgccgggacacggcgtcgccctacgagatgatgctgcccagcgaggctggcttcgccgagtatgtgggccgcctgggcatcagcaaccacacgcacgtggtggtgtatgatggtgamcacctgggcagcttctatgctccccgggtctggtggatgttccgtgtgtttggccaccgcaccgtatcagtgctcaatggtggcttccggaactggctgaaggagggccaccmggtgacatccgagccctcacgcccagaaccggcmgtcttcaaagccacactggaccgctccctgctcaagacctacgagcaggtgctggagaaccttgaatctaagaggttccagctggtggattcaaggtctcaagggcggttcctgggcaccgagccggagccggatgcagtaggtaggtgtcccagtgctgggtggtccctggggagtattgccccatggaaggatagggagtaaggatgactgggaccctctccagggtccgtcccatgccttcaatcctcccatgtaggcctcagtctttccatcgataaaaccagaaagtggagacaaacctaaaggctttttcagcttggatgcacaaggacccaagaatgtgtcctcatagccatgtgctaagaagccacctagcatctgtgtgagcagaagtcactggtgacatgtccaccacctccactcccaggcaccagctgccccacatgtactaggatatacctaagggtgtcatgcccctgagccagcgtttgcattgctgtacagaaacctcccacggacacatccagcttctccaggcctctctcgtcccgcagaaacccttatagacatcaacagtgtccctccccgcaggatccccctctccccaaatctagctctcctggggcccctgcctgctgtttgcaaaggttccataacctttccaggcagctgcagcccgtcggcagagttgtaacagcagctgccatttcatgccagacacttggcaccgcattatctcagcgaacaaagctcaatgcccctgttttggcagcggggggtggggggactgagatgccaggacataaagtggtggaaggcaggattcgaatccaatgctgccttgtttcaaaccagggctataaaccaggacgcacccaatgctgccctacccctacttcccagggccaggagggagtcccctctgctagttgccccaggaaggcgactcagaagttcccctcctgtggaagggaaggccaggtggattggatactgcttgagggttggggagagcctcaggagaggaaatgctgagttctagaacctcctagccagacagaacctcggaggtcttcccttttctagaggcaggactgccgtctcgctgccatcactcctgctgagtgccctccagtccctgcctggccatttccaggagcagggccctctcttgtctctgggcacctccttggtggctctttcctcagtcagagctccttctctacagaatctaactcgtgtgcaacattttgcctgacttgttgaaaaacatctcttcctgtctgtacctcctacagagagaatgctgggaaaactgttctgcacactcttagagctggagggcctgaayggtgacctcacctgacagaggggagactgaggtgcacagaggcaggggccaaggccgcatagctagttagtgacagagccaggacagcagggtctctgccctttccagcgcagctttttccaggccccatatttttcttgcctgcttgctctctgaaggtctggagttgaagattcaagttcatttggcacctcccagagaatcctggctgggaacgcctgcagccctctcctggccttggttcaagacgcctcttctccttgggatttaagctgtcatgggggaggatcagtggaattggttctcttgctgcttcccagcctgccctgaagcaacctaagaaataagtggaagggacagcttggaggtgccaggcccaatgtcctcacccattttacagatgaggaaactgaggctcagaggaggagaatggcctgcagtgggtaatgcctcctgaaggcccgggatgctgaagttcctcctctgtaattgtgttcacacctccttcagtttccctcaggagcatcagggaacatggattctcatttcagctcagccactcctccttggagtgacctcagtccagttgcttggcctctctgggtttccttatcataaaatgagaagagtcacgccagccctacccacatgagtatgcatttgtttaaatgtagcagtggcggccgggcgtggtggctcacgcctgtaatcccagcaccttgggagaccaaggtgggcggatcatgagctcgggagttcgagaccagcctgaccaacatggtgaaaccccgtcgctactaaaatgaaaaaaaaattagccaggcgttggtggtacgtgcctgtaatcctagctacttgggaggctgaggcaggagaatcgcttgaacccgggaggtggaggttgcagtgagccaagatcgcgccactgcactccagcctgggcaacagaacaagactctgtctcaaaaaaaaaaaaaaaaaaaaaaaaaagtagcagtggctggaaagggatttcaagaagggtaaggaacgatacaaatcctggagggtgtggcacttcccccccaaccccctcctccaagaggctttgctggcctcccatacaagatattttggggacacaaaggcacatgaggctctgccaagtttatggttcccagcgtggtgtgggatcagggaggcaccctgtaggttcagcggtccagatgtaacacacaggggcatgggggtggcagacctgggggtcaggcattggccctgatcwtctctggaaggaatgaccctaaatggagcgagaagcagagcttagacacctggcggccacttcctgctcaccttaggcaagcgccttcctctttggctgtagttttgtgcctccacaagcycttagtcctggagtcagccagatctgaggttccatccaggtgtgatactgatgcttagcctcaggctagtgccttcaccgctaactgttgttcgtgaaaggagcgctgctcacctgagaggagggctggaggaagtgagagaggcagagtaggagtttatccagcccagtttctttatcgacttaattttctttgcctcccttcttggagggagtgagggtgaagaagggaggagggtatcgacccgctaatgagcacttttatttacagaacgctttttatatagtctcttctggacacctacagcagccctgcaaggggaggcaggcaggggtaggtaggctgggtcccactttgtgggtggggacaaggaargggcttctctgttaagrcaaagtggcwgagacttgaccccaggtcggcaggcttcaagttggggctgtttcccaaggctactgctgtgggtggggtgagctgtaagcaagcccaggggctgagggaaaggtcacggctccatggtgtggctcccgggctgctgtatgggactgaaaatccactctgcctatctctccctcccagggctgggagcttggctgagggaggagggaaggtgcrgggctgcctcttcctggctagggttaaggggttgccttctggggctgcctgctctggattccttagtaaaaggagaaagcgccagacagcttttcctggccttaaaaatccacacctaccagtggcctgagggatgttaactctagtagttgagtacaagaggtcatctcatccattccccagcctcagtctccttttccagggaggctcagggtggtcaaagaacacaggcgttgggggcagaccaatcagacttacctttgctgtgtgtcctgaggcaagcgacatcacctctctgagcctgggctccccagcaatgctgagagaataatctcccctgctttgtgaggattgaggaggataaaattcttgagagcacctgctgtcaagtgcctggtgccgcaggttatgggaatgggggcatgcctgctgggggcagggagagccagaagccttcagctagacttgggaagagaagcatgggagcctctgctttctggcccaacgtgcctttccaccaactggctgttctttttktttgtttgtttgttttttgagacggagtctcgctctgtcacccaggctggagtgcagtggygcgatcttggctcattttaagctccgcctcctgggttcacgccattctgctgcctcagcctcccgagtagctgggactacaggtgcccaccaccacacctggctgattttttttgtatgtgtgtttttagtagagacggggtttcaccgtgttagccargatggtctcgatctcctgacctcgtgatccgcccacctcggcctcccaaagtactgggattacaggcgtgagccaccgcgcccggccaaactggctgttcttgaaagttctctggcccaggttcatctcagcccttcccacagttcatttaaatgccccagacaggccctgagctccccttgcttcaccccgtccagctggcccagtgtgggaggcccgctctacagaaactccctgacttcatctttactcagaaggggtgccctttatgtaataagaagaacacagtggggctgtgtcatcagggatggggacaacaaaacmggattcaacccgttgtgctttcaaatgcacttcaatccagcccactgtggaaacattttaaagctgggtttcttgggaaagaatgccctcratgccagctgatccattgttcctcgttggtagggtgggcacacatcttagattcaagtttccaggcaaagcaggtgaaacacaacaggaagaaattgctctaattttatacgttatatgcaatcaaacttccttttttaattcattattattatatttttgagacagagtcttgctctatcacccaggctggagtggcatgatcacagctcactgcmgyctcctgggctcaagtgatcctcctacctcagcctgtcaagtagctgggactacaggtgcatgccaccatgcctggctcattttttttttttttctakagagatggggccttgctatgttacccaactcctgggctcaagcaatccttccatctgggcctcccaaagtgctgggattacagatgtaagccaccatgcctggcctttctactttattttcaggctattcaagtgaagcagtgggagtggagaaggaagraagaaatctgtaactggtgatcagttgattgtaaacaccactgccaatcaaactcgacttgtactaatagattttggaatcctctttggcccyggggtgaaaggaccaggacatagctggcgtgatgatgtaccgaatcgtgtgcctgccagggtcactgggtgcttttagctgcagtagttagacttccccacacacctgtgaggtgggtgaggtttactttttttttttctttgagacrgagtctcgctcttgctgcctaggctgcagtgcaatggggtgatctcggctcactgcaacctccgcctcacaggttcaagcgtttctcctccctcagcctcccgagtagctgggattacaggcgcatgccaccatacccggctaattttttatatctttagtagagacgggktttcaccatgttgaccaggctggtcttgaactgaccttgtgatccacccacctcagcctcccaaagtgctgggactayaggcgtgagccactgcatccggcctaggtggggttttgtccccgttctgcaggagggagactgaggctcggaggttcagggcctgcttggctgtacccagccccagtatrtgccttggccacactagtcagatccttcccctcccactcctgccaccctgctcctgccctgtcccataatccaggttgaatgggggtggggatttggggagcaaggagggctcaaagagatggagataggcctgtgtcaggccaaagtgcaggttgggcactgggagtggggccaaccatagagcccccacccctgccagggtgtggrctgctcgaggaagacaggagtggcctggggcatgtgtgagattggcctgtggcctcaccctgtgggtggcaccagctctggccatggctttcccctttgccccaattcctgrctcttctgaagccagatttggcygagggccctcactgggtactgagacagttccagaaaggactctagagccagccgagtccctccactctgcttccatccaagttcttggaggggaccaaaaaggcccacactgtccctattctccccctaccccctccatgggtggcgaagtggctgggggcgcagcatggcagggtgggtgggccagcctccaaagccagcgctttccttgtgccacccgcttcgtgcagcagccaatacrcagtggatactctcatttccatttttcctatggagaaactgaggctcagagagctgacataacttgctccagtgggatttgacctcacatctgacaccaggtcacttgctctttctgcaactgtgtgcttaacagaaaaccagaggccccgatgtaatcctgggtctgccttcatctttckgtgtggccttaggtgagccgtgttgttttgccaagactcagcggattcatctgtaaaatggggacatatctgattagttatgtggttatctgtttagcatctgcctttcttgttagactggaatctcccagagggcctggctgtgtctctgcctttcaccgctgtgttctcagcacatagcatttgcaataagttgtcccatttgctcttctcaacatggctgtgagataggtatgtaccactgagcccattttacagatgagaaaactgaggttcagagaagtgaaatgatttgcccaaggtaaaggttagtggagctgagactcatgccgctgtcttctcaagcaggtgtgattttgggcatctctacttcaagacaggtgttaggagaggagttgcaggcatcttaagtcatgagaaatgatartaggtggggctgggaataaattgagctccaagcagagcaaagatgttatttttatttgcaaagctatctatccttccagctatagctgatggaatcctccaggccccattagtccccacccctcatacatcccctaagctgtgtcctctgccctgcccaggactggactcgggccatatcygtggtgccgtcaacatgcctttcatggacttcctgactgaggatggcttcgagaagrgcccagragrgctccgtgctctgttccagaccaagaaggtggatctctcgcagcctctcattgccacgtgccgcaagggagtcaccgcctgccaygtggccttggctgcctacctctgcggcaagcctgatgtggccgtgtacgatggctcctggtccgagtggtttcgccgggcccccccagagagccgtgtgtcccagggaaagtctgagaaggcctgagccrtgacctcttctgcttactgtaactgcggccggtttagtgaccccatgacttacagccggttcttacctcttaggtgaaggagatgacatgtttttagaattgctgtgcaaggctcaccctctctctgtcaacactggaataaactttgccttttctgagtagtgtgtttgcctgcctctctctgggctccatccttgcccccaaacttccatctctttcaaactccggagactccaccaaggacagagaccaccatagcccctctggctggggaagccataccgaggacaccactttcacccagttttggcagaaacagcctcctgctgtcccatgtcaggtggactctgtcccagagcatgctgggtcctaccaggaagacaggtgggaagggaaccagaaagccagagagctgaagccccagctgctgtagccccagcctcctgggtaggggcggagggacagctggctttcccaatatgtccatagaggtgtcacacagacccagggcctctcagaagaggccatgctcaggagcaggtgaaaggaaggtggcctctgtctcgagcaccttttctggctcagagtaagaccccctggggagcagtggagggaggggctggagaaagagctttggccctgggagaaggtccaggctctggcaggtgaatcaggaagccacagtagaagaaagcaacctgatagcttggccccatgtggctggatttcaagtttcccagaaacagcctctcttagacctcctttggggttgcaagaagaattccgggccccacctactggggactaccggctccccactatccagccttcccagtgaagacaggatcctggagggccggagaccaagtctgtccttggcttggcattggggcaaataggtgctcaggagatgctgaggaggttggttttggggctggcaggttgggtgatggggctgaatgctgaggccggtgggacctgtagtggtgggactggtagtctggagggttgacccctctcacttccatgccactaacaaaacagtcctcttcccagctcacatgtggctcagatcctactgtgggaagaagaagcaaatatacacagtatgtcagatggcaataaggtgcaatggtagaaaaggttggaaaagaggagtagggagtgtggggtgggctgggatgctttttaagaaaagatggtctgggaaggtgagcagagtcttgaaggaggtgaagaggcaagccatgtaggcatgtgggggaaggaagttgcaggagaggagagggaacagcccgtgcaaaggccccgaggagggactgtgcttggtgtgcccaaaaaacagcagagcctggcatggcagggacccagggagcacttgggaaagtgagaggagcagaggtcagagaaaaatggtggacaggttgggtagggccttgcagataaatgggaggatgtcagcttttactgtggttgagctggaaggttttgtttagaggggtgacatatgatctaatataggtcttaacaggattgctgggctgttgagtgagaagactgtcagaggatatggtggactccagggtggtccccatattatctgccccctcgtgttcatgccccgtgtgaccctctccctttcactgygggtgggamccgtgacttgcttttaaccaacagcctacggcaaaggtgatggatgccacttctgtgactatggtacacaacattgtaatgccccatcttgcaaggggactccctctttgctggctttgatgaagtcagtgtcatgttggtgttggggggcccacatagcaaggaactgaggatggcctctggctgacagccagagagagcctgagaccctcagtctaacagactgcaaggaactgaatcctcccacagccacatgagcttggaagcatattcttccctagtggaacctcagatgagactgcagccctggccaatacttggattgtagcctgctaagaccccaatgcagagaactcagctaagccatgagtagacacccgacccaaagaaactgtgagataacagttgtatgttaagcttcgaagtttatggcaagattgtcgtgcagcaatagataatacttaggcaagagatgagggtggcttggaccagggagtagggggagttgtggaggtggacgaaggcatccaaatctagtgtacttcgaaggacttgctgatgggttgcttgcggaagtagcttagagttttgtgatgtctctctctgtgcaaggcaatgtgctacattttgcaaaaaattgttttattcgcccatcacccttatccttagtgttgggtgatatctgtttcacatgtgaaggaagttcagctaaaggacttggccagtctcttatctaataagtgacaggcccagattctggggactccaagtttaaccacagcactctctgtttcctggggaaatcctgaaaggctgggcttgcaggaggcgttcactatacccactctttgtccaggctgagcaacagccagacaggaatgggccagtgctggcaccaatgacttctgcctccttcttctctgcagaaaagaagtcacttaattttgttgatctccttctgtagcccttgttgtttaggaataggagagaggacccttcctttagttttactcccaggtccctgatccctgggtgtccaaatcagacagctccagatgcatctttctccttccccattgacctcgacctacatttatgctgttatacacatccatgcctttaatattctcatcccttcaaaactgttaagttcctaggcatccttcaagatccaactcaaatggctctttcataagtccttcctcctttttcctacacagagctagttcttctccctacttagtgctttgagctcccaagaacatcttttgcacttggtagcatctgagccccctgtgcctggcacacctggcatgtagtgggggctcaactgacattctagagtggatgagagagtgaacaataattgaagcccctcctgccttttcctggcctcaatcctggctttctcctggcctcttttccctacgggtgggcctatcagccctctgaggtaacagagccctgtgtatagtgatcaccatggcaactccaatgaacatcttggggagggccacttcccagcaaccatccattggtcttcaccagtagttctgcagtggggatctgcacttctgggcttcagcacacatcagtgtggttcacgtgtttcctgctgttatgaaagagattggagaggtgaggcagagacttatgaagggccagggttcttccaggacatggggtttcatcttccttctccccattcagagttgcttgtgagtgaagactgcctagactggacttaccttcccgccctctttgaccaaagtctcttgggatctctctctctgggtcagaaactggaagtgagtccacacttccattgtagcccgtccagactgctgtggactggcagtgcactgggacgtacagagctgccgtgggcacgtcaggttggtggctggggataggaggagaaagaaaacttggagctaacttgaacttcacctagcttgaagatgtgcaatttaattttagccccacctggtgaagtcctgtgtcttttcggagcctcattttctccatctgtgaaagaagataaattagtagtgtctccgaacaccttactgggtatttgtgaagaccagactaatttaccagatgtgagaatgcttgacatggacttgtgttagttatctcttgctgcacaacaaatcaccccaaaacttagtgggcttaagacaacatttactatctcacagtttctgtgagttgggaataccggtggagtgttggtgatttttctgtcccagggtctctcacaggctgcaatcaaggtgttgcttgggtctctagtctcatctcaaagctcgaccagagaaggaacccattcacatggcaggatccagctactctggagctgttggcaagaggccactctgagttccttgccctgtggacctctccatagggcatctcacaacagggaaactggcttctgtcagagaagatgagctgaggagagctgcagagagtgtgtgaaaaagacagaagttgtagtctcttataagttcatcatggatgcaacatccctcatttttgccacattccattcatcactatgtccagtccacaccaaaggggagggaattataccaagaaacagggatcattgggagccatgtaaactgcctgccactctctgccctctggcccccaataatgtacatcccttccacatgcaaaatatagtcatcccctcctaagatctttaaaattctcatcctattaaagcatcagtttaaaagctagaatctggtcatataaatcagctccaggtgtggctgaggctcctccagtgtcgttccttaagtacagcttctcagattcaattcttccccatcatagatctgtgaaactaagtaatttgccctgaacacacctaacatacagtgatgtgataggcataggataagaactagtgacattcctattcaaaattgaggaaaatggagacatggagtcaatgttccatagcggttttgaaatccagccacacaaatgttggacattccttgattaggtttcaaggcctggggataattctccatggctctcagctctgccttctggactcttgcatccactctctgacttgtcttttttatttttattttttgttcaatggtatcttttcattttgtactgtctctatcccttttacccgaagttgccaacattttgctgatgttattttctcaacagtaaaacttacaggggttcactccattgaacaaaagtcacacccctttttaactgaggctcctgttgaggagccttaagcttcctagaggtcctatggttctgttaagaggatatatcaggcatctctttaatctctttaaagcaccctttgtttgacagagtaataccctcatcctttgatctttctgaagttttaacaacaggtcgcacagtcacactcctgggcacactttccagacagccttctgaagctatttcttaattttagcatcttttgggatctggaaaggatgagacttcagaaccattaagtactggcatctttttgtttaacagtcccttcttcaattcatcaccttcctctcacatttcactacaagcagcaagaagaaagtaagaggcaactaccatcttttctttggaactctttagctaaatcattcagttcattagtcacataactgcagatgacagtgtcactgtttctgccactacataacaagggtctttcttccactatttctagtaatatattcctcacttccatttgggccctcactcactgcatcttccaactccagatttctgcttaaaaaaaaaaaaaaactgtttaaggtgatttaggctttttctatcatgcttctcaaaatccttatagactctgaccaccgcttggttccaagttcagtcccaaatttttaagtatttgttatagcaacaccccactgttagtaccaaaatatgtattagctatgtattgctgcgtaacaaatgaccataaagcttagaagtttgacactgtatgtttaaaacagtacaaatttatgatctcagaacttataggagtcaggatgctcacttggctgggtcctctggcccagggtatcccacaggctgtaatgaaagtgtcatccaggctgtgttctcatatcaaggctcaactggggaaggatccactttcaagctcattcaggtgtcaggattcattcagttcttcaaagactgttggactcagggcttctattctttatgagcttttggccagaagtcaccctcagtttcttgctccatgggctgctccacagggcagctcaaaacacggcatttgctgtcatcagaatgagcaaaccaaggagaaccagggaaagagagcaaacaaaaccgaagtcacaggccgggcacggtggctcacacctgtaatcccagcactttgggaggctgaggcgggtggatcacttgaggccaggagttagagatcagcctggccaacatggtgaaaccctgtctctactaaaaatac

SEQ ID NO: 96075 - DNA, 33808 bp, Homo sapiens
atcagagtgaacaggcaacgtacaggatgggagaaaatttttgcaatctactcatctgacaaagggctaatatctagaatctacaaagaactcaaacaaattcacaagaaaaaaacaaacaaccccatcaaaaagtgggcaaaggatatcaacagacacttctcaaaagaagacatttatgcagccaacagacacatgaaaaaatgctcatcatcactggccatcagagaaatgcaaatcaaaaccacaatgagataccatctcataccagttagaatggtgatcattaaaaagtcaggaaacaaaaggtgctggagaggatgtggagaaataggaacacttttacactgttggtggggctgtaaactggtttaactatcgttgaagacagtgtggcgagtcctcagggatctagaactagaaataccatttgacccagccatcccattactgggtatatacccaaaggattataaatcatgctactataaagacacatgcacatgtatgtttattgcggcactattcacaatagcaaagacctggaaccaacccaaatgcccaacaacgatagactggattaagaaaatgtggcacatatacaccatggaatactatgcagccataaaaaagatgagttcatgtcctttgtagggacatggatgaagctggaaaccatcattctcagcaaactatcgcaaggacaaaaaaccaaacatcacatgttctcactcataggtgggaattgaacaatgagaacacttggacacaggaagggggacatcacacaccagggcctgttgtggggtgggaggcggggagaaggatagcattaggagatatacctaatgtaaatgacgagttaatgtgtgcagcataccaacatggcacatgtacgcacatgtaacaaacctgcacgttgtgcacatgtaccctagaagtataataaaaaataataataataatgcaaaactcccataaggcagtttctctggcgacaatccacgctgtctcactcttatgagcagcccggcctggaatatcactctcaggttgtactgtattctgcacttaacttccaatttttttcaacaaattatgctgtactttaaaaaaaaataaaaataaaaactttgaaatcagttcgtcaatatccacaaaataatttgctggtatttttttactgggatttagttaaatctatagagcaaatgggaataaatgatattttgacaatgttgtttcagaatatccatgtacatgagacatttctccatttattttttttcatcagagttttgtaatttacctcacagatcttgtacatattgtgtcagatttctacctaagcatttcatttctggggatgctaatgtaaatggtattgggtttttaatttcagactccacttgttcattgctggcatataggaaaatgactgaaatgtgtgtattaaacctgtatcatgcaaccctgctataatcacttattagtttcaggagacttctgtcaattttttcagattttgtaaatagataaatgtcgtctgtaagcaaagagagttttacttcttcctttctaatcagtatacattttattgcttctccttgtgttattccattaggtaggattttcagcaagatgttgaaaaggaatggtgagatgggacacctttttcttgttcctagtcttagcaggaagtcttctagcttctcaccattaagtatgatgttagctgcaggctttttgtagatgttctttatcacattgagacagtttccttctaatactcgtttgctgaaagttttcatcatgattaggtgttgaattctgtgaaatgttttttactccacctattgctataattatgttattttcttcttctttagcccattgatgtgatggattacattaactgattttctaatgttgaaccagccttatatacctgggataaataccacgtggttgtggcatgtaattattcttatacattgttggattcaatttgctaatactttgttggggatatttgtatctaggttcataagggatattggtatgtagttttcttgcaatgtctgtggctttggtattacagtaatgctggcctcataaaacgagttaggaaatattctctctgcttctatcttctgaaaaagattgtagaaaattggtatatttccttccttaaatgtttggaaaaattcatcagtgaacccatgtgggctttgtgctttctgctttggaaggaacacttgtttggtgttctctaagtttcctggatctgtggtttatttcctgactttaatttggggaaattctcagtcatagttgcttcgaatactgcttctgctccttttgctttcttctctttctggtactcccatacatgtatatgataccctgttccatttattcgtttctcctctttgctttcttgttttgactgtttctattaacatatactcaagctcaaagattctttccttagtcacatccagtctactaatgagcccatcaaaggcatttttcatttgttacagtattttttctgtcatttattctcaattctttcttagaatttccatctctctgcttacattatccatcggttcttgcatgttgtctacttttcccattaaagcccttagcatactgtaaaaaataaagtagaggttcttcttcaaagactttcctgcccatctaattaggaataaatggtaacttctcttataagcaaaatttattcaaagacctgtgctcctaaatatttgccctggcatgcttatactagtccaagcaagcactaggtcatagcctgttcctcttccttatttaaaagtgtttttacctttctcagcattccacaagttacctcctccttcctttgttctcctctacctctgcctcttttaaaaagttctaagttgctagcaagtcaggacaaatacagaatgtgaagtcccgttccagacaatggaaaccggacacagcagtagggtggatacattaggttataaatgaccctgtctcctttgtttggtgtactctcgtggcaaaactgctggccagtgtaccctttctgcaaaagtaaaaatggccttactaaattaaatttatgttcaagtactatttctttacagcaccggggaacaagcatttcaaacaatattaatcatagttgttttaaattcatggtctgataatagcaacatccctgtcatcctctgggtttggttccactgcttgctctgtccattcaaactatgttgccttttaatatgccttgtaattttgtattgaaaggcggatataatatactgagtcaaagaaattgcagtaaatagccctttagtaatgtagtggtaagatacacgggaaggggaagtgtcctatagttctaccattttatctcagtcttttagtgagcctgtgtccccaggctgtaaacttcacagttctcagtttgttttttcacccccttaggtggtacagaatgtctagagggagctggagttgggtatttcctttcccccaggtcagttaaccacttgtaaaaatcccagtacactaggctcgagtaaaatagtttcttttgttggcaagtcttgttaagaacaaaatgcmctagaatttttcaaaataattccttttacactcctcatgcaggaagcaattggggatttttctctgaycttctctgagaattcacggaggtaaaactcacaaaagtgtgaaagcccccctacgattgggtcccccaagaatctttaactctcaaactaatccayaatgagcctctggcaattcatcaattacagctcagactttcctactccagtaacagttcctgcaaaagtgtgtttctatggtaagttgtgattctttgaatccacccatctgtgtctctaattttggagaagctgttttctctgtgaccccacttcacttacagctctaagaagagttattaatttctcattttttttagctttttagttgttgttaggatggagtgatgacttctaaattccttacatgtcagaccagaaacctaaagtcttgcctattattgttaaacaaggcactacaaaaatgcaagtgtctctttccagaaaatagacaatatatctgcaatagggaaaagaaaactctctgccaagtcttttttttttcccactagaaattgcttgctgcattccaagcagaagtattgacatacacaaaggcctggaatcaagaaaaagcatagtccctttaaggaactacgaatgttccttaaatgttggtgtgaaatttggcaggagagcaggaaataaggatagaggtatatacagaaggaagtaattcagagcctgagtggcctaaagagtttggattttatccatttgttctcccttgaatatttttaaatagaagaatggtatttatttatttatttatttattagcctaactcattcaaaaattattgaaggaaaataggaaatggcattgattgatgttacgttttggaaagatcactaacagggcattcctttttaagtattagattcaagggcctggcatcaaagaaatcagatgggaggctctttcagtaatcctgtaagaaattatgaaagcctgaactaatacagcagcagtggggagagagaggcacaagaccagagagatatttagggcttggtgacaaactgaatgcagggaccgagggagagggagaagttgtgactctcatgtttctggctagggtaagtatgtggagagtgtcaacacacagaggaaagagtccctataaggagaaaatattaataggagttttaggagttgcattcgattgtgagatatcctaatggagacagaaatccagtaggcagttacatgtccaagtctggagtttaggggagccatcctgattggagataataatctggtagtcatctttccataaatagacgttaaaagccaaagtgtgagtgagagagtggagtgaaaggacggaaagactttggacaatcttaccatatgtacccggaaaagagccaagaaaaagactgaaagacagaaaagagcagtgtgtctgacagagctattttaacaaaattcagcgtttacaacagagtttaagagtaaactggcaggccaggtgcggtggctcatgcccgtaatcccagcactttgggaggctgaggtgggtgaatcacttgaggttaggagttcaagaccagactggcatacatggtgagaccaaccccctgcccccactcccaatctctactaaaaatacaaaattgagccagcgtggtggcgtgtgcctgtgatcccaactactcaggaggctgaggcacgagaatcacttgaacctaggaggcggaggttgcagtgacccgagatcgcgccactgcactccagcctgggcgacagtgcgagactccgtctcaaacaaacaaagaaagagtaaaccgacaaatactacattctctctctctacactctggcccactcttaacacaaaaaactgtccaggatcaggagactttttgttctcctcatctcctccttccaaagttctctgcccacgttctactgtctccccaaaatcctacctacccttcaggaactgctggaatgggagcttgggaagtttcagcaaactcctctctcctcctttgtggcccctttattcccaaagctgtgtcctctccctatgacgagtcccttgaggggctgtatcttactccttgtgtctccaagcacacataatgtgtattaggggaggaagcattcgccagtggagcacaaagctgttgcaggtctcttactggttctcaggcgctttcagtgaaattcccgttccctcaccgtccacatctgtaatttgcaagtcttatctacgataactgctgtaaagttacacggggaagccctttcccgacaaaaaaaacgagttctgcaacaagtccgtcggattttagcaatgaaaccggcgccgtgcagcctcgccggcgagtgcaccctggaacgcacaacttagcrgcacgcaccacagctcgagcaccgcccttccggttggagccattgcaagccccccccacgccccgcccccctcgctaggcgctcgccacgcccatgcctccgtcgctgcgcggcccaccccggatgtcagccccccgcgccgaccagaatccgtgaacatggcgaacgaggtagggcccgttgagcggagggccctgagtccaagggagggagtgcatggcatgggactaggctgctatcctcgggggcgcgcgaggctcggcgcccaagasgggatctggctcttggttctgaaactgggcccccagcgagcggctcagaggggcagaaagagaaggaagctttgtctcggctcttcagttgggaagcagctttctttgctgcttctgggacagtcggaacggggtggggggstgggaragccggagagtggggggcaggggctggtcaggtcggtatcccagtggaaatggcttaggagcggccacgcattgcttcttacacgaaattaagtaactcgctctgggtcattcttgcagcttgcatacttggcagagctgcagccagatcccgtgcttctaactcctaggttgcttgtgttgcataattgagcctacgccttaattattgtgcctccaaggagtgtattttggaaagacccctacgtccctttcagaaacattttcgagcacttaaataccaagagatttatattccctctagtcctcacgtaacaaacacctctgcgaggtgttatccccatcttaccaaaaactgaggtttgaggttggttgtgcttggtcacaccaacgatggcgagctgggattccgacccaggtctgctcctctatgacaaattcataaaatacaaattagacagtaaagaaaggcagaaattacgaataacatactcagtctaaagttgctgattattttaatgttttgcaattttggacattttctagtaagacaaatggccttaaacatattggagtttgaaagaaawaaactctaaacagtctttcagacttaaactggtagttgcttttccttattactgagtgtctttattcagagaaggtgaaagattataattgttactatagttcaaatgttgaagtagggccatttcccgcggatttagagtggggctttgttttgcttagaattgtcagtaaaaggaaaaggttaggctccattaagacattttttaaaggggagcaggccatcaaatttagtattcttgtttctttggattcytatgttgcataacttaattgttagtattctgaatctgacttgtggagttgaaatttatggcacattgaaatgaaaaaggttctaatgcagtgtctgattctttgtactatgagatttaatatctgcaatttaattttaaaaacgatcatttccacatttccaacctcaccaatttacagaggccatttccctcccccccccctcccccgccagttcagacggagtttcgctctttgtttcccaggctggagtgcgrtagcgcgatcttgggtcactgcaacctttgcctcccgggttcaagcgattctcctgtctcagcctcccgagtagctgggattaccggcgcccgtcaccatgctcggtatttttgtatttttagtagagacggggtttcgccatagtggccaggctggtctcsaactcctgacctcaggtgatccgcccatctcggcctcccaaagtgctgggattacaggcgtgagcccctgcacccggcctacagaggccattttttatatctctatgtagwtcacctctcctttccctcaaccgtttgttctgttgctaccaataactactaacttattttgcaaagctatgctgtgccaaggattgtgttagggacttcatattctttttttttttttttttttttttgagacgcagtcttgctctgtcacccaggctggagtgcagtggcgcgatctcggctcactacaagctccgcctcctgggttcacgccgttctcctgcctcagcctccccggtagctgtgactacaggcgactgccacctcccctggctaattttttgtatttttagtagagacggggtttcacctagccaggatggtctcgatctcctgacctcgtgatcckcccgcctcggcctcccaaagtgctgggattacaggcttgagccaccgcgcccggccagggacttcatattctttcttattcagttctcacaatcaccctatatgtaggtgttttaccaccatttataattaccttttcctcatccttcagtatcctggttagaagtgaagctctcccaaaccaagcaaagttacactcttaacctactttttttgctttctgtattactttgtgcctgtctctttaaatcacactctttgtaattattaactttaaagtctgtctcctgtaaacccagtggcttacaacctttagtctgtccacacatttctcaagtgtaatgtaaactaattagaacctttctcattacgtgtgattctcttgtaatggagggtatacatgactataatctctaaagcaggtctgtgtgctatagatatattagtcacgtgtaattttaaattttcagtagcctcattaaaaaggaaaaagtgaagttttaatattttaattatgttaaattacattatttataatgttgttataaataaactaccatttcaacatgtaagcagtatttttaaaaatactgttgatgagatatttttacttttctttgaactaagtcttcaaagtccagctatatttatagcatatctcagttttgtttgtttgtttgtttgtttgtttgtttgttttgagacgatgtctcgctctgttgcccaggctggagtgcagtggcacaatctcggctcactgcaacctccacctcccgggttcaagccattctcctgcctcagcctcctgagtagctgggaccacacagatgcgcaccaccatgcccagctaatttttgtatttttgtagagatgaggtttcaccatgctggccaggttggtcttgaactcctgacttcatgatctgcccaccttgtcctcccaaagtgctgggattacaggcgtgagcagccaagcccggccagtggtcattttctaagagctcagtagtcatatttggcaagtggctgctgtattggccggtgcagttacaagggatatagctcctcactgttacactcctaatcctccttcccaccctgcagttttgcaccaagccggtggtattcagaacagcctgagcaaaagaatttcttcaggcatatgttaagcatgcagatttcttggaccccatgccagacctgctgaatcagattctctcggaacttgtgttcttaacctgctyttgcatatgcactgtagaaggccattaaatatttgatgagtacaactttttaaccaaaagatacttttctatctgaccaggtaatcatctcaattaaatcatttttgatgtatactatttgtgtgaaatctaaaaacatatcacttggaagcatatgtttctttgtgaatctgtgatatactttttaagattagcattaatctgtatctaaattggctattaagtagttacttgtttaggaggataaacagcttattcccttttttccccacttcaggttatcaagtgcaaggctgcagttgcttgggaggctggaaagcctctctccatagaggagatagaggtggcacccccaaaggctcatgaagttcgaatcaaggtaatgatacatttaaggcactgggaaaaaaagagacacaatgaggtctctggatagatgagtagatctgagatctgcagargataaatcccaaaggacagtgtcaaagaaaaggtgttgaaagtcatccagccttacaatcacaacatccttctcttatctttcacctttgcagcatgcttctccatctcttttagttttgatcttgggctgagcagctatccccatgggtcactggattattgcaatttatcttctgcagtttaggtttaaggtaactctgtaggatactcatttttctgctgattagataactttaaatatatgctgacacgttagaaacaaaagaagaaatgttaccagaaaggggtccttattctgaccccagagagggttcttgtacctcacgcaagaaagaatttggagtgagttcataggataaagtggaagcaagtttattagagaagcaaagaaataaaagaatggcttttccatagacagagcagcagtatgggctgctcaaccgagtatacatatagttatttcttgattatatgctaaacaaaggatgggttattcgtgagttttccaagaaaggggtgggcaattcccagaactaaggattcctcccccttttagaccatatagggtaacttcatgacattgccatggcatttgtaaactcgtggcactggtgagactgccttttggtgtacaaatgcactatrattagcctataatgagccttgaagatgaccagaggtcactttcattgccatcttggttttgatgggtttttgctggcttctttaccccagcctgtcttatcagcagggtctttgtgacatgtgtcttgtgccaacctcctatttcattctgtgactaagaatgcctagcatcctgggaatgcagcccagtaggtaggtctcagccttattttacccagcgcctattcaaggtggagtcgctctggttaaaatgcctctgacagaaatggtcttcagttttgctacagcgacttaaacaagatttgagaagaggctcctgattgaatagagtaataagcaaatgaagtcagcttgcttagagagctttaaaatgcacccaccctggcggacaagggtagggttcagggaattcattattctagtgcttctcaacctctggtggcagagaaatgatgttacccttggagagaggcatattgtacaaggtagccagctggagagatctttgaaaccttggcatgtagaaaacttcatgtgtttagcattctactactctctacttgttttgatataaaattagtgctttagagtagtgatcattaacattctaggaagagagtcacagcaaaaaagagctgtgacttggagtatacttcccctaccatctcactttcaaaacacaccacacatactggctcatgctcccaaagatcacaaataccaggtggagcagaccaggaccaaataacgtctttttatctttttttttttttttttttttttttggagacagagtttcactctgtcgcccaggctggagtgcagtggtgcratctcggctcgctgcaacccctgcctcccaggttcaagcaattctcctgcttcrgcctccctagtagctgggattacagatatgcgccaccacgcctggctagtttttgtaytgttagtagagacggagtttcaccctgttggccaggctgatctccaactactgacctcaagtgatccacacgcctcagcctcccaaagtgctgggattacaggtgtgagccaccacacctggcccaaataacatcttaaggtcctttgcaacccatacacaggaatttgaaatcatataatagtgtttttttcttcaaattcagaaattaagctgactgtgattttgccactgaagatgtttgtcctggatgtattaagtgcccatacagctcaatgggtattcattgtgctcattgagctgtatggacacaatgagtacagccatcttccctgcaaaactgcagacaggtagcaaagattgttacgttgtaagtggatatataagccaggagcagagacgcataaatagaaatactccaagattttgcctttctgtgcttttggtggctttaaaatataagttacggctgggcatggtggctcacgcctataatcccagcactttgggaggccaaggcaggcagataatgaggtgaggagttcaagaccagcctggccagcatggtgaaaccccatctctactaaaaatataaaaaattagccaggcctggtggtacgcgcctgcagtcccagctactcagaaggctgaagcaggagaatcacttgaacccaggaggcggagtttgcagtgagccgagatcatgccactgcactccagcctgggtgatagagcgagactcttgtcccaaaaaaaaataataagttacttgaaagccagagagatagagataacaggcttatttaaatagaacttgtatgtggtttgtaaaaagggagttggttcctctgaaagttctgaaatttggtccagactcaagcagactggcctatttcagaaatagtcattacctctttaaaaatcatatttcccagctgtcatgaggaaactagaagtgagttggattccacctgttttgcacacaggcgatggttctctccatgcttgaaggcatagtgcccataaaatgaccttgtttaccttctcttgctaacgcgcgctgaaagggggactagatgttccctatttcgttgcatataaatgcaccattgcttttatgtaccactaaaaaattgctgccaattctaattgttaagatgccatggattataagcacatgctgattttagagaggttaaaatatgaaagaaatgtgtcttagagtcaatgaaatayagtattataataaaatgacttttcytgtatctgtacctctgaattgcatgcacacawacttacacattcgttgttttaatgtcctgatagatcattgccactgcggtttgccacaccgatgcctataccctgagtggagctgatcctgagggttgttttccagtgatcttgggacatgaaggtgctggaattgtggaaagtgttggtgagggagttactaagctgaaggcgggtaaggagaatacttgaaccacttgtttaataattttggcttattcctatggggaaattgtttttctgataaaactacccactatttatgaataggtatcatctaagtagattgtcaagattaagttgattcctcatctgggaagcacaaatatttggatatttttttctctctgattttgcagactactgtttttgtgaaacttttctaagtacatttccaaaaccaattttggcatattaagcaagaatttttagagatgcatcaatgaagcaggattttgaagcatataacttcattgttcttcagttattgtttaaagagtttcatttagataaaaatattgaaacatactttttgcatggtcagacagtatctgaatgatgttacctaggtaaagttctaagacttgaagtttttaactttgcaaagccacatccgttgacaggaatttgcaagggctgatgttttcatttagaaatagatactacctattcaggatgtctttgcatttgtttccaggtgacactgtcatcccactttacatcccacagtgtggagaatgcaaattttgtctaaatcctaaaactaacctttgccagaagataaggttagtatctttttatgttcttcttaaaayacaagtgctgcgggataattaaggaatcacagagaccgaggggttgaggaggaattatttaataatttaggttcattaacccagtcggattaacgttcaaaggactgagtcccraacaaagagtcaagctaccttttaagcatttcgtggggtggggggagacctttgtagggggagcatattacagaagcaagaaacaaagacagttattcaactgagacatgcattacatcatttcttatttttcaaggaacaacgtgttttatgatttgagatgatctgtctagtgaccttgcagctgcacagctagagaaacagagtcttcacaatgcgtgggaaagggagagagaaggctcactagccacagaaaaacaggcagttaattttaaaggactccagctctttctcttcctcagggggagttgggttttcttacatacaactgagtttttgcttacacattctttaatttcttttaattcctgttccacaaggtcatattaacaatgataagaataaataattgtgtggcagtttatgtagtgcattgtacwtcagtggtttcattccatctttataacaacctcactactatccccattttcacagatgagagaagactcagaaattaagaggttttgacacagagagggtacctgggcacagcaacagccttctctaccatttgcggttttctgcctaattgtgcaactgaagaaacatttatttttcacatgaggaaatgtgtagcttgtagaggtggctgatttaagtaacttgtgcagctctcaaggggtgtctgcmttctgtctcctttctaccccatgaaagaagcggggggatgtgaagagaccaggggagtgactccaccttatgcctcaccctggtctcatcttgcccagctgtggtaccctrtgttaaccttggctggtcttcacaaargcgactggaccctgggccctccctgtcccaggatcccctaacccctaccccagaatggtttgtcataatctggaaatttgttggctcatttttctttcaactcctttatttttcattgaacaaatctctgcttttgaagagttgaggttatctgctatctttttttcttttctctccctccctcctgctgcaaagaaaagaaccaataagttttagggatttttgtgtgtatagacattgtcatccggatgtaacttgctttgaagcagtgtttctgttgtgagtgtctcttrctgtaaatatttgttcatatttttgtgaattcagtactgtgtaccattgtattaatagtaactttttataaagcaaaccataaatatactgacttttcttacagataaaagagaaactaaaggggtgtgcccagtatcaccagccgttaagatataaaacagaattttctgtacccattctcttcacataacagcaggctaaatttgccaaaccatgtagtaaggaaagacgtgcttctgagattaaacgaaatcatttttatgaaccactgcccagtaagtgagagtaataaaacttacccactaaggctattaggaagactgcaggagataacstaactccttgacacagaaaaggtagttgtttttattgtactaggtaacaacactgaaagaactacctctttgaggaaatttaagatccccttgtgtgtgttccgtttttttttttaattgaagtagagcatgcatattataaagcacttaaggtgtatagatcttaagtgtacagctcaatgaatgattatgtatataaacacctgttgatttgaacgtcacccagatcaagatagagaaccctgccagcacccgataagctccctcatgtcccttccaagtcagaacctacctccctcttaggtaaccactgtcctgattcctttcactgtgaccttgtataaatagagtcatgmagtgcatgctsttttgtcaggtttctttttttcataatgtctgtgagatatatccaagctgcatatgcgtcagtagttccttcttgttgctctgtcttaatccattcaaaataccagtattgatccattctcctgttgatggacatttagattactcccagttttgggtggttacagttaatgctgctaggaacattcttatttatacatgtcttttgatggatataggcattgctttctcttgagcattttcttgagattataattgctgagtcgtaagatatgcatctacagctctctcgtgtacttgtaccagtttacacttgcaccagcattgtatgggagatccatttgtttataatgccattgacaaaattagtttatatttttggaaaacaaaattccatttattttrtaaagcaaatccagttactttggtaaaaccagaaccaaaaacaaaaaaatctaatcactttgaaagggaattttaaacgcagtctgaaagattttgcaacacatcaaatataatagtggtgatgggttctttgtgattgtaaccatttaaattctttcaaagcataaaatgtattccacatcaccttttgttcaagaaactcctctggaatacagtgatttctcacattaaggaaggctaaacaaacttaaattgttctcattaagatatagcagttatttttagtcrggtgcagtggatcacacctgtaatcccagccctttgagaggctgaggcaggtggttcacttgagtccaacagttagagaacagcctgcacatcttggtgaaaccccctctctataaaaaatttaaaaaattagctgggcttggtggcacgtgcttgtggtcccagctgcccagtggctgtggtgggaggatcacgagccctggaggttgaggttgcagtgagccatgatgtgccactgcattccaacctgggcgaccgagtaaaaccctgtgtcaaaaaaaaattctttctgatggagctttgtcacctcttctttgtttctggtcatatttatttttctctcaaaggaaatgtatttgctcttgaatctagagacagtccattttctcttcatctgtatatttattcatatgtatgttcgaaagagtttaagagtatacatcaaattatagtgttcagcctgggcaacatagtgagaccccgtctctatgcccctgtagtaccagctacttggtactgagatgcaggaggatcacttgagctcaggcaatcctcctgcctcagtgttcaaggctgtggtgagctatgcactccagcctgggctgtctcaaaaaaagcaattatagtgtttattttatttaaaataacataattactaaacatcagttctgtgccagacacaatgctaaagcctcatataacatctcattagacttttatagcaatttgtaaaggaagttacctatgtttctcagcattttctagtgagaaaatgaaggcataaagattaattaacttgctcagatcacacaggrtttgaacccaagtgctctgactttagggtgggtcctcctaagcaagatgttacatcacctctgtttagaatagcaaaagtaatttttgttaccatttattatatcagtggcctttgtaagctttttgggttttctttcctattggtgtaaccaagtcacaggcaaaacaaagtgaagaagtaatttaacttgcattattgaggactgttagttacacttcagaaaaatgcctcctgaaagatataaattagccagtttggctatctgttttcattagttgatctggttaatggtttstaatctctacttgcatagatactggttttgactttatcctttatgatgttatatttgctcacagaggttgttttatttttttttatttttgagacaggatctcattctgtcacccaggctggaatgtagtggcacagtcacggctcactgcagcctcaaactcctgggctgaagtgaacctcctgcaggcacgtgctccgctacacctggctaattttattttttgtagagatagggtgttgctatgttgcccaggctactcttgaaatcctggctccaagttgtcctyctgtctcaactttccaaagtactgggattataggagtgagccactgcacctggcccaccgttttaatgatgggattttaaaataattccatctgatccataagttgtacctyttaaaatgagttcagtattctgacagtatgatctagaaggatagtgaatattggaaaagatggataagattataaatatcttataaatttcctttataaggcattgctgcaaggtgctaaattactaatgaatrtatttgaaattgtagtttacaacactttcttaatatttactggtcattatttttaaaacatttctttttcctgtgggttttaagaaacctaattccaacttgcctttttcctttttttttctttagagtcactcaagggaaaggattaatgccagatggtaccagcagatttacttgcaaaggaaagacaattttgcattacatgggaaccagcacattttctgaatacacagttgtggctgatatctctgttgctaaaatagatcctttagcacctttgkataaagtctgccttctaggttgtggcatttcaaccggttatggtgctgctgtgaacactgccaaggtaagagactgacttgggttttttgcttctgccttctaatttaattcagtgaaactttcctggaatagtgaaattggccaatctgtatgaaacccagtgattctcttgactctggtagaatgagtactttataaactttctttactcctagttggagcctggctctgtttgtgccgtctttggtctgggaggagtcggattggcagttatcatgggctgtaaagtggctggtgcttcccggatcattggtgtggacatcaataaagataaatttgcaagggccaaagagtttggagccactgaatgtattaaccctcaggatttwagtaaacccatccaggaagtgctcattgagatgaccgatggaggagtggactattcctttgaatgtattggtaatgtgaaggtcatggtgagtatgggcttcattcctttttagtttatgkaactgctttttttgaagtgcagttttagattaaaaattgttttgttttggcaaaggaaaagtctcttaataagaatttttctagtgaaagaaggggaaaatatctatttgaactacaatgggaaatgatacaagaacagctcagggaaggatgagaaaagatgtttctttgcctttcaatgcctgctaagtgcatgtctcatgaaatgaaaagacagaataaagcagttstgcagagcatgatctttggaatcaaatacacatccacttactaactcagtgaccctgaacaaacagcttctctcaacctcagtttcctcatctgtaaaatgcaggtacaggttgaacatctatccctaatccaaaaatccaaaatgctccaaaatctgaaactttgagcaccaacatgatgctcaaagaaaatgctcattggggcatttcagattaggaatgctcagctaataaatacgatgcaaatattccaaatccgaaaaaacccaaaattcaaaacactctggtcccaagcatctcagataaaagataatcaacctgtagtaacaacacctacttaaacctacatagacactcagtaaaagtattactattaattctgctgcctgctttttaaaattaaatcttttagagttttgaactacagtttactttttaaaatagaaagcaaataaacacttcaaattattttaatttatgttaatatttaaccaggttaatttgttaaaataaattgttcaggccgggcatggtggctcacacctgtaatcccagcattttgggaggccaaggcaggtggatacttgaggccagccagggcaacatgacgaaaccccgtctcaactagaaatacgaaaattagctgggtgtcgtggcgcacgcctgtaatcccagctactagggaggctgaggcacgagaatcacttgaacccaggaggtggacattgccatgagccaggatcatgcactacactccagcctgggtgccagagggagactcttatctcaaaaaaaaaaaamcaamaaaaaaaattaaaatataaattgttcaataacattgagctcactaaatgttaagtttggccttttgttgccattatctttaaaaactatgccatctctagaagtttcgccagcagttgttctcaggaaaatgcactgacttctgtgatttggtcatatctctgtgcctgcagagagcagcacttgaggcatgtcacaagggctggggcgtcagcgtcgtggttggagtagctgcttcaggtgaagaaattgccactcgtccattccagctggtaacaggtcgcacatggaaaggcactgcctttggaggtaattcgatggatgagatgactgcattytctcttttgttagttgcattggcagatgtttaatcccagccacctaattttttttatattaacaagaatcttcatgagttccttctcattataagttgttgcatgcaaggctgttttattagaagggattcagactcaatcactatttacccctgggacttgggggggagggtggtgctcacctcctgaaacataggaccacttggtgcatattctataaaagaaaaatatcaatattctgatagtgaggaagtagttatgggtatagcagggacaggaagttgattgcaaagtaagcaaacagcagtatcagccatggtgtgtttcttgtggacycaagtagcttgttacatttttattcatttttccaggagtgcagtgatcactggatgtgatcatatatctgtctgattttagcagtaaccaatattgagtctcaaactgaaaatatttaattggacaaagccttatcataaaatcaaaaagctgctagactgatcatttttccctttgtgatcctaaaaagtccttggtggtttggggttgcggggaaacagtttctatcttttccatggttgctcagccagaggagagaaaagatgtcacaacatgtttgtatttcccaacagttgtgaatgaatgagtctaaagtttttaaagggctttaaaaatatatatttatatttcatcctcctcctaaagaaaaaaaatcacatagtgtgtgttttgaatgatctgtgtttaacgggttgtcttttaaggtcctctacctcatattatgccagcttttttgaaggccagaagaaaagatttggaaaatatgctaaaatgaggggtttggccaaaatcttcgttctttataactacagaatttgccttagaagatgtcaatctgacttgacctcctcttcaaagctctagatacatgtcacagcagagtatcatagaagaaactttttaagccatgtatgctattcgggggtatcattttggagtccatagctgtattttaaagggcattctaagcctggctgatccaggggatcttgctagtaacctctaactgaagcctcattctagcacatgctggttgggaaattcattgtatcattgaggccccttgcattgctgatytaaagataatagaagcttttgtctagagaacaggagtgactgtggtcatctcagttaccaggacatttaaaggagaaagaaaaaatccctaccatttgtggggaaagaataattagtggagaatataagagaggagatttggaaaaggctcaaaagaggtttgaaatatcgttgaaagcatccttagaaggtgagaaggcttcttgttgattgtattccttctttagatacagtgagaaattgaagtacctaattttatttaaaatcttaccatttagtcggscctggtggctcacrcctgtaatcccagtactttgggaggctgaggcgggtggatcacgaggtcaggagatcgagaccatcctgggtaacatggtgaaaccccatctttactaaaaatacaaaaaattagctgggcgtggtggcaggcgcctgtagtcccagctaccygggaggctgaggcaggagaatggcgtgaacctgggaggcagagcttgcaatgagctgagatcacgcaactgtactccagcctaggcgatagagcgagactccgtctcaaaaacaaacgaacaaacaaacttagcatttagctaaagagttctacttcatttttcagtttcatagttttctgttctgatatgctatccctatttcattgttaaatttaaaaccaaggaaataaagtcctgtattagtttttttcttccttgaatatcatgattatagaaatctttgctgatgtggacctaaataagcttgttgttgagacttccagagttctgtcctgggtagtttaaaagtctcaattggccaaaactttaatgaggttttagtaaatcttaatacagaggaaggraaatttcaaaagtatttacttcttcactgaaaggtgttggtcaaattcttcatctccatgctattttggagtttctcattactctttaactcatcaaaaaattcattcttttaaatgccttttgtcctcagctaagtaamaagcatactgcagaaatttgttgaataaattaatgtgtgatttmttttaggatggaagagtgtagaaagtgtcccaaagytggtstctgaatatatgtccaaaaagataaaagttgatgaatttgtgactcacaatctgtcttttgatgaaatcaacaaagcctttgaactgatgcattctggaaagaggtaggctttctctttatatatcatagaatgtaataatratgttgagtttgaggggatggagagtcgaaaaacacaattttagttgtcttaaaggtatcatttaaaacttagtatgttgcttccttttacagcattcgaactgttgtaaagatttaattcaaaagagaaaaataatgtccatcctgtcgtgatgtgataggagcagcttaacaggcagggagaagcgcctccaacctcacagcctcgtagagcttcacagctactccagaaaatagggttatgtgtgtcattcatgaatctctataatcaaggacaaggataattcagtcatgaacctgttttctggaygctcctccacataaataattgctagyttattaaggaatattttaacataataaaagtaatttctacatttgtgtggaaattgtcttgttttatgctgtcatcattgtcacggtttgtctgcccattatcttcattctgcaagggaaagggaaaggaagcagggcagtggtgggtgtctgaaacctcagaaacataacgttgaacttttaagggtctcagtccccrttgattaaagaacagatcctagccatcagtgacaaagttaatcaggacccaagtctgcttctgtgatattatcttkaagggaggtactgtgccttgttcatacctgtaccccaaattcctaggatggcatctgcccttcagggggcactaaaatgtattattgaaacagcattctgggcttaaataggtgtatgtatgtgttggttgtgactgtactatttctagtatagtgaactacatactgaatatccaagttctcagcacctacttttgtcaaatcttaacattttgccacttygagatcacattgccattcctcccctccagaggtaacaattatccacaatttgatgtttakcattcctgtgttgttgtactttcactgtgtataacctaaaccatctactctttagtactgttttatatatttttaagcctcatacttgctcattctacagcttttttcaytcattattgtataattatatctgaagctctcgttcattaattttagtcctgtgtagcagaattcaattacgggaactaccrtaatttatctgttctccagttgaaggcatgaagttgttgccagtttctgtattataacactgtagtggaacattcttctgcattgggctcactgcgtgttacctaagacgtatcacagaataaacacatttagccttatagacattgccaaattgctcttcaaagtaaatgtgagtttttgtgaattacatgagtatggaatggtgttttattatgactttagtttgcattttcctcaattctcgttaaatccttcattctaatggacattttattgtgaagaacctgttcatatcctgtgctcaactttgtattgaattatttttctctgaataatttttaggagttcttttattctagacatcaatcatttgtcagttttatatgttgcaaatatcttctagtctatcttgtgacttttctttttactttatggtattttgttgaataaagttttaatgtagtcacataaatcttcctggtggtggtaagtaacatttaggttattttatcctgagaagtataaagaagcaaacaaaaatggtccaggatcttaccatcctgataatccttgacataaaaataaattaatgaatgcaatatacctaagggttagaaaatataaattgttaggaaattatataatgagaaagaaaagctatacacctgcaaaaaaatgggtgattactgttaagtttcttacgtatctttttaggagtttctatgcacacaatagcatatatatcctctaaaattacacgaaaggaatactatcaacactactctgtgaacttttttctccacatgataacatagagtttatatcagtgcatcacgtttaccatgcaaatatcttttggttggattgatgctatgtgctttttcaatttattgatatggtttaaatgctcccacagaattgtgtragagagcaatatgtcattgattgaaaagtgggaracaaactggtagtaatggtcaggatttccccttttcagaactttggtgcatttgaagtgcctgacaatgtagtccagcttccctcctgttttacctagagggctggagatatgagggcccaaaggggccacaactrttatcttaagtggactgaaaggaagacgaaattaaaactagcttctactccacttgtaggaaatgtgcttttaatctttggtgtagcccagccttctaggaacaaaagtatcctatgttggcaactgcagtaacaaaacagttatggagagtatggaggagagccagtaactcctaaaggtcttgttcctttgacttttcttctcaaacaaacatgagatattcatgaattgcaatggcaaacgttttttaggttcgccaatatgaaaatgtaaagcagttttaagatgattaatattaaaataggccrrgtgcggtggctcacaactgtaattccagcactttgagagcccaaagtgggaggatcrcttggcctccgaagttcaagaccaacctgggcaacacagatgtcatctctagaaaaaaaaaaaattttttttttttaattggccgggcatggtggcatgtgcctgtggtcctagctactaaggaggctgagttagaaagatggcttgatcccaggaggtcgagactgcagtaagtcataatcgcagcactgcacagcctgggcaacagagtgagaccctgtcaaataaataaataaaatactactctaatttttgtagctagcctattattgaatttgcttttcatttctggcacagttaagtacatactcttgagccagctgattaagtttagtattagcatttcctggctgaaagcacaactatctctttcagagatccagtataaagaatcagttttacaaaatctgtgcttgagcccgggaggtcgaggctgctttgagctgtgattgcactaccgcactccagcctgggtggcagagtgaaaccctgtcacaaaaataataaaaataatcaattttacaaaatctttactattagaattcctgggtcatgagacggctatagttgtcaagtctttttttttttttgagacagagtctgtgttgcccaggctggagtgaagtggcacgatctcagctcactgcaacctctacctcccgggttagagcgattctcctgcctcagcctcccgagtagctgggattacaggcgcatgccaccatgcccggctaatttttgtattttttgtagagacggggtttcaccatgttcaccaggctggtcttgaactcctgacctcaggtgatccactcacctcagcctcccaaagtgctgggattacaggcgtgagccactgcgcctagccaagtctttctttttaagatcattttaatacatcgtcttgaattgaggaattgcttaacatatgtatgttatatatgctaaaarctgccaggcgtggtggctcacacctgtaatcccagcactttgggaggccgaggcaggtggatcacttgaggtcaggagtttgaaaccagcctggccaacatggtgaaaccctgtctctactaacaaaaatcagctgagtgtggtggcgcacaacacctgtaatcccagctactcgggaggcttaaagccaggaggcagaggttgccgtgagccgagatcgcgccactgcactacagcctgaccgacaaagcaagactcagtctcaaaaaaaaaaaaaaccaaccaaccattcactaagtgcatgtaagcaaatctaccctggttgtcccaaattgggattcaaccactttagaagtcttgttagacattttttcagtkgatacataatagttgtatgtacttaccgagcatgtgatattgatatgtgcatacaatatataatgatcacatcagaataactggaatatccatcacctcaaacaatgatcatttctaaaagaacattccaaagctgctcttttagctgttttgaaatatacaataaattattaattgttggraaacttttgaaagttatctttaagctgcttttttggacaagaggtatataattgcaatacagatggatattaacttccactgtatatttcattaaagctggtaaaatttttttaaaggatctaaaattttgccatgtaaggaacttaagcatctttatgtttaattgcaaaatttttatattcccaatataaaaatttctcttcaagtatttcctgcattgccatttttagcatgtttggctattctgctatgtaacctacctagtgatactcgctggagacagtccgtctacaggcatgtctgataggcacaagttctttattcacacaaaactaacatatagagtagaatttatgggatgatgaygtcgtttgggatagaggtatggaaaaaactgcattatgtccaaaactttactacagtggagccagtcaacatgtgtacaacttaacacctaacaaaaatggctccaaaaagtatacatagcactatttctgttcatcccatctgaatggaaaattttacttagctggtaattctcaaaatgttttgttgactcagggaaggggaaacatattttacatgcacagaatgcttcagaacttttctgctcggctaccaatctgccatgtaggttgataatcaaagtcctaaagtacagtttagttctttgggcctacagggacaccttgttgactaactggcttcagccaatttttttcagttcacacacaagatcaatttctttgtcagcaaataccttttagaaaaagtacactacaaacacacttggaaaacattttattaagtactgtataaacagctatttagataataattgcatagaactataccaaggtaattgtgtctttaaggaacaactaccaagtgaacaagatgagcaaagtcctctattatacaagatttccttcggtggaacattatggtgacaaagcagcgtaatgrgctcttaagcagattgatttttatcaaactggacatatcagaattccttatgtataagagaaatatgcacatgctcctttcaagaaaagagtgataacccaccatggaattacctccagtttaaacatgtactcttgactgccaaaaatatcgagatatgttaagcaagataaagcagcagaacacgctttaaaatatgttgatctctttctgtaatctacatgttaatattaaatgttcttatccttggcattgtttcctcagaatcatccagggctcaaattcagatttaagtttaaaaaattctatctggaattgtctggtgatctctgacccaactactgaaacaaagcaaatctgcttcatagccagtcacattctgtatagaataaaacagttggtagttgtcatatcactgcacaaataggagattgccacagagaagtgtggygatttgttctcctagccacagaatcaatttaaaaattgtagaaattggctgggtgtggtggcttacacctgtaatccaagcactgtgggaggctgaagtgggaggatcacttgaggccaggagttcaagaccagcctgggcaacatagaccctgtctctatagaaaaataataataatcaggtgtgttggaacatgcttgtagtcctagttacgtggcaagctgaggtgggagaactgcttgagcccaggaggtcaaggctgcagttagccatgatcatgccactgcctccagcctgaggaacaacaacaacaacaacaaaaaactattaaaatactgtgaacgactaacagcacaattgtgataagtgaaaatttttataggaagtccttcttgagtgctccatattttaactttttggagtattctagtaaaataccagtgttgaccttttttcaaaaataaccagaatcaccatatacacagttctattgttgctcacccacagtccccaaaatgaaaagcagcaaacacgtagccagggccaccttattcctgcttcatcttgcaaaacacccaaataaatgcagactatttttctttttcctacttagcaccaaaaggaagatgagagaaggttgccataagggccagagtttccatacacagactgtgtgctaagctaacctttccttaggtgtccatttttaaaatagaacaaaacacaacttttataggttttagcctaatgcagcctatgttatgaaacagtttgttcctaaaacatgaatgtctaaatgttatgttctaacataaaggagttggccccatcaaaaagtgggcgaaggatatgaacagacacttctcaagacatttaagcagccaacagacacatgaaaaaatgctcatcatcactggccatcagagaaatgcaaatcaataccacaatgagataccatctcacaccagttagaatagcaatcattaaaaagtcaggaaacaacagatgctggagaggatgtcaagaaataggaacacttttacactgttggtgggactgtaaactagttcaaccattgtggaaaacggtgtggcaattcctcaaggatctagaactagaaataccattggacccagccatcccattaatgggtatatacccaaaggattataaatcatgctgctataaagacacatgcacacatatgtttattgtggcactattcacaatagcaaagacttggaaccaacccaaatgtccatcagtgatagactggattaagaaaatgtggcacatatacaccatggaatactatgcagccataaaaaaggatgagttcatgtcctttgtagggacatggatgaagctggaaaccatcattctcaggaaactatcgcaagggcaaaaaaccaaacaccacatgttctcacttacaggtgggaattgaacaatgagaacacttggacacaggaaggggaacatcatacactggggcctgtcgtggggtgggaggaggggggagggatagcattaggagatatacctaatgtaaatgacgagttaatgggtgcagcacaccaacgtggcacatgtatacgtaacaaacctgcacgttgtgcacatgtaccctagaacttaaagtataataaaaaaagaaaaaaataaaaataaataaataaaggagttggaaaatgagcgacactgccacaagtgtggtgtaatttacaagtggtatgatttgctcctcttgcagctggaaagcttggtaaaagttaaacactatcaaatgtagacagaatcttactacactgtctcaaacagttccagtatttctaactgccagaccactaatatatccctccccacctctactgtattttttgcccccgagattcactgcattcattcttaaagtagcccatggtttatgaaattcagaataagatctaaattacttcaatgatatgttctaagaaaaaaagaatcataaagaaagtgtactttattgttggcagtgattttagtgtagtaattttgaaacaattttacatctgtctggtagtatcaagcaaatattaatctcccagattacttgtttaggaaaaaaggtatttttacagtgaaaaggtctgacaaacaccaagtgatcaaactttgcatcagcaataaggtgacaasaacattatgtgcctcacgttgtacaatgaatggggcatacaactgccatttctgtagtcttccaccaagatgtttatcctgcatctatcctcatgaggaacaatcagacaaacggacttttgtaaactaacctgatttttcaagtgtccatttcgtaagacatcaaaaaaggtgtgagggttattctagcatgggtgtccaaccttttagcttccctgggccacagtggaagaagaattatcttgggccacatgtaaaatacaccaacgatagctgatgagctcaaacaaaggcctgtgcataattttcatgatatccaccaccacagataaaagatcctcgcactcaaaggattagacacggctgctagagttaagaagactaagaccaggtatggtggctcactcctgtaatcacagcattttgggaggccgagtcaggtggatcaccacgggtcaggagttcgagaccagcctggcatcaacatggtgaaaccgtctctactaaaaatacaaaaattagcctgggtcatggcgggggcctgtaatcccagctactagggaggctgaggcaggagaatcgcttgaacccaggaggtggaggttgcagtgagccaagattgtaccactgcactccagcctgaacaagagtgaaactccatctaaaaaaaaaggagactacagatacatgacaactaaatgccatgaatttggaagctttaaataacattttgggggaaaattaaagtttatatcctatacattatataattctgtattaatactaaatttctaattgtgttatgatcatgtaaaagaatgtcattaggttaagagatacatgctgatgtagtagggtgaagtacgatgttgcttctttcaaaagaaaagtgcttatacagagataaagcaaaggtgacaaaatgacatttgttagataaaggtaagggatatatgattatttcactgtactatactttcaacttttctgtaatttgaaaattttcaatataaaaagttggagataaaaaataaaaattttaaaagaagggaaaaacaggaaggaaatcgcttacagataccatgagggtagaggttaagcaaaggggagcatcctgctctcagttttaaccaaatccaatgaaaacccagaagtcgttagagaacaaactgaggaatcaagcaaacaaattcctaaacctcatcaactcttgcctattaatttagatatgtgggtgcaagtggtataaaggtgttggttaatcctttttatcaacaaaagacataaaatgaagttcatgtttcccttcttccaagttataattccaaaggagttggaagactggcagggggaaaaaattattctaaaagttaatgtaaaaaaagaagttaatactttgatttttttttttttttttttttttttttgagatgaggtctctctctctcacccaggctggagtgtagtggcacaatcatagctcactgtaaccttgaactcctgggctcaagcgatccccccatctcagtctcaagagtagctaatgctacaggctcgcacaccatgctctgacttgttttgtaaaaaggtggcagaatgatgaaactaggtgttttgtcacctaaatccaatgaacatttgtaattagatatatgcaattagactagagtccatattgttttaaaatctcccaaactaagaaaagcattatcaccagtgtggtgttttatcttttaaccaaaaaactatcacaccaagatctttcttccttcagcttatattctaatgacagacactgaataagcccacattgttaattccacaatcagtacataaaatgctcccctaatattcagcattctgtcttaaaagctctcaaaaatatggttgcatctcaaatgctgctggcactctactgagtttatgtacagccattacacctgaaaaaacatttctactcaaatggtcatgaatttattttagattatcaaacagcctccccattcccaccatttccctctgaaatcccaaagaaatgcagcaaagttaatgactacatggtaggataatcattcaaactttttaatctccctttacacattatattaacattcatattgcaaggcattccattcacaaatattacagtttgataaaaacttcacacacatactcccaaagtctataccakattcagtcaactttactaaatcattcaaataataaaagtaatgaaaacattattatattttaaagcaataaggtctgaggcactctgggaaagatgttctcttacaagtataatgtgtcagtggtatgaaattatattacaaggatgcccagtaatcaagtacactctaatgacaatgactttgtgatttgatatgtcttcactggatacactcctacttggacaactgctgaaaggaacgtagatatggggcagctgaggtcatttctaatgaggttcccaactatgtaaaggagaggtgtgtttccacacacgaaggacagctgcatctctactgcaaggttacagtacacaaaattcctttctcatcactatcacatttactcaacgttagattttaatagcccacttgacctcctgggttcacagctggagacactttagaactctttccccatcctccaccatagtgcaaacttcacgcttctctgagcacctccaaggtatgcccttgaagtaaaacagaaaagggaagaaagggggctttttcttttccatttctgaccaaacagaggtctgaaatagcagtgtattatgaaattctcattccctgcaacagtcagccaccacttggaaaatggctatttttgccataaactagatttttaaaagcctgataaccttccaaagtgaattttactacattcattcactgacacacagagtccacattggagaaagtctcattgggtgagtgcttccctatgcacaattacaagggtaaataattagcatgggggagaggggaggccaaatcccaaccaggaattaaatcactgcaaactatggatccatttgtaagaacatataaacctgtcagagcagaaacaacacaaactccaggtcacatagtgtttggtaattatgtatacagaacttaaaatgtatacatatatatttccatatatataatttaaaaaatctggtgcaacacatattgctaagtttcaaagattctcatttccaatgttcacctggaaagcagatggctcttgatggctgttttgcggcagtgataaaagcaactacaagcaagtttaagtaaaagtgctcaaagggcaaatgagaaaacaggtgtgcagggggagggggctgaagagttgagcaatgtttcctttattcttctcagctttttcagacccaagacaagttcttgaggacacacatcaaatgctgtagtcctttcttatctatagtcaaaacaaaacaagtgattaaaaaaaggttcctcttcctttctgtactctcaataaaatgcatagcacagtaagaaggtactgagatgtgccatcttgggagaaattaaaattgagacatgaagtgaggccgtgcactgtcaagtcgccgggttaggatttcacagccagtgtctgtgaccaggagggtgtgctcaaactgagcagaccgctttccgtctcttgtcaccgcagtccaaccatctggccaggtttcatcctgccatccgccttcaacaaacaaaaacaatttcttagttcactcagttttctaaatgaactctatcaagaaga

SEQ ID NO: 96076 - DNA, 27404 bp, Homo sapiens
  misc_feature (1)...(27404): n = A,T,C or G
acagaacaggctgttcatctcagaaacaaggatctgaaaagagttgaagaactaaagttaactttttaaccataactgtttggttttactagttaggatgagatttataattttattacttttttaacttataaagaaactataaagaaagactccagctgccaacatgtacatgtaattgtaaaataaaggtattgtaattgtaatttttattatttaaaaaaagtctgaccaaataattgtcaaaataatataaactgtctcggtcacctctaaagccttaagaagatgttatgcattatggagtaatagagtcatagaaatgttttcttactggatcattcaggaatctaagattatcaatggcagacatttaagtctggatataagaaaattctcgcaggcctaaatagaaaacttttagaactattaaagatgagattattataaggtccaatagatttttggctatagtcttgcaagattaatgcgaacaagcttttggaattacctgggtagtcctgggttttgccttttttctcccaagtggcttatatttgaattttcaattgccctcttgggccccagagtgctggcagctgggcatgtgtcttctacatggaaacttccaaaatcatcctttgaaaaatctgaccagcccaagagaaaatacctactcttactgacattatatcccccagcaattaatcccgccagatagttctgtagcaaatctcacatgacacagatgccacccttgtattcagagcttcccaatagctcattagtgccccatcctgcaacagaagacaaccgagatcatcagaaatgtggagtgattctagctttgtaataggaaagatagaaacaggcaaagaaaaaagaagttggaagaaataatccatgaaataaaaaaattcaaaatttttttaaaagctgttattaatatttgtaaaaagatattacatacatgaaaaaagaatatgttgccataaaaaactcttgagaattaaaactcatcacagcacagtagaaatccaatagaaagaaaagatctcaataaattcaccccttggtgtaactttttctccagaagattactaatgaagtgccccaaaactgataaattaattcaaagaaagatgtggtatctgagaagctgatgctctcaccctgagaagagggaagggattccccaggatgagggtkaggaggctccaggatggcaggtgtggcctgatgcaaagcacctcctgcccacatggaagtaagtcaaagactccagggagatacacagctgggaataaaattttcagggactatgtcatcatctcatatctcaagcaatttaaatggaaataaaattgacatgttctgggaaaatatgctaaaaaattcaaaagtggctttaaggctgacgaagacatacaaaatacatattttgtatgtattataccattttgtataaaatggtaataacagtagaatctgcctaatagtattattgtgaggattacatgatctgttaattgtaaagcatttagaacagtaagtggcacatacttacagtgacaaggatattagctattttattgatatttaggttattaaactcgagttaggcttcctgggatcctggctccaccactagatgtgttacattgggaaatttatacaatctctctaaacctcagtgtcttcatctgtaaaatgtgcatggcaatggtatctacctgataagttaatgctaaacattgctataagtaaggcaatgtgtgcacagagattagcaaagtcagcactccatggatgttacatactgatactaatcagttgtaatttttacaacaaaatatatttttaattttcaaaaggaaaaaattctccaccattaaagaactctttagcttttagatatttttatattgtgacaaccataccatttgtattactttgtattgttttaataaacacttggtattcccacatcatctcagtaaatgtacttttaagcatatgccaagcacatcatcagaataacttaaaatgcatcaataactcatttaaaatacatcagtaaatcattcgtggagcattcagatcgtttgcagtttggctatcacagagaaggctggatggaacatctctgtttttggattgggcttcttagattatttcccaactgccttcacaggaggaatgtaaacaaacattttgttctctcacacacgctcttcatggaagaattccaggctccacagccacagccagtccagcaagcatttcagttccctcaacatctttggcttcagtaccaaaatcaaaatgaaatgctaattgagtaagaattcatggttttgaatgtgggtattttcaaaaattcctctaggaacttaaaatttactctacttattgtaatattctatagattatttatgtaactattccattctcaagttctatttattgctactaaagtccctctcccactcttcattttgcatctcatccccaaaaatgctttaaagtctgttatttatgcacatacttgaaatgttacaatttttttctagcaatcatctttacaataatattaatcttaccattttgccaaatgatttaaccccaaaaatgaagaatttgtactgaaggtactttctgccagttacaatattatttcttagatccaggtaaattattggcccatggggaaaaggagacagttggatctcttacagagatgctagtctgtccttctcgaggctttggagtcacatctctgcactactcatcattacatgcataattatattagagatgccagtccttgccttccactaaccttccaagagagcttgtggtaatttgttacatcagcaatagaaaattaacacacccttcttgcaaacatggccatctacaggctgtgggtagacacatctccctctttgaccacaacctggaaaagctctccaattttaagaagccataagattagattaggttcacctggataatccaagctagtcttcccatctcaagacctttaacggaatcacacctacaaaattcgtttttttccatgtaaagcaatatattcctagattccagggattaggagtggacctctttgagggccattattctgcctagcacaccggggatcgctgacccaaactgaagcaagcatatcatctctctggataagctgcatttataatatagtagttggtggaaatgtaatatagaatcgggctggcttacagagacacacacagagagagaaacagaggaaagtgatgccctgtgacccctagagagtgacagggttacctttggacattccagatgttgctacaggcctgccatggccctctgatactagaacactgacactcaatcatgtgacaactgctcttcccctccatttaaacttttagaaggtggggcaaagagtaagcacagagtagttgccagatggtattaagaaagatctcttgactctatgaagtttgtgccaaagttcttttggcagttcatggagccatgtgttcacaaagtgatgcaagctcataagtggatatcacatttccaaattcattagggccttgaaaacaaggtggtagtggctataattccctgaaatgctatgtctacaggtgtgagagaggattaaacagaaaaatgtataaaagggggtattaggggagaaaaatgttttcaagattctttgtccatatgctgactgcatctatacctctcaactgcaactcatctttcttaataaatcttaataaaatatctttctttcaaggcttcctcattctcaaattagatgtcattcatttaatttagtcaacaaatatctgagcactcaccctgtgccactcattgagttaagagctgagaattcacaatgaaaagacggagtagggtcttcctcttttgattccacgttgaactttctcctggcactcaccacttcctgcttcacaggagggttctctgtcttctctacctgaccacagccaatcccactgctaatctgtaatcccttaaagaggagacaccagatcttctggattatgggactgctcatagaacagtgcgtgtcctaacataaaggagcacaagaattcaacaatctttcattaaacacctattgtacacatgaaactaggtacagttgaagatttaaatgaaattcaagaacatctctgaccagaaatttccagtagaacttaggagactgatctctacactaaatataaaggccacaaaagagaatgggccctaaaaccacaggagggatgctagtatgacagggatggaaagaagygaagcatgactgtgagatggcgttaacatatctccacaagggcgaccttgtcctagatctcaaagtttggggaggatttgaatgggccagagggacagaaaagaagagaaaaagcatgatgagcaagagcttgaatgaggaatggattcctctttggaggaccacagagatacatgcttctaaagagcataggccctgtattggagaatggtgaggaatagttggatgagaaggctaaagccaggttatctggggctatcttctttccgtcatacctttccaaactagcagcaactaaaatcataggacctcctttgcttttctattgggtgaatgtttctcagtcttggtgtgagtctcagtgcctacataattaaagcttactgaaatgttcccttggcaattttagagaaatatgtcctctatgctaacatgttcatattgacagactatatctaattaaatagttgcctgtatagttttatgacgcctccaagtgtggataaaagaaaaatcaaactcctatgcttggaaagccatgaggatactagctacattgatcaaagggtaatggaaatgatccagtgaggattttgctccatttctcacaattatttaaaatctgccacaaatgcctgttcctctacaatgcctcccctgagtccttcattctgaatagcaactctgtctctgttcccaaagcattaactgacccctgtgatagggcacttcccagccaggctgatatgtagacttggtttcctgcgtgtcttttcactataaactgtgagctttctttcatgaataataattgtagctaacatttaggagggtgctcctatctgcaaaactccatgatgagtgctttacaaggattatttcatttattcacaaacagtcctttaaaatgaygccattattcatcttcatctcacagataaggaaattaaggcaaaaaaaattcagtgaaataataagtccaagtacacagaacaagtaaggaactgggttggcctggtcccacaagccatgccatcaccgctgccccatactgcctcttggcacaggcagaggtcatgtcttattcatcactgctactccactggacccagcttagtgcctgacacagggaggtgttcagtccatacatactagttttgagtggagcagaattgccaggcacagtgatcccctttgctgtgactaattgggkgtctgattctctgctgtaaagacaaagaggctgctctctctatcctacttcgtttttcctgttttcttactcttcttccttcctcgccaccccatgtgcattcaaagttgcagcttagtgcagacaaagggaatacaaggcagaacgacctatgtgggattgaaagaagagaaacaaggaattccagaggccggggkgggtgggaagtgaggaaaagagaaagtgattacaatttatcactttaacttaatatttaaactaatgaaaacaaaatcttatctagaatttggaagtcaatattttgattgctggttcagtacccttttatctgttttgacagtctgggaataatccagtgggtgtggcttaaagacatagatcacgtgtggaattggaattggatgttacacaagcaaacaaaataaatatctgtgcaatatatctgctttatgcactcaagcagagaagaaatccacaaagactcacagtctgctggtgggcagagaagacagaaacgacatgagcacagcaggaaaagtaagcaaaaaatatattactgttggtaatatattctcatcaatataacaaagaaagkaatacagyatttgatgaataatttaaaattcatatctaaattagaaatgatatgctgaaatatgatatgcaatatayacctcaatatgtaatgtatactgaactgcagtggaaataagctattcttaagtacctttaacaggaatgtatagaacctgtgtctattagtctttatttcctacattaaataaatttacagtaaaatgatagtttattccaagctaatcatgactgatttgtaaatctaaagttagaaaagtctttaatggcaakttatctktataataagaaaccataattcaaatgtgttattatttttattcaaattttttatgaacacaggaaagttgtctgacagaagtttgatgagaggaatttgactcagaagactgaaatatcctttaaccttactataaaatatcttacaaaatactcattgatttcacagcattagaatcatcaaggttaagcaagacatcaacatgcaaattctgattaaaaggggtccattatgatacaattcagggaatttccacaaaaatcctatggaacagtatcttccccatttaaaagttaatatggttttacagaaaatcaatgatacaatttgaataataatacaatttgaatcacttagcactaggaatacagatatttggttttttcttctataaatttgtacttatttgctcaatgtgtttacaggtgcatgtggtcattcaatataatcaattgatttttttaattgtttaattacataaacctgtgcaactatgtccagtcctttttttgtgttaggagtgtaccacactgtaaaatatctcactatgataattcartttaaaggttctgaggcttctctctgcattgtgtgacaaacaggctcatatcaataagactggttgatggagctagaggacgttattctaagtaaagtaactcatgaatggaacaccaaatatccaatgttctcacttaaaagtggtagctaaactatgaggacacaaaggatgagaatgatataatggactttggggactgagggaaaagggcagtaggaggaataagacataaaagactacatattgggttcagtctacactgcttgtgtgaggggtgcaccaaaatatcagaaatcaccactaaagaacttatccgtgtaaccaaaaaccatctgcaccccaaaaactattgaaattaaaaattaatcaatgaataaattttaagataaaaataatgcatgtaatttacccagcacaggtcacaatgtgcctgtcacatcataagcacctcataataagaatcttcctactattagtaccttctgtctaagtattctggtatttattttggcattgaccatgttgaacatcctacaaagttgaaaattttgacaaataaataatgaaaatgaattggcagaaaaataaatctcaattgaatttttaaattatatttgcaattatgttggttctttctagaaagggctctgmgaattatacatgctttaccacaacgaagatgggttttacagtacactgccaagcactagaaatatatgctgaactttatttttaagaacatctatggataagctctgctaaacagaaatccaagcacactgtttctccagttttaaaatatacatgcgtgggtctgagtgtatacacacacacacacgtgcacacacacacaccaccaactctaatctctataatatttggctcaaatctaagctgaaagaagtctctacacataaattagattacaaaacaggctgccaaagctaagtttcaaatgagtaggaaacaagtagcacacagaagtagtggagagagaaaattaaaagaggacaataagcaaatagggagagaaagaaatgtcattgtgcgcaggaaggtaaatgtataattgctcttatagagtcagatccttttggcctaagcagaaaattgagcaataaagcagtgtattttatgtagacagacactgactctgtcagcaaaataaaggtgacttctaacttcatatatcagctaatagttgtgggtagacgagcattttcaggacggcattaggaaataccaggaataaacaccttcagagaaaaaacaacaacataagaatggcctaaataaatatattccatttttctcaatgtcttattatactttgtttatctttccttatgttattgctttttaaaagatacttttattctctttataaaccagagtacttcatttccatggagcacttgttaggtaccagacatgggacgcaatattacatgtacaaagatgaaaagacacaacttatgacttcaagagtgggaaaacactgtcaccatctctctgtttgattttctaggtaatcaaatgcaaagcagctgtgctatgggaggtaaagaarcccttttccattgaggatgtggaggttgcacctcctaaggcttatgaagttcgcattaaggtgaaatatttttccatttatatttcattttacatttaaaaaactcagagaacattaaaaatggaaacatccaaaaatccactaagaggcatatcttatatgatcacccagaagataaaattacatttgttgtcaaggaaaggtataaatataaattttaaatttttaaaaaatgatcaaagagtacatacagtataattccagtaaaatacaaaagaatttatgtttgtacagaaaaaaattccaaaggatatatatcaagacttcaaaatcaattaatattagatattttccatgtgttactttgctatttctacttctattttttaaagcgtgcattcttacataagacttaaatatttcagaatcaattatttcacagattattctaaattgtttaattcaagaagggaaggtagagaagggctttagactgaataaccttggggataaactgaatctttcatatttaggaatagtagggattagtagcaaaaccctcaaatacattttagaaacacaatttcaggaatttgggtatgttaaattcatctagttacaatcttttctgaatctgaacagcttctctttattctgyagatggtggctgtaggaatctgtcrcacagatgaccacgtggttagtggcaamctggtgaccccccttcctgtgattttaggccatgaggcagccggcatcgtggagagtgttggagaaggggtgactacagtcaaaccaggtacaggattcacactcagggaacacgtgtggttcaccatccaggatttcccagcctggataaggaaaccaaggcaatgagagacgaaagkgcttgcacaaggtcaccgcgcagccaggacttcaggagtttcctctttccctctctgcctgcctgacccaagcatgtatgcattcaggcactcatgtattgtacccttcaaccrttatgtaccgagtatctactagaagccaggcaccaggttagagcctggagatatgtgaggatcaaaagagacacagtgcctaccagtgtggcattcatagtccagtaattctgtgttagtgttggctgaacactgtcttctgtcagggcccagatagaagtagaaacgggaggagggaaaaaaagtaaatgtggaaactgttctgtgctgagttcacaaaatggaggctacatggctacggatgaataaacatgaccttttcttaggtgacctatgcagctccttcaccaatttcctcttccaacatggtgtctcttcctgagcatggaatcaatgaaacaggctaggtgaaaggaaatgaaagaaacgtagaaggaaccatcccaccatcaacaatgtctgccttgttaccttcagccatgcttaaatgcaactggttacagattactaattatttcatcttcaatatttattttaccctaaacttatgtattaatgtaaatacttttagaagtaaagggttaataactaggacattgccataccatcattttcacataaactttacctataaaatgttaatgyaccaacaatttttcttgatcatgtggaatgtatagcataggtgattagaaataaaaattatgtttaattttaaaaagttgctttagcctgtagattcaccctgcccccttaccaaataccaatttaaactgtgaacagaaaataataaaataaactatccaaagtatgttttagctctattttctttagttagaaataaattaacaacaaaatgacagccttactttttacccctactccctccaccataacaggaaaagtagataattcgcaaattatcagctaaaaatatttgttaagtccattcttatcctaaaagaaagtgcctaacttgttgtgaagagctgaagttttcagagaaatttctggaattcttctttgtcccatttttgtttttctcaaaaaaaaaagacctaggattttttaaagcattcatttcataaaaaaagataagcatagtcactttgaaaagtcaagaattggttaaaaattctcatatttattgtaaatcaatcttttacaaaataccagatcatcccaatatctacaggcactataatagatcactttcaactaaaayttatatttatayttatagtaagaatatttaagatttaattagttaaagtttaaataaaaagatgtttgcaaagcctccaggagaaatcagtacactgtgtaaaagttaactattagtacagtggaagtaatttttttaatctgtgtggtctcccacatttgcgatttctcagtaggaatcctcaggcacttataaactcaaactgaaaacaatgctgtggcaggcattgaaagatgacatagttattattgaactctattccttaaagacttttaaagaaacatgcttctaatcaatacatgtgagctttaagtctttgctctattaattactgcatagaaatttaagaagaacttgttttattcctctccaggtgataaagtcatcccgctctttactcctcagtgtggaaaatgcagagtttgtaaaaacccggagagcaactactgcttgaaaaatgagtaggtttctgatgctctctttgcacagactttgagtttgcacattacttatgctcctgtctcatgcctttgtgtgtctgtgtattgcactgcccagtctaggcaatcctcgggggaccctgcaggatggcaccaggaggttcacctgcagggggaagcccattcaccacttccttggcaccagcaccttctcccagtacacggtggtggatgagaatgcagtggccaaaattgatgcagcctcgcmcctggagaaagtctgcctcattggctgtggattctcgactggttatgggtctgcagttaacgttgccaaggtgagaatgacaatgggtgataaaactgcttacatgcagactgtcggaaaccaaaagggaagcaatttcttgcaagaatcagaaattatttttgtagatttaaagtgtcgattatgagtagaaaaatggcccagaaagaattgagtacacatgctagaaatttcaccaatttattgcagataaaaagttgttacgaataaagatgtcatttacaataatttttcttctgaatttgctgtttatgggatcatgaaattttagacctaagaattcatttagtaattcattcaacrattagagagcacctataaatgcctcaggcaccataggttctgctaggctctgacagcaaaagtaaatgaaatgaagcgtttgcccttgaggaccatctagtctgtggatcctctcctcccagaaataggatcaacagtagagtccaaaaccttacctgatgcacctccaaaccaaggctcacccactctgtggattcttagacggaaagtaataaagactcagtgatgcataattcactcattatgggatttcactgctaaaactaactcccctggcatgaacacacacatatacttcagaagtggtaaatttcaagcagaaattctttaaaggctcctcatctgagtaggctgaaaatctagtagtatgctttattttatgaaacygaggttcagatatataaagatatttgcccaaagcctcagtgctgagactaaaatatatttttaatatgagagctgagactaaaatatctttttcaaatctcctgctgaatcttagctcgcaatacataattattagtgtttttaaatcacagtcacaagtcttgtgtttttctaagtaaggtagaaaatggtgttgtcccccatagtatgaataatatttggtgaatgaatgagtgaatagacacccttaagggaatataaggatgagattacttgggacaggaaagcatgttacccacaatgaagactgactatgggagactaggtttaataaatagcccctagccaaccacaaagaaaaaattcagaaggcatcttttccaaatttctgtgactttagcacttagccccttgttcagttgcctcatacgtgttagcagatggtcaaagtgatcctacccaagaacagaagatgaggatactcataacaatagattgtatttgttattgaaatatagacaaacatttcattgctgtgttgttcgctagtgtatttttaaagcagggatatactggtcacaactaccgaacataaatgaaccaatgagttaattactgagggcttaagtggaatatttttcagtctcctggagtagccttttccacttattttgttttccaaatattgccgttgtgtatgtatgagttactgaagctggctatcaagggatttcagcaattgacagtcccttcaagattgtaatcactgccatctggatctcaaagatcatccagtcccctggttcccagcctgaccttcccattggagtcacctggggactgagtccacctgcagagattcctcatttaattgacatgggctgtgacctggactgtgggatattttgtaaagctccccagatgaatctaatatgcatcagtttgaaaaccactcaactagttcatccccttgaatttaaaaataaagcaactgaagccaaaagaggttttgataaacggttggacaaaagagtctgagtagttcttgataaacacctacgcatggcactttatgaagcttaggcactttctaacaatcatcacttaatctatttttgcattttctgaaaacacaggtcaccccaggctctacctgtgctgtgtttggcctgggaggggtyggcctatctgctgttatgggctgtaaagcagctggagcagccagaatcattgckgtggacatcaacaaggacaaatttgcaaaggccaaagagttgggtgccactgaatgcatcaaccctcaagactacaagaaacccatycaggaagtgctaaaggaaatgactgatggaggtgtggatttttcgtttgaagtcatcggtcggcttgacaccatggtatgtaccatgacatgccctgagatttctgcctctgcaacctggaagatgcatttaggcagcaaaatatatgttttatgtataaaggatatttttaatgatgaatggaaatttcccatcatctgtttgttatgtggcttgtttaatttttgttatgagaaatcttctcttccatcaattacccaaacctgtctcaagtcatatttcctctagaggaaaagaaaagggtttgtttttcttaactgagcaattatagatttactttattaatttttagttaaaaaatataagttcaagtaaacataaataatataaattctgttctcaaattggaatgttttatttttctcctacattcttaacaaaaatggtttaacaattttgcctatgttcttaataaatttcagatttttaacatgttagtatttggccaaaggaaatgagcaattttaggccaactgctgttttattaacaaaaatatgccctaaggaaattgactgctttaagacatcactgtattttatcacagaaactggacagtgcctggcacatagctagtacccaatattagttggactgaatactttgaaaagtcagcagtctctactaaaaatacaaaaattagccaggtatggtggtgtagtgcatacctgtaatcccagctactccggaggctgaggcaagagaatcacttgaacccaggaggcggaggttgcagtgagccaagatcgcgccattgcactccagcctgggtgacayagtgaaactctgtctcaaaaaaaaaaaagaaaaaagaaaaaaaagaaaagtcaacagactttaccaacccccagaatttaaaagctacgtatctcatagcattgcttatagattacatgagacaacgcatgtgatatacttagcacagtgccgcctgtcatatggtaagctcccaataaatgtcagctgacttttttttcttttttttgagacagggtctcactctgtcaccaaggctgaagtgaagtggcataattataactcgctgcagcctcaacctcctgggctcaagtgattctcctacctcagcctccaaaaatgctgagagtataggcacaagccaccacactcagcctcagttggcattattgatatgaaatactatttccaatcttgcagtgcttacatcatctttggcttattacatggtatttcttccaaacagttacaaatatcaattgcaatgggaaacacatctctagctatatttcacctacccagaattctctagaatcctactgaaaatgtctccagaaaccaacaagtttccattgctgaggttttctagaaggtccagcagtgtgggtaacagggagtrgcaccctaagatcaaagctctcggcagccttgacctaggacagatgccacagaggaataaaatgtcaagagaattcaactttttccagggctacagcttttctctttatgctccttttctatattttcatccattttctcatgtggaactggagtgtaccttatcttaagataccaagtgtctgacagccacatgttctgaggatgtctggtctcccaaaggtcagaatccaaaatcaaagaactaatcattatattcctacggggatctttaaccattttctaactacagaacatgttccaagaactgactggaaaacattttctgaactgtttcttgaggttcccaaatgatcagtgtattttaatgtaaaatcaatatatatttggggaggtaaaaaaacaatgtttaaaacatgtccgtttgagaaatggacagtagaataggaatccacttaagagggagaccgtcaagtggacaggagacaaatttcggtgatataattgtttatcttgttcaccgtcaaaatatctggttgaaagtactgggttcaaaatacctttattaggaagaattaagcacactccaatttattcatccattctttcattaaaaaaccattttctgggcatttcctgaatccacagcactatcccgtgcaaaaaaggggaatgaaggatcaaaagacatgatctcttccctctacacactcacaatccagttaagcctattacatgatatngtgcattatgagtaggaactatgcgactccamgttaaggatgctaaatattcactttattccagatggcttccctgttatgttgtcatgaggcatgtggcacaagcgtcatcgtaggggtacctcctgcttcccagaacctctcaataaaccctatgctgctactgactggacgcacctggaagggggctgtttatggtggtatgtagttgggctcaagtgccaaattctcattaatctcaatatatctcattmatctcaatataatctcaatatatrtgcccttttacaattgacaaggcaagattttgaaaacaaatcaaaaataaatttaaattccttttctatctacagtctccaaatcaactagatatggaactaatgcagacagaaggtcccaatatagacttttttctgttgtcaccataacccaggacctttaatctccatctgtttttgtacttgtgactgtgtaaggcatggaaatttttagtagaacatgcaaatctacaacaatatttcatatctacacccaaatttagacaactgataaatttgctcctctaccttgggcataaacttctgtactattatttctatgggagagacaaaataactaagaaccttcgtttatctgtgattttttttaagtcaagacactgtaaaagcatattgaagtactgtatctcttcttatcctcagttatagcagtctggaatggagcaccttttctaaactttgatttatttggaaaatcttctcttcaattctcctacttaccctagctgaatccaacaatgatactgtcttcttttcaggctttaagagtaaagaaggtatcccaaaacttgtggctgattttatggctaagaagttttcactggatgcgttaataacccatgttttaccttttgaaaaaataaatgaaggatttgacctgcttcactctgggaaaaggtagattttaagttagttttctgttttgcttttttttctaccataggggattgtctagcagagaatgaaaaaggtggaaagatgagaaaatatagagtcccttggttttccattaccagttcagtctttgcayggagcgtatgtaggatcatactgtgagaagttgaaaacagttgctttgcatttcctattctgctggagtcaaattacgttgattactgcaaatctgaatgatcagagccactcagccttcctgaaaagagaacactcacatttgcccaaaaaaaaccccacaaaaaaacaaaagtctatttaaacarccataattataacatggtgtctttgaagcctcttccttctacctatataaagctgacactaagtgtctgcatatttaaataattttcaggacatcctcaacattttcattacaggagtaggtggaactacattgggattgttttctaggtagatattactagtttttctctttttctttttcttttgtagtttaagaaaaaattttttaccactgaaagttatcataaaagagtagtaaatactattttaaatgtttgtcttacattttctctgaagcttagaaaaataagccaattctatttcctacctctaacatttaacacttacaaccagctattaaaatgaattttgtcacctgcatttacatgaggcacaactggaaacaggcagttatatctaacctttgccttctagctccagagtcttagattcttctgctatcccacacttactttcatgaggttttcaactttaaatagtgtttctttggcactcacaaaatcattatactaggtactttaaccgacaacattcttgaggaaggaaagaaactagcacccaccgagcaccagctgttctattaagtgtcttacctgcattatctcctgtgattcccaaacaatgctcagtgtcagtctcaatctcactatcttagagaacagaaactgagactcggagaagacatgactttgccaaaatcatcaagtggtaggaaggggaggcagaattcaaaagtagatcttgtttttagcaaatcgattcactttctattaaaccacaccgcccctcaagagtgcatgtacatatggaaaacagtagtcatcaaaggttagttatcagtcattattattaccattgacatcatcattgggatcatcatcatcataggattgaaaagatgatggcaaatatagagatgaacaaaaccagaggacagtgttgagcaacataagaagtcatgaagcatgcctaaattcactttatgagaatgtcatatagtaatatgcatatgtaaatataattaatcctatcaataagcaaagattaaaaattataatattcaatattggtaagaataaggtgagttgggcactttcatgtactttcagtagtaattgatacatacttttggaaaagcaatttggtaatatatatcagaaacctttaaaaaataactgaatcctttgccccagcaattccatttctagaaatctattctacagaaataatcaactagtcaaacatgcatatatgtttacttgttagaactttagaaacattctaaagttcaacacaaggaaaataatttcataaattccagtcatctattagaaataaatgaaaccatcaaaaagaaatgacttcattgggatattctcatgatgtaattttagactcatttaatgaagaatataaattgtatatgttgtatatgcaatgtctcaaattttctttttttatatttattttattattattatactttaagttttagggtacatgtgcacaatgtgcaggttagttacatatgtatacatgtgccatgctggtgtgctgcacccattaactcgtcatcaaaaacagtaaaacatgcacagatttctagaaaaaagttcatagaaattcaagaaaacattgagaatgattatttctaggttgtgggattatggatttcttttactttcttcttcctgctgtcttgtattctctgaattatgtgcatatatatttctcatatatgcatatgcatatacatatatatgttaaaaattattaaagagtcacaaagaccatcattttctaaaaatatgtattcatgagaagwtggtttatagaaagggcattagttctagtgtaaatgttccatttgtaatcttcacaagaatgaactatcttagaattaatacaaatcaactttattctctacttctacaaatccttaaacatccgtatcaaaggtcttttaaacttccagcatagtcttaactttgttaaattatcaattctttcaggcaagttatccatcatcttataatttttgcaaatttgtatttgggtttgaatcccaacactccatactagatgtgctaccagagcaagttacaaatctttctaagtctcagtttttataatctctaaaatggacataatatgggaacytacctcttagtgttgatgtttaggttgaagkttaagaaaatgcacgaagaatgtgacaaatagtaagaacttactgcaagttattatccactgttgttttatattccttattataccaggaacgtgggcacacaaaaatgattttttgaagatgctaatgtagaattaatgtasaattgaaatgacaggcatactcaggatgttgtgagtgagattaagattggagaaaaaaagaaaagaaaagaaaaccaaaaaagatgaacttcctttttcttgaaccaaatgtatggggatggaaatagggtagctgggatcacagacagattttcactaagacacctcagatgctccttggactctcacaacaagcatgtgggttgtctaaatgttaacacaatgtctcttctttcctattgcagtatcygtaccgtcctgacgttttgaggcaatagagatgccttcccctgtagcagtcttcagcctcctctaccctacragatctggagcaacagctaggaaatatcattaattcagctcttcagagatgttatcaataaattacacatgggggctttccaaagaaatggaaattgatgggaaattatttttcaggaaaatttaaaattcaagtgagaagtaaataaagtgttgaacatcagctggggaattgaagccaacaaaccttccttcttaaccattctactgtgtcacctttgccattgaggaaaaatattcctgtgacttcttgcatttttggtatcttcataatctttagtcatcgaatcccagtggaggggacccttttacttgccctgaacatacacatgctgggccattgtgattgaagtcttctaactctgtctcagttttcactgtcgacattttcctttttctaataaaaatgtaccaaatccctggggtaaaagctagggtaaggtaaaggatagactcacatttacaagtagtgaaggtccragagttctaaatacaggaaatttyttaggaactcaaataaaatgccccacattttactacagtaaatggcagtgtttttatgacttttatactatttctttatggtcgatatacaattgattttttaaaataatagcagatttcttgcttcatatgacaaagcctcaattactaattgtaaaaactgaactattcccagaatcatgttcaaaaaatctgtaatttttgctgatgaaagtgcttcattgactaaacagtattagtttgtggctataaatgattatttagatgatgactgaaaatgtgtataaagtaattaaaagtaatatggtggctttaagtgtagagatgggatggcaaatgctgtgaatgcagaatgtaaaattggtaactaagaaatggcacaaacaccttaagcaatatattttcctagtagatatatatatacacatacatatatacacatatacaaatgtatatttttgcaaaattgttttcaatctagaacttttctattaactaccatgtcttaaaatcaagtctataatcctagcattagtttaatattttgaatatgtaaagacctgtgttaatgctttgttaatgcttttcccactctcatttgttaatgctttcccactctcaggggaaggatttgcattttgagctttatctctaaatgtgacatgcaaagattattcctggtaaaggaggtagctgtctccaaaaatgctattgttgcaatatctacattctatttcatattatgaaagaccttagacataaagtaaaatagtttatcatttactgtgtgatcttcagtaagtctctcaggctctctgagcttgttcatcctttgttttgaaaaaattactcaaccaatccattacagcttaaccaagattaaatgggatgatgttaatgaaagagcttcgccaattaagaagggccatgtaaatgtgggtaacctgattgttttgtcaaaaatgctaaagcggggtggggggtggcgcagtggcttatccctgtaatcccagcactttgggaggtcaagacgggtggatgacctgaggtcaggagtttgagaccagcctggtcaacatggtgaaaccccatctctactaaaaatacaaaaattwgccaggcatggtggcaggtggctgtaatcccagctactcaggaggctgaggcaagagaatcgctggagcctgggaggcggaggttgcagtgagcagaaatcttgccactgcacagcagcctaggcgacaagagcaaaactctgtcaaaagaaaagaaaagaaaatgctgaaggagttactcagggtcaagaaagttttcagaatgtccgtaagataacatcatcatgggacactacctgttgctgggtgctctgcggcttttacactgatgctgattgtgtgagatccagaaaaagaaaatggagttctacatgcccatctcacagcagggtcatcaaatcctgctagtgacacagaagctgacatccagctcccacccgccttcctcccaggttcggggagcaggtagagtgggagccattaggtgggctctgccagtgttgtcatagagtggcaagtcctccatgggatgggagtggcatgtgggagccttctgcatcatgcactatgaaaaaagaaaatttactatggggcaagtggttcatatagttaagtgattgtatatatatatatatatatatatgtattccagtgtagaaagtattggctgggtctgtaatcaagtattccacagaagtgccttcataggtgctgaaacaggattatgagagtgacagacacaggactgaagacagggagaaaatgtgcatggctgtgagaatatattgctttgattctttgacttctcatgatatatgaaaacaaataaagtgggggggggtgacttcaataatatcacgaacatatttaaaatgaaattctgagcatggagaaaaatttcaaattctggtataaacaaataatctaaaaatatagataaggaaaaaatgttttcatttttttggtcatattgatttgggtcatatatgattgaccaaaaaaaaagatatttctaaaatcctggtgctttttcatttaaaaatagacaaccaaagaggaaaatgaacaatgatggaaattcgtggaagaggaaactaaaatggcaaaatagcatattaaatggcactgagccttggtgtgatcaaaaaaaaaaataaagcaaaatgagatattactgcttacctattagcttatgctgttggtagaaataaatgtgcattgtcataggtttctgacaaacaatttgtgatttttattaaaattttaaacatgcatatcccaagcaatatcacacttgggaattgactcyrtaattataattatctgtgtataagaatatagaaacaagactattagcagcagccttacttgtagaagaaacaaaaatttttaaactctctgattgattgacagaataaggaatgataacggaatgataactccctattttgaatgggaattttttttttttttttttttgagacggagtctcgctgtcgcccaggctggagagcagtggcgcgatttcggctcactgcaggctccgccccccggggttcacgccattctcctgcctcagcctcccgagtagctgggactacaggcgcccgccacctcaccctgctaattttttgtatttttagtagagacggggtttcacagtattagccaggatggtctcgatctcctgacctcgtgatccgctcgcctcggcctccgaaagtgctgggattacaagcgtgagccaccgcgcccggccttgaatgggaatcttattaaaaaaaaaaaaataggggactgggcattgtggctcatacctgtaaccccggtgctttgggaggcygaggcaggtggatcacttgagctcaggagttccagactagcctggacaacatggcaaaaacctgtctttacaaaaaaacacaaaaattagccaggcatagtggcatgcaactgtattcccagctacttgggaggctgaggtgggaggatcgctggagcccaggaggcacaggttgcagtgagccatgatggcaccattgcactccagcttgggcaacaaagcaagtcctcatttcaaaaaaaaaattttatctaaaaatctggagaaattaatatgaagcatcagaaagtataaaaagcaaggtacagaataatgtgtattacatgatccaatttttgtgaaagaaaaaacaaaacaaattaaaattcctatttattagtatataggttcatatgagcatggagaaagacatagaaatgtataaaacaggctgttcccctcagaaacctggatctgaaaagagttgaaaaactaaagttaacttttgagccataactgttttgaactaatattatgtaatttctttacatactatttttgaaagtcttgaatagaggcaggacaatgaactttaacaatttcttcaagaatgtcaatcgcattctttaatcatttgtaggagcttgacatcaatattgtcagttatgatgagatttatgactttattacttttttacctcataaagaaacagtaatgaaagattctagctgccaacatgtatatgtaattgtgaactaatttaaaggtactgtaattgagattttaatcacttaaaaaaaaaaactgaccacataaaggtcaaaataatataaactatcacagccacctctaaagccttgggatgatattactcatagagtcatagaaatgtttttcttacggtgaaaccccgtctctactaaaaatacaaaaaattagccgggcgtagtggcgggcgcctgtagtcccagctacttgggtggctgaggcaggagaatggcgtgaacccgggaggcggagcttgcagtgagccgagatcccgccactgcactccagcctgggcgacagagcgagactccgtctcaaaaaaaaaaaaaaaaaaaaaagaaatgtttttcttactggatcattcaggaacctaagattatcaatggcagacatataagtctggatataagaaaattctcctaggccttaatagaaaactttcagagctattaaacatgaaattattataaggtcaaatagatttttggctatagactcgcaagattaatgcaaacaagcttttggagttacttggttacctgggtagtcctggattttgccttttttctcccaagacgcttataattggattttttttttgagacggaatctcgctctggcccaggctggagtgcagtggcgcgatatctcgtctcactgcaagctccacctcccgggttcacgccattctcctgcctcagcctcccgagcagctgggactacaggcgcgcgccaccatgcccggctaattttttgtgtgtgtatttttagtagaggcrgggtttcaccgtgttaaccaggatggtttcgattacctaacctcgtgatccgcccgcctcggcctcccaaagcgctgggattacaggcgtgagccaccgcgcctgcgctcaattctcaagagatttttttttttttttatgatatcatagtcttctttcatgcatatatcttttctctttgtaaataataacagcttttaaaaacattttgtattttttcacttcatggattatttcttctaacttcttttttctttgctttgtttctatctttcctattacaaagctggaatcactccacatttctgatgatcttggttgtcttctgttgcaggatggggcactaacgagctatcgggaagctctgaatacatgggtggcatctgtgtcatgtgagatttgctatagaactctctggtgggattaattgctggggaatataatgtcagtaagggtgggtattttctcttgggctggtcagatttttcaaaggatgattttggaagtttccgtgcagaagacacatgcccagctgccagcactctggggcccaagagggcaattgagaattgaaaatcatcacagcagagtagaaatccaatagaaacataaaagatctcaataaatttatgccgtggtgtaccttttctccagacgataactaatgaagtgcccccaaactgatgattcaaagaaaggtgtgatatctgacaagctgatgctctcaccctggggagagggaagggattccccaggactagggtgaggaggctccaggatggcaggtgtggccagaggcaaagcacctcccgcccacatgggagtaagtcaaaggctccagagagatacgcagctgggaataaaatttccagagactgtatcaacaatcatggtgtgtctcaagcaatttaaacggaaataaagttgacgtgttctcaaaaatatgctaaaaaactcaaaagtggctttaaagctgacatagacatataaaatatgtgtctatgaaaataatagtagaacctacctcatagagttattctgaggtttacatgagtacataatttgaaccaaccatttggaacagcaactggcacatgctgagagtggcaaggatattacctattattctttaggttattaaactctagagttaggcttcgtggaatcctggccccaccactagctgtgttacattgggaaattgatgcaatctctctaaacctcaatgtcttcatctgtacaatgtgcatggcaatggcatttacctcataagttaatgctaaacattgcactaaatgaggcaatgtatgctcaaaaatgagcatagtcagcactccataaatgttagctataaatagtaataatttgtgctttttacaaaaatttatattttaacttcaaaaaggaaaacaatctccaccattaaagaactctttaatttttagatacttttatattgcgacaaacataccatttgtattactctgtattgttttaataaacacttggtatttctacatcatctcagtaattacatgtttaagcatctgccaagaacattttcaggataatttaaaatacatcaatacatcatcaaaacacttttggaacattcagatggtttgtagtttggttctcacagagaagactggatggtacatctttgtttttggattgggcttcttaggttatttcccaactcccttcacaggaggaatgtaagcaaacattttgatctctcacacatgctcttcttggcaggattccaggctccacagccgctgcaagaccagcaagtatttccgctccctcgacatcttgggcttcagtaccaaaatcaaaatgaaatgctaattgagtaggrattgatggctttgaatgtggcattttcaaaaatttctctaggaacttaaaatgtattctatttattgcagtgtgctatagagtatgcatctattccattctcaagttctgtttactgctactaaagtccctctcccaattttcattttgcacctcatcccaaaacatgctttaaggttgttatttatgcacatacatgaactgttacaattctttctagcaatctttacaataatattaatctcattatcttaccaagttatttaacccccaaaatgaaggatttgaactgaagataatttctgcaagttacagtattctttgtcaggcccatgtaaattatggacctctgcggaaaagaagacagttggatctcttgcagggatgctggtctgtccttctccaggctttggagtcacatcttcgcactgctcatcattacctgtataattatattagagatgccaatccttgccttccactaaccttccaagagagcttgtggtaatttgttacrtcagcaatagaaaattaacacacctctgttgcaaacatggccatctaggatctgcgggtaggcacatctccgtctttgatctcagcctggaaaagctcatcaattttaagaagccataagattagattaggttcacctggataatccaagctaatcttcccatcccaagacctttaactgaatcatatctacaaaatccatttttgccctgtaaagcaacatatttctagattccagggattgggagcggacttctttgagggccattattctgcctaccaggcagaggatcactcccccaaagtgaatcaagtatatcatctccctggataagctaaatttagaatatggtactttgtgaaaatgtaatatagaatcaggttggcttgcagagacacacatagagagagaagtagaggaaagtgatgccctgtgatccccagagattgacagggttacctgtggacattccagatgttgc

SEQ ID NO: 96077 - DNA, 35067 bp, Homo sapiens
caggatgcctctagctttgttctttttgcttagagttgccttggttatttgggctcttttttggttcaatatgaattttaaaatagttttctctagttctgtgaagaacgtcgttggtagtttaatgggaatagcattgaatgtataaattgctttgggcactatggcaattttaatgatatggatttttcctatccatgaacacggaatatttttccattcatttatgtcatctatgatttctttgagcaggggtttttagttcttcttagagagatctttcatctcccttgttagctgtattcctaggtatttttttctttttgtggcaattgtgaatgggagctcatttgtgacttcgctctcatctcatcttgactgttgttgatgtacagttgctagcaatttttgtgcattaattttgtatcttaagcctttactgaagttgcttatcagcttacaaagcttttggactaaagtgatggggtttcctagatataggatcatttcatctgcaagcagggagagtccagtttatgaaatgccttcctcaaactacattttattacctgtgggaccaagaggaagttatctaaaatctctgagcccttgtttcttaaatgcattcctcaaaggatcattgtgagttttcaataaaataacccacaaaaattgattatatattagtgtctggcaggtagtcggattactcaaatattaaccctcactcattcccagggctgacatctatccgatatgcctggaaatggcaagtcagctggcatctattaaattaagctgtggatgcactgattgatcagtgccatgtattttaggttgataaatattttgaatattttgaatattacatctaccaatcgtgtttcttatgcggaatctgttcaaagttatagtgccaggcagtatatattaacaaattggtaccttgtttatcaatttttcatgtacatgattaatgtgaatcagattccagaatctaatcaacctcagaatctaatcaaaatcaggctctcaaacttacatagctgagaattttttagacccaagataacctcatcatactataggaatcccagggagatgggattcaatatcatcctggatctgcccttaaccaccttaaaaacaatctaaaactcatggggcacctgggtggagaacaaaagcagaaatacccggttcactgtaagagcagtattccttttgttctcggaaggtccagacagcagtgaagctttcaccagttcaataagatgaaagaaaacagttaagaagttaatgagagttgtggtttttatcacatttataatattgtattaggttgttgcaaaagtaattgcagtttttatattaaaagtaatggattacttttgcaccaacctattagcaaattgttgtttttgcctcctcttcctctctttcaccttcctcgcccatccttgcaaatactcctacatttcaaggttcatgtgatataattgtatttggagacttagacctccaaggactttccagttcacctcctgggacatgttgatccatgtttggatccattctggcttctgatctctagcagccagaatggatctagcagctcactggggtgaatgaaggaagtcacaatgacctctgttggctgcagcctagatgagtgctcttcactatcccttgcatttccaattatcagtccttatgtttcatgtcttaggtaatactgaagttagtctaacctctcccacagtgcaggagtttggtctgtattgttacttgcagatggttgtgaccttttcatgataagcagctcaaaaccttcataagttaacctatttaagcttggaattctcttctccatatatataacaagttagtctcaagagtttctctcatgtttctacttccaggctttagaaaatacaagggggtaaaaccatgaggaacctcttttctccaaataaaggcttgcaaatgtgaaacaggttaaagcaaaacttcaagagttgaggtgcggtggggagtcactgaggtttcttccaggcttgcccctgaccacactgctgcagcgtaaggtgaggtactaagtacgtgcaaagctctgcaatgaagaattggtccaaggccacttccgctgctaccataccattccaggagcctgctctatattttagtgacatgagtcctgaggggaccttcggaaacagatgcaaagagagaaactttaacttgacttaatgagatactgaacacctcccagagccatgtctgtcttcttcgcaaggttgtgcctcccatcttccagtttttaggcacgctccctttctgattgctgtgttttgatgccggtccttccctgccagaaacagcctttaggctcagtctctgtaaagaactgctaggccttagtgccttggggtcattttcaacaaatccttagttgcatacatcacaaaactgattctcctgtgcttttttttttttttttttgagataatgagtaggaaaaagaaaaaaacttgggtttatttttttcacaatccttgacctccttgaaatgaaattcycatcagccagcacaccgatttcatgagctaagtgaaatggagagtttatgggaagcagatgtgaagccctcatcttgtgaaaaatctgctttggattcttttcttgagtagggtgtgcatgcagaagcaaattttctgaaactactaggcacaatctcccatggcagttctgaaagctggcacagtgtgcctgaaaaaggattagcaaaagcgtgacaaatctgggcagagctgcagaggcccgatctctgccctactcgtggcacagcctcattcccagttggcttggcagagctgatggtatgaaaggatgagtttcagcttgcatctagccataggatttaccacctgagtttgcagtgttggagaaagagaattttagagacaatggcaagaatgaaaccccaccctcaaggtttgtagtttactaaagtggagtgtaaatgagcagcattcaccctaatacagggtgtctagttatatcccactcagtaagtacaattgcataactatttatgctattaagaatgatttagcaataaacagatcctttcttcccttcttaaccttagggaaatacctatttaattttcagttactgagtgtttgacagtttaataagcacttccgcacttgtgctttacagcaagtcctgaagtgggtattattttctccctttgtgaaggttggagcatttagttttctcgccataagtgcctaccagtccctatggagcagatacctagctcttttgactgtagtgactctttcacttctctgctgtcattatgagactggagtgagaacacttctggacagggtccataacagaaagctgttaccgaagggcgaaggagcaaggctgtaggagagtagtgctgataacatgaccctgtaagcctcccacacttacagactcccacactcacaggtgctgcagagtatggacagggtaaccgactagtctccatttgcctgggactctcctggtttgggaactgaaaatcttgcatcctgggaaccccctcaattctgtgcacaccaatggctggtcaacacctgtgtggatcatattttgcctcttaggtttcatctaaatttctggtagcacttccaggttcaaaagacttagtcctcaaactcttaggaaattctggcggcttccaggacctcacagtcgattgctgcaagacagctttactgagtcaggactccgggacatttggtctcatgtggttccatatttaaatatttgagcaaacaatccataataataataataatccaagcagccaactggagtcaagttaataataatgacatctgctactgattatgaatcaggcagtatacttcagtgctttctgaccctcactaccagtcctcaggacacccatgcaatgtggttatcattagtcttattttatgaatatggaagctgaagtcatacatattcaagcaaggctccaggccctgaaccaagtgactctaattccaaagcccatattcctgtagtacacttttcaaagttcctctaagttcccctgtatcttgacctgaggaaattacagttgcatgggtgctttgaggtaatcattaaaggcttttgtaaactttgggagtaggaccaggctcacagtaactaggagattgagtaccctgagggttctggccccagaatttcatagaaatatggtgtttagaagaaagaagtcatctgttaaattctctaaacctaaaattaagacttagctgctatatatccaaactgacccattttttttattaccttccaagattcagcttttggcactttatcatccaatcaagtttcatggagactggattaggaccataagacttattcagatattaagcctcacatgatacattattttttgtaaaaaattttttagattaatatgatacaaagttttgccaagcccttaagagggagtttatcaattcagcgcttttgcatttatgctgtcaccacccatgtttgaactcattttcttttgttcataagtaaacaagtttttgtttgaaagtcgagactaagaatacctgtccttgtccacacctgtttaactttgtcttatagtgccagcaaacatactggagttcttcagcactactgctaaagcaatggtgcttactcacaagccaaatcaactggcaatggtttttcctggtggatttgatttggttaatgagttgtagtaacaaattctaattacaaattctgaatttgacataatatatgttaaattggatgtacatttactatgttatattgaaagagagatgtgtggaaaaaatgtatacttatttttgaaaagaaacttttgtttgtatctgaaaaataaactcttagcaaatttcatctctgggttgttaagagtccaggttctggacttcatagcttgaacagctttgtctgaagacttagaaaacctgcttcactggatcacttaacaaaagtaaaatatcctttgtgtaaagttttcttggaggtgatggtgtaccagtatgctgaccatctggtgtaccagtatgctgaccatctactgtcaaaaataacatctatactggacattctcctatcaaataatagatccagaagcttctggagccattgcaacttatattaagaaataatggtctgtaatggttaaacagctactcaagaagacctaggtacttgcccaagtagatgaaaaccctctggcattcgatagccagtatgcaggctggatttcaatttctcttgagcccctgcactgtgttacattggtgccgtaaacaaactgtacaaccatatgaggcaactctgtggttaatgggatttggagtcagatgataatttctctatgtgcagacacagaaagttttacttaactttctacacctaaaatacttagaaaccatagtcatccatattgatattttatatcatctcaacttctcttgcccaaacttgacctactgttgcaattattttacatttccttggctctgttttcatttatatttaattccagaaaccacatcaagtctttgcagaatgaagtagagcattaagaagtagagatgtacacacgcatctctaaaatcagccatgcctaggcaaagcagcttgcacttaaacacccaatacatttttcatgattgtgttgaagtgaagtaacctaacccgtttttatatccttcaaaataaggtggataggaatgctttcagcccttttcaatagctttgattatcttgtttttgttagatccctcctcttggtttgatcatagtagttactgtatttctttttataagttggtctgcaaagggtagggcttgcagaccattgcaaagttgtgacggctgtgagtcatattgctgaaggtggaactctgaagccagactatctatgtgaaggcacaagctgctgttayatacaacagagtgaactgagcatcagtcagaaaaagtctatgtttgcagaaatacagatccaagacaaagacaggatgggcactgctggaaaagtaagtggaacatttctgtcccctcctcatcatgayctaatgatgtgaggctgatacttagaactttgaatccattaaagtaattaaacacttggagatattccttgaggaatgaaatgcttggtgagcaggcatacagtgagggaaacactggatatggtgtttcagagaatgtcagtggaagcaggggtaarttggaaatagtatatccaatgtcagcaagacattggtggaaaatagagaaattgatttatattggcattattcataatttgatttccggatagctgggcaattgctccaggaagccaaatgtttccacaaggacacttcaatcgtctcagtagcatgtgctgcactygctgcagtagttcaatgggaaaccagggtctcatgcccagatgttggaagaaacgttcctgccattaagaatggaaaatgctaattctgggatgcaaaatggccaagaaagtgtcatgaattttaggtttcttacaaatgtaatttttatcaaaatatatatttaaaaattctttaaaatcaagactatattattggtaaagtatgtttatcgttctaaaaacaacagagttagcagagttggtattaactttagaaacagctttgctttgtttttttttatttgaaaataggtcagtatatttccttactttaaatgggtacataattgcttaaaggactaaatttttttgtttgttttgttttaacttgaacaattttgcatttagcttgcttaaggttttggaaaaataaagatgacatgagaagtctgggtaatgtgacaagtcaggagactctatgatgttagaatttgaaataagttttactagaattggatagaactggaataaaaccatcctaatttgggtcagaaatccagcaaaactagattacttgggaagttaattttgcactacagaaactagcaactctacccatggatattaatgaatcttagaactgaaaggaatcttaaaaatttgcaacttttaccacccaacagatgcttcaggtctggttacactatttctaggaagtcgatattcatccactgtaagaacatttctgatgatggagaaagtagcctcaaggcagcactttccaattaataatacagtatataatatataaagagtataaaagttatatgattttgatatatggtcatgcaatagtgtggtttgcctaaggattatatatttcccaactttctgtagtgttccagtgtagctcttgaaaggagtttccctttacattgggattgattttttctctttataataaatgttttctttttcattaaaaaagtaaaagataactgtattagtttcctagggcttccataacaaaatatcacagactgggtggcttaaacagcagaaatttgttttcttgtacatctgaaggctgcaattctgagattaaggtgtcatcagggttggtttcttctgaggcctgtgtccttggcttgtggatgaccctcttctcgctgtcttcacatgatcttcccttttcctaatctccccttctaataaagacaccagccatattggatcaggttccaccctgattaccacattttaaattaattacttcttgaaagaccccatctccaaatacagtcaccttctgaggtacggggggttaggacttcaacatacgaatttggagggagacacaattcatcccataccaatgattattctagaaaatttggaaggtcagaaaatatgaaggaaaaaaatcaatcataatatcacatccccaaactaccatttttgtgtgtgtgtttccttctatttttccatccatagtttatgtagctgtactcatacaatatacaaatattttatcctatttttccatcttaaacatttttcaatttataacaatttataaacatttttaaatgtctaatttctgcatttagcacaatttatttcatcattcctctattattgtttatgtattttcctttgtaaatagtgctgtgatgacatctgctatatagagaggtttttctaaaattaatatttcttcgaggtagcctttaaaaatggaattacatgggtaaacatgccacaacatccttaawtatcttgatgtaccatgcaaattactttctaaagggttgacataggtaagatggcccattttaccatttatctgacaatactgtgtattctcattaagttctcattaagtaaaaagtcattttcagagcatggtggcttgtgcctgtagtcccagctaactggggaggctgagatgggaagaccacttgagcccaggaactagagtacaatctgggcaacagagtgtgatattgtcttaaaaaaawttttttttttaattcattacagacttgataggcacagaattgtatctcatttttatttttttaaaaggcgtttttatgagtgagaacaaacatgtcacaatctattcattaatctgttgcagttttttccataggtcctttgcctgctatgtatctcccaggatgtaagtgtggtatgtggaagtgggaaggagtgttaggagtgaagttgttaacacttcctctgtaaatttgagtaagcattgtatttatcaaatgtggtaacttttatctatttaatattttccctcagtactatttgatgtcaatgtggaaaatttactatttctcaacacacaaaattttaattcttagaagctgtttcctttatgactttttttaacttttattttaggttcaggggtacatgtgcaggtttgctacataggcaaattgtgtatcatggggtttggtgtacarattattttgtcacccagataataagcatggtacctaattggtggttttttcatccttaccctccctccaccttccaccctcaaatgggccctggtgtccattgttcttttctttgtgtccataggtactcaatatttagcttccacttataagtgagaacatgtagtatttagttttctgtttctgcattcgtttgctcaggrtaatggcctccagctccttccatgtccctgcaaagaatatgatcttatttttttatggctgcatagtattctgtggcaaatatgtaccacattttctttatctagtctagcattaatgggcgcttaggttgattccatgtctttgctattgtgaatagtgcttccgtgaacatacgcatgcatatgtctttatggtaggatgatttatatttctttgggtatatacccaataatgggattgctgggtcaaatgttaatcctgttttatgttctttgagaaatggccagactgctttccacagtggctgaactaattaaccttcccaccatcagtgcataagtattcccttttcgctccaacctcaccagtttgttttttgactttttagcaatagtcattctgactgatatgagatagtacctcattgtggttttgatttgcatttctctaatgattagtgatgttgagtattttttcatatgcttgttggccataagtatgttttgttttgaaaaatgtctgttcatatcctttgcccagttttttatggcgttgtttgtgttttgcttattattttgtttaagttccttatagatgccggatattagacctttgttagatgcatagtttgcaaatattttctccacttctataggttgtctgtgtactctgttgatagtttctcttgctgtgcagaagccctttagttaaattaggccccttttgtcaatttttgtttttgttgccattgcttttggcatctttgtcattaagtctttaccaggtcctatgttcagaatggtattccctaagttatcttccagggtttttagagttttgggttttagatttaagtcacatcttaagttaacttttatgtatgatataaggaaggggtctagcttcaatcttctgcatatggctagccagttacctcagcaccatttattaagtagagcattctttccccatggcttgtcctttgttattttttctatcactcttaagcataaaagttactccatgctcagtatgatcaatatttacatcttcactgattgataaaatagtttgactttaaaaataaatcttgggccaggcacagtggctcacacctgtaatcccagctctctgggaggccgaggagggcagataacaaggtcaggagatcgagactatgctggccaacatggtgaaaccctgtctctactaaaatacaaaaacatattagctgggcgtggtggcacacacctgtagtctcagctactcgggtggctgaggcaggggactcactgaacctgggaggcagaggttgcagtgagcccagattgcgccactacactccagcctagcgacagagcaagattgcgtctaaaaaaaaataataaaaaaataaaaatcttaacaatgaatccagcttgaatttgtttgggaatgtggtgtgagatttctaacgtcaacattgggccatattacactgtaacccataacattttcattagtaaggcagagggtaaatattaaattgagctactgatggctttcagccgcccatctgttaccagtgtatcatttttcacatttaacctttttacaaaagagccacttaagaatccataagagctctctaggactgttgtgtttgttgacaagttgaaggtaacttattttgcatctgaacaaattaattaaaatattttataggagtcctagacagattgggaggtaggaaggtggaaacaatttctctatgtgtgtctgtctctgtctctctctctctgtcataattcaataatcttagcaaaaccatttaattgaataactacagcaaaaccagttgaacaactggatgccagtcactggtatctccacacctagtgtccactactataagatgacaagctttaacctgcctatcaagccctaccaggtgcaagaactgggctaggtgcaaatgggatgcwgagatgcagacacaaattcaatcatccaggaactcacagtcataatctgtatgcttcatgatgttcatggttctcttcatccttaccatgctaatagtctaatttcttcaccattgctatgtgattatatgcagctattaaatactggtttaaattcttacagacaagtcagcagcattttctgttttataaatttgtctcttgtgaataagcgatacacaaaggacaattttgttaatctattagatttgaaattgtaacaaaataacctatttttgggtgggggtgttatgtgaacagcaaacaaaaatcaataagttgggaaaagtacctcaggtctagtccagctctgcatgtcatgtgctaggtgaccatggatccatcatttagtcactctgggctgcatttctcatgccttaagcaaaggcacacacaagatgatttataaggcttataatactagtgtttgatgaaaatcattctggaaaacttaaaatattatatatgctcttctgttcatatttatactagtcagggagtctgtaagttaaaggcataattcagacccattataatacttgcytatttcttaggttattaaatgcaaagcagctgtgctttgggagcagaagcaacccttctccattgaggaaatagaagttgccccaccaaagactaaagaagttcgcattaaggtaagcgtgagccctagagaacttaagccaaaagcgttatcaaacttatattgaatatagcactgttgtgaggctggattcttaaataaggagrtgcttcccatgtttggagtattaattcctttactggctcttatatattgttaaggatctggttgtactcgatgtgaaattaatgagttcattatccttttaaaaaacaacagtgctaacatgctttattatacctttgatttgttgaatttttattcatatagtgtctaatttaaaatggttaataatcatagctaaagacttcttttaaaatcttctgggagtcagattgttttgaggttactttttgcaaagaatgaggaactymmttgtgcctggagaaatgacaacttcgtggaacgttttcctccctttctttggacagagcttaaccttggctttggacaccagttgttgagtaggcattgctaccaatctttctttgaccctcttactgttacctgagcacaacagtagcaggaagattttgctctttgcttaccttcttgcatgccatttcctctgttctttgttaagagagcccaataagggcctagctataaaaatctactttggggccatcacatagtaacatctgtattctggttccctcacaagagcaccaatttactacagacaggcaccaagattcaacctagggtataagggagcaatattataagttccgtcagagagggatcttgtctgatggttgatttttggctcagaatagtctaagagtaaatgttgttatattaggcaaagatattgattaaacaattataatttcttcaagaagttaaatattctcccaacagtgaaatgatcagtttgttgattggtgcaatgtttttgtctttgaacacagattttggccacaggaatctgtcgcacagatgaccatgtgataaaaggaacaatggtgtccaagtttccagtgattgtgggacatgaggcaactgggattgtagagagcattggagaagsagtgactacagtgaaaccaggtatatgcaggtgtcaaaccacaagtttgaaataattaggctttgattagcctatcaaaggaaatagcacacactaggaattattagagggatccttaacacaattcagggaattaaaaggatacaagaatggattttactgagtaatgtttaatttggcaaaacctcaacctttagaaggcraaccttacggtgtttataaaccttagaatatatttttaaaagttttacctatagtatgggctcaattcacatttgttaatttcatattttaacattaatgaacagcatcttatatcatgatttttttcctgtaggtgacaaagtcatccctctctttctgccacaatgtagagaatgcaatgcttgtcgcaacccagatggcaacctttgcattaggagcgagtaggtttcagtcatttttactttaatgtatttacatttktcctatgctaatttttgaattgaattaattaatacgtgtatttgatgtatcaaacagtattactggtcrtggagtactggctgatggcaccaccagatttacatgcaagggcaaaccagtmcaccacttcatgaacaccagtacatttaccgagtacacagtggtggatgaatcttctgttgctaagattgatgatgcagctcctcctgagaaagtctgtttaattggctgtgggttttccactggatatggcgctgctgttaaaactggcaaggtaagaaacagggtaggctagtttatttgttcttctttccttttcttaaatgatttgyttggaatcttgaagagttttggaaaaaaaaaaaacatttaaaagaatgtattgcatattcaggctgccaagcaacacaatgccaaatcaactaaaagaaaaataaaaaattcagattagaaattttatttcttctttttacacttgagaatatttattgactatatttgcaaactgcatcatttctccatctttaaaatataccccttccccatatgttaagtttgttaagataggacaatctcagtattttagttacagcagaggctttttgtcagagcttttactcctagtttcttgtcagctaagtaagatttattgtataactacaaaatacagtagtaagtacattaccaacttctcagaaaaaagtacaattttgtcagatcacctgttatagataatataaagagcaataaaatcattaatcattttgattaccacctataatgcgtatcagaaataaaatacagtagtgtttgttgcctattatcagtaatgctgttactgttcaccaaaactgatttctcagtatacatttttccatcaactgtgatgttagataggatccctggaattttaagttaatcacatgaaatttcacaagtaaattggagttcaaggaattaagaatctttgacctcttattattttgagatacgtcccatcaatacctagtttattgagagtttttagcatgaagsrttgttgaattttgtcaaaggccttttctgcatctattgagataatcatgtggtttttgtctttggttctgtttatatgcagattacatttattgatttgyatatattgaaccagccttgcatcrcaggtatgaaagcccatttgatcatggtggataagctttttgatgtgctgttggattcggtttgccagtattttattgaggatttttgcatcaatgttcatcaaggatattggtctaaaattctcttttttggttgtgtctctacccagctttgatatcaggatgatgctggcctcataaaatgagttagggaggattccctctttttctattgattggaatagtttcagaaggaatggtaccagttcctccttgtacctcttgtagaattcggctgtgaatccatctggccccggactctttttggttggtaagctattgattattgccacaatttcagatcctgttattggtctattcagagattcaacttcttcctggtttagtcttgggagggtgtatgtgtcaaggaatttatccatttcttctagattttctagtttatttgcgtagaggtgtttgtagtattctctgatggtagtttgtatttctgtgggatyggtggtgatatcccctttatcattttttattgcatctatttgattctcctctctttttttctttattagtcttgctagcggtctatcaattttgttgatcctttcaaaacaccagctccatgattcattaattttttgaagggttttttgtgtctctatttccttcagttctgctgtgattttagttatttcttgccttctgctagcttttgaatgtgtttgctcttgtttttctagctcttttaattgtgatgttagggtgtcaattttagatctttcctgctttctcttgtgggcatttagtgctgtaaatttctctctacacactgctttgaatgtgtcccagagattctcgaatgctgtgtatttgttttcattggtttcaaagaacatctttatttctgccttcawttcgttatgtacccagtagtcattcaggagcaggttgttcagtttccatgtagttgagcggttttgagtgagtttcttaatcctgagttctagtttgattgcactgtggtctgagagayagtttgttataatttstgttcttttacatttgctgaggagagctttacttccaactatgtggtcaattttggaataggtgtggtgtggtgctgaaaaaatgtatattctgttgatttgggctggagagttctgtagatgtctattaggtccacttggtgtggagctgagttcaattcctggatatccttgttaactttctgtctcgttgatctgtctaatgttgacagtggggtgttaaagtctcccattattattgtgtgggagtctaagtctctttgtaggtcactcagggcttgctttatgaatctgggtgctcctgtattgggtgcatatatatttaggttagttagctcttcttgttgaattgatccctttaccactatgtaatggccttctttgtctcttttgatctttgttggtttaaagtctgttttatcagagactaggattgcaacccctgcctttttttgttttccatttgcttggtagatcttcctccatccttttattttgagcctatgtgtgtctctgcacgtgagatgggtctcctgaatacagcacactgatgggtctcgactgtttatcgaatttaccagtctgtgtcttttaattggagcatttagtccatttacatttaaagttaatattgttatgtgtgaatttgatcctgtcatgatgatgttagctggtyattttgctcattagttgatgcagtttcttcctagtctcgatggtctttacattttggcatgattttgcagcagctggtaccggttgttcctttctatgtttagttcttccttcaggaactcttttagggcaggcctggtgctatctatgacaaatccacagccaatgtcatactgaatgggcaaaaactggaagcattccctttgaaaagtggcacaagacagggataccctctctcaccactcctattcaacatagtgttggaagttctggccagggcaattaggcaggagaaggaaataaagggtattcaattaggaaaagaggaagtcaaattgtccctgtttgcagatgacatgattgtatatctagaaaaccccattgtctcagcccaaaatctccttaagctgataagcaacttcagcaaagtctcaggacacaaaatcaatgtacaaaaatcacaagcattcttacacaccaataacaaacagagagccaaatcatgagtgaactcccattcacaattgcttcaaagagaatgaaacacctaggaatccaacttacaagggatgtgaaggacctcttcaaggagaactacaaaccactgctcaaggaaataaaagaggatacaaagaaatggaagaacattccatgctcatgggtaggaagaatcaatatcatgaaaatggccatactgsccaaggtaatttatagattcaatgccatccccatcaagctaccaatgactttcttcacagaattggaaaaaactactttcaagttcatatggaaccaaaaaagagcatgcatcgccaagtcaatcctaagccaaaagaacaaagctggaggcatcacgctatgtgacttcaaactatactacaaggctacagtaacaaaaacagcatggtactggtaccaaaacagagatgtagatcaatggaacagatcagagccctcagaaataacgccacatatctacaactatctgatctttgacaaacctgagaaaaacaagaaatggggaagggattccctatttaataaatggtgctgggaaaactggctagccatatgtagaaagctgaaactggatcccttccytacaccttatacaaaaattaattcaagatggattaaagacttaaacattagacctaaaaccataaaaaccctagaagaaaacctaggcattaccattcaggayataggcatgggcaaggacttcatgtctaaaacaccaaaagcaatggcaacaaaagccaaaattgacaaatgggatctaattaaactaaagagcttctgcacagcaaaagaaactaccatcagagtgaacagacaacctataaaatgggggaaaatttttgcaacctactcatctgacaaagggctaatatccagaatctacaatgaactcaaacaaatttacaagaaaaaaacaaacaaccccatcaaaaagtggrcaaaggacaggaacagacacttctgaaaagaagacatttatgcagccaaaaaacatgtggaaaaatgctcaccatcactggccatcagagaaatgcaaatcaaaaccacaatgagataccatctcacaccagttagaatggcaatcattraaaagtcaggaaacaacaagtgctggagaggatgtggagaaataggaacacttttacactgttggtgggactgtaaactagttcaaccattgtggaagtcagtgtggcgattcctcagggatctagagctagaaataccatttgacccagccatcccattactgggtatatacccaaaggactataaatcatgctgctataaagacacatgcacacgtatgtttattgcggcactattcacaatagcaaagacttggaaccaatccaaatgtccaacaatgatagactggattaagaaaatgtggcacatatacaccatggaatactatgcagccataaaaaatgatgagttcatgtcctttgtagggacatggatgaagctggaaaccatcattctcagcaaactatcacaaggacaaaaaaacaaacaccgcatgttctcactcatagataggaattgaacaatgagaacacatggacacaggaaggggaacatcacactctggagactgttgtggggtggggggaggggggagggatagcattaggagatatacctaatgctaaatgacaagttaatgggtgcagcacaccagcatggcacatgtatacatatgtaactaacctgcacattgtgcacatgtaccctaaaacttaaagtataataataataataaataaataaataaaatagatctattttattagaaaaaaaaataaaataggtctattttattagaaaaaaaaaagaatctttgacctaatacattattaaaagaaaaacctttatcaagaaatgcaattgaaaatgaagtttctagatttaatttttgtttcttccacatctccttctgattcaaatttctaaaatttatatttgtatctaaatttatttacaaatgactcagagttatgattttttatttcttctattaaaaaatgggatatatgtgcagagcgtgcaggtttgttacacaggtataygtgcgccatggtggtttgctgcatctgttgactcgtcctccaggttccctcccctcaccccccacctcctaacaggccctgatgtgtgttgttcccctctctgtgtccatgtgttctcattgttcaactcccacttatgagtgagaacatgtggtgtttggttttctgttcttgtgttagtttgctgagaatgatggcttccagcttcttccacgtccctgcaaaggacatgatctcatttctttttatggctgcataatattccatggtgtatatgtactacattttctttatccagtatatcattgatggccatttgggttagttccaagtctttgctattgtaaatagtgctgcaataaacatacgtgtgcatgtgtctttgcagtggaatgatttatattcctttgggtgtatacccagtaatgggatggctgggtcaaatgatatttctggttctagatccttgaggaattgccatactgtcttccacaatggttgaactaatttatattctcaccaacagtgtaaaaagcgttcttatttctccatagcatcacgagcatcgattgtttcctgactttttaataatcgccattctgactggcatgagatggtatcacacggtggttttgatttgcatttctctaatgatcagtgatgttgagcttttttcatatgtttattggccacataaatgtcttcttttgagaagtgtctgttcatatcctgtgaccacttttggatggggttcttcattttttttcttgtatatttgtttaagttccttgtaaattctgcatattagacctttgtcagatgagtasatcacaaaaatctcctcccattctgtaggttgcctgttcactctgacgatagtttcttttgctgtgcagaagctctttagtttaattagatcccatttgtcaagtttggcttttgttgcaattgcttttggtgtttttgtcatgaagtctttgcctatgtctaagttctgaatggtattgcctaggttttcttctagggtttttatggtttggggttttacatttaagtgtttaatccatcttcagttaatttttgtgtaagatgtaaggaaggggtccagtctgagttttctgcatatggctagccagttttcctagcatcatttattaaatagggaatcctttccccattgtttgtttttgtcagatttgttgaagagcaaatgattgtagatgtgtggtgttatttctgaggcctctgttctgttccattggtctatatatctgttttggtaccagtaccatgctgtttttgttactgtagccttgtagtatagtttgaaggctggtagcatgatgcctccagctttgtttttttggcttaggattgtcttggctatatgggctcttttttggttctagatgaaatttaaagtagtttttttctaattctgtgtagaaagtaaatggtagcttgatagggataacattgaatctataaattactttgggcagtatggccattttcacgatattgattcttcctatgcatgagcatggaatttttccatttgtttgtgtcctctcttatttccttgagcagtggtttgtaattctccttgaagaggtccttcacatcccttgtaagttgtattcctagatattttattctctttgtagcaattgtgaatgggagttcactcatgatttgtgtttttaactggaggcccttttcaggtttcactttttgaccctaacacctaacatgttcaagaacattcctctccacaggtcaaacctggttccacttgcgtcgtctttggcctgggaggagttggcctgtcagtcatcatgggctgtaagtcagctggtgcatctagratcattgggattgacctcaacraagacaaatttgagaaggccatggctgtaggtgccactgagtgtatcagtcccaaggactctaccaaacccatcagtgaggtgctgtcagaaatgacaggcaacaacgtgggatacacctttgaagttattgggcatcttgaaaccatggtaagacccaaaatttgagaagccacaaaatacccaagttattagayatgcacaaggtaaatttaattgtctataactttattaatagtcaataatggaaatatctctgcgatagtcagttttactcaggcaaaaactgataatcacatagcaattttgcctaaaawgtcaaacacttaagagcaggttcactggaccaaagttaaataccatatcataccactctcagctgactagatggcaaggtagtcaacccttctagataattgttttaagtaggatcttccttgtatatgtagatttcttggygaaagcaattctgtctcttgaatgtcagcaaagtaagcatcagaaggtgactgaggagaggtgaaaagggattattccaaatgttgtggtctattcccccaaatctgtgatccatcgaccttctcactctttacatctgagctttgtttgccctcatctgaattcccttagaatatgaaccttcaattttctaaccatgccacctgtatggcagcccgcagcaccagaccttcagttagacctgtaaaacagatctgagattcctggaactagaaagytccaacctggcatagcgtaaagagactwggaaaaatggaataaagccacttttgctcaagattgagtggcagattaactcaccttaatgcttttggtaatttaagaataaatagtccttaatttatcattgctgtcatatttctttcctagtgaatcacttagatttatttcatatcaacaaatagcattctaggtcataagtttttgaagccatatgtgatactggatatatcattagagcctactgatttccagttgctacttgatgaaggctggtctctaaaaacaatgccatctgttgctccaatctagcaagtattaaattattgcttaataactggatgggttaatgaccagaaaatgtgaggttagtctcagaaatgctcccaagaaaagggactcttttgtcccacattttagtattttatttaattttaagactaaacttaaaaaaaaaactacgctaaatgatttggtatacttaattcaatttagtttggttcaaatggctttctaaggcttatctgaagtggtgatattggtatgaaaatatcacaagaatttcccttgtattttagtscatggtacactaaaaatgccacaaacactgaccacattgattgctgtttctgccttaaagggcaaatgtgtatagaaatttaattaaggactaaagttgcactgaaatttttttaaagcaagtaaaaaacaaggtggcttaatttaatttcatgacytkgtcatagtacataggtcatttcagagcttatgtcacactgtaagagacacaggaagcaaacgatctcctccgttttaaactcagattgatgccctggcatcctgccacatgaactatgggaccagcgtggttgtaggagttcctccatcagccaagatgctcacctatgacccgatgttgctcttcactggacgcacatggaagggatgtgtctttggaggtcaggaaagcaaagcctctggatggggagtgatggctttcactctggtgcttggcaagtgggagaagcctgtttcctcaggcctttcttccaagaatgagtatgaagtgatctaaaatggaactgtgatcataataacacaaaagataattctccactcctcaccttgatgtaggactaatattggtggacgcatttttaatattaacatctgcaactcaagttccccaaaggcctgaatgagagacaccagtagtgtttctatagggatgaattatgtaacaggaagttccgatttaatccattattattaatatacacaagaatgtgtattaaagtgaatttattcrattcataatagcaccaacaaaaatcctggacccaaagccaaaaccaacaacaacaacaaaagggattgtcacattttatgggaacagttcagattcacactggaaggacttagattatcactcaacaattaatattgttttaggagagatggagccagggccactctgctcaaggtaggtgacacagtgagtccttytttttccctccttcacaaagtctcgttttctagtgccttcatacagagttgtactgggtgctttgaaggtactcccaatattagagtctgctttatacaatataagagaatagtaactattcaagtacttgttaagagtataaaaaggagaaaatgattgttcttcacttagagaagtacataatgtagcgaaggatacaaaaacaaatataaaagaaagaatataaaaataagtgcagctataaatattataaaacaaattataagaggagttttttagcatttattctatgttaaaagttttacattaatgtgtttgaagtttattttatttctcagtaactctctgaggaagctacttaatgaataataaaactgagacttggaactattaagttttttgcccctatagctctcaagttgagaactgagatttaaagctggtccatgggagaacaaagtttttcctctttctgcaacattacttggggcataaaaaagcaagaggctagttggtatggatgaggttttatagagaaggcttttyagggaaaatgaaacttgaagaacaaaacaataagagatataagaagttgaacctccttgctttgactatttgtgggaagtgggaagattatagattattcaggaatattagaggtaaaattcagttattcagcaaatatttgttgagtgtatactgagtacaggtaccattgtgtacatagtgtaccattccaggagctaggaacggagaagagacaaaacataccaagtccctgatctcaggaagtgtgagaatcctctcactttggtatagagagactgacaataaataaatgaatgcagaatataccataaggttacaagtgcaaaggataataataaaggatgggtaacgggcagtgccagaggactggggtggaggtggaggtgaawgctattttataaagttcaaggaaggcctccttgataaggtaacattggarcaaaaacataaataagatattcagaaatcttgggaaagaatattccaggaaggagacgtagtaaatacaacagggtgttggcaagaaccataagaacggggaaaaggtcagtatggctacaacagagtgaggacagaagaacagtcacagctggggtcagaggaccttaaattatatggggcctttgggccattgcaaggttttaggagtttattctgagagagaaataaaaccacagaggcttctgagggaggtgtcacctgayctgacttccattttaacactctccttctggctgctctatggggaatactctaaatggggcaaagggcacaagcagggagascatggaagaagtcattataatgctggaaggaaaggatgctggcttggagtgatggggctggtgagaagtagtcagctcttggatacattttgaagatagagtcaacaaaatttgccgaaatagttattgtatggcaaaaagagtagcatccaagatttttgggcctaagcaacaggaatcatgtcaccatcatcatttattgagaaggaagactatagaaggaatagattgggggctagggtggaagtggtagaaaccaggagtggtttggggcaggttacacttgtgcaggtacctgtgagatacctgaataaagatgtctataaaatgtaggcaattggctatgagtctgtagtacaggtagaggtttaggatgggtatagaaacctaagtattttaagaggagtatatcgaaagccacaagaccagaggaggtcaccctagaagtaaatgtagataaagaacagaaatggaccaaggaccaagccctaggaatcgttggagttagaggtctgggagatgtagaggacccagcaaagatctgtggaagaagtaactagtgagcaaggaaagtgacaatgatgatgacgatgtagtatctagaagctaagggaacagagtgtttcagaaaaggggagccaccaacagtatcagttatacctaacagttcatataagaggaggactgagaaatgacccctgtctgggtcaaaatggagctcaaagatgaccttgatgatatccattacaggacagtgctgggggcaagagcgtaatcagagtgggctcagagagggtgagaggaaaggaacaggatccagaaacagtgaactgaagacaattctttctgtaaagtaaagaagtttctctgcaatagaagcaaagatatggggtgactggaaggagatgtgggtatcagaagagtttttttaacctttgtttctttttaatttaatttaatttttattttactttaagttctgggatacatgtgcagaacgtgcaggttcgttacgttggaatacaagtgccatggtggtttgctgcacccatcaacccatcatctaggttttaagccccgcatgcattaggtatttgtcttaatgctctccctccccttgcctgccacccaccgacaggccctggtatgtgtcattcccctccctgtgtccatgtgttctcattgttcaactcccacttacgagtgagaacgtgcggtgtttggttttttgttcctgtgttagtttgctgagaatgatggtttccagcttcatccatgtccctgcaaaggacatgaactcattcttttttatggctgcataacttttgtttcttatgctgggacaaatacagcttatttgtacactgctgggaatgatctaacacagggaaagtcatagtgcaggaaagagaaggaataaatataacataataaaagataaggattatttagtaatgtctaaagagaaaatgtgtgcttatttgcaggtttgaaaagcagagatgatgtcccaaaactagtgactgagttcctggcaaagaaatttgacctggaccagttgataactcatrttttaccatttaaaaaaatcagtgaaggatttgagctgctcaattcaggacaaaggtaactgtttcttatgatgatcttgtctcttctccacaggctacttttaaaatttagtacttataaatgtgcctgttttcttcatattttatttctaattatttaatctagccagattgatacagctaattacttctctttacccactgcattagtgtattttcatactactataaaaaaaaaaaactgcccgagactgggtcatttataaagcaaacagattcaattgactcacagttcagcatggctgggggcttcargaaacttataatcatggtggaaggcaaagaggaagcaaggcaccttcttcacaggctgcaggaaggagaagtgtcgagcaaagcrggaagagccccttacaaaaccatcagatcttgtgaaaactcactcactatcatgagaacagcatgagggaaactgccccatgattcaattacctccacctggtctctcccttgacatgtagggattatagggattataattcaagatgagatttgggtggggacacaaagtctaaccatatcaccaayttagtatgccattgtactatattaatcaattttttaaaatcttttggattttgtttacctagttgatttcattgtggctatttttatttcatcataaagctgctatttatttcaagtargccacaaaatttccttattttacagttttcaaagtgctttctcaaatgtgcattattcagatccctgtaagccaggtattatttttaccatttttagatgaagaccaakgttgtgaaagcaaataaataactggtcaaacctcctggggtagtgccaggatataaactaattgcaaaacttgtgctcttttgaccatataacaaacttctctgacagagcttggcaagctttgggtaaacatgggtgtgatgattactactcttgttgcttctgagggttgggcaaggatagaggtcaagtatgaattcatgcaaattttatctacaacatctacctcatggaggtctcaaacagcaatcaaaaagcctgtctacaagatgaaatgactttcactcrttgggcctataaataattattgagcttccactatgtgccaaggacgtggatttcattagtaaaaggaactgtatattgagatccaaatttttactaatttttttttttacctgagagatttttcaatgttgtgtcttgtctccacatttggtctagcctacaggatcatcatattatgaacatacatttttttaagcaagtaaacaatgggattttgtaagaaaaactgtcagaaccactcagtactactttactcagataagcaaaactaacagcttagtatggcctgcttggaaaataattactatttgttttccaaagaaacataaattctgctttcaggaattttgcttcaaatatcaccttaaagcagggacatccaaactaacatttgtaaacctaaactcttcaatttccacctacttcctgcacagctctatttgaatgtcccacttggaaatattttttcgccagtaatttttatctcagtcattatattatgcgttcctcttttatagatgagaagccatagcatcatgtctgacttctttttcactcttgcctaccacatacaaaccaattctaagccttgatgatgcaacccttgatttctccttcagaatccctcatctcattgcccacgctcattgctttaattcagtctaatcatttctgacatggacatggtagtgagataataggttttccaccttctgtattaaaatacattccagttagtctttcactaagctgccaagctcaagttttgccaaaatgccaatgtcttagcatggttttgaaagcctttattattgaactaaaacctattttgtttcaacagttaagaatttggcattcattctatcaccctctgcagcaggcttttgggataaagtgagggaagtaggtctcatctacttgcaggatctcttgggcacccagaaatctaaacatattggattacctttcctgttcacatgttcctaggcttgttcatgctttctcctcaacctggaaaccacttccctcttgttggcatactgaaattatactgatgctttcagaattagctcagatacccttatcagagttgcgtaacaaagaaaactaattgttaaggactttgagcccagaggwtttccaataacagaatttacttgaagtttctatgacagatagaaaggacaattgtttaaactatcctttcttgaaagatatgaaaacaagtcattaaaaactctcattttacatttcagcattcgaacggtcctgacgttttgagatccaaagtggcargaggtctgtgttgtcatggtgaactggagtttctcttgtgagagttccctcatctgaaatcatgtatctgtctcacaaatacaagcataagtagaagatttgttgaagacatagaacccttataaagaattattaacctttataaacatttaaagtcttgtgagcacctgggaattagtataataacaatgttaatatttttgatttacattttgtaaggctayaattgtatcttttaagaaaacatacacttggatttctatgttgaaatggagatttttaagagttttaaccagctgctgcagatatatawctcaaaacagatatagcgtataaagatatagtaaatgcatctccyagagtaatattcacttaacacattgaaactattattttttagatttgaatataaatgtattttttaaacacttgttatgagttaasttggattacattttgaaatcagttcattccatgatgcatattactggattagattaagaaagacagaaaagattaagggacgggcacatttttcaacgattaagaatcatcattacataacttggtgaaactgaaaaagtatatcatatgggtacacaaggctatttgccagcatatattaatattttagaaaatattccttttgtaatactgaatataaacatagagctagartcatattatcatacttatcataatgttcaatttgatacagtagaattgcaagtccytaagtccctattcactgtgcttagtagtgactccatttaataaaaagtgtttttagtttttaacaactacactgatgtatctatatatatctataacatgttaaaaattcttaagaaaattaaaaattatataaaatgttttgtggtgatatatttttaaacaggcatatgttgttattaagcttttatttgttataaacaaagtgttgaagcgcctgaaaacataaaaatactttataagacatataagaagttgggtggtcatagcagaaattgaggcttccaatgttagggcataatatagattggacacttctaccatggtaaattgcaaaatgtccaggtatttatgaaccacttttacatgatgaatatttcccagtgaaaagtggcatgaactcgaggagtaaaatttcctttttcttttaccagtttgtcaatctaggcttaatctaggtttaaaaaaaatagctgaaaagtgtaaataattattttgaagtatcttcatcatcagctgagtttagctatggcaattctcaaaacactatgaatatttacagcttataagaattatatttttatgtatacatatatatatctatatttatgtcaataaatagatacatagatagatgatagatagatagatagatagatagatagatagatagatagatgatagatatagataagtatagaaaatctctatccaagaatcatttggagacatttcctctgtccattagcaatatctgtagctaggatctcagaatccattaaggaaggaaaactgccccccaaaaaagcatttttaacaagaaaaatatgtagaatggattaattcctttatgtctcctgcctcaaattttgaaaaacatgtaaataaggatactaaaagtaatatgcaaatataggtacatcaaaagaaataaatccaagaaggaataaacacatttatattctcagatcacagctttttaaatgaaatccactttatgcttagataaaattatattttgacaaatatgctgcatatgtgacaattttatttatttaatatttattatgatactttgtggaatcattcctcatgtctgagcttgtcatggccaaataatgaacagaaagaccttctactatctttctcagggtaacctgcacatgaatagcattttgagtcatcagaaaacactggttctaagaagagatcaggaaatctgattatttttgcatatttcttatttctggtcaatgaaaccacaaagcattgtcaaactgagttcttgaatataaatcaaaatataagtaagcaataaatagctagaggaatgctaaaagaaatatccagcttcttctttaaagaatagtctagacttctaatcatttaactgatatgtggagaacattcattgggcaattttttttttaatttcaaccagtattaagcactgagctaggtgtttggtatacagtaatgaataaaacagaataatgaatgtcctttggagcatatggtctagtagtgatggcagctcctctctgctaggaactgaacactcttcgggacaccctggctgcagaaaggagtgacacactgcaggtctcctctgagctgttctatcactcaataaagctcttcttcaccttgctcactcttcagttgtctgcatacctcattcttccagttcgcaggacaagaacttggggcccaccaaatagccgggctaaaagagctgtaacaccaacagggctgaaacacgccccttgctcaccatgttgtgggtgacaaggagagaaaagagatggagagaagagctgcgaccctttggggagcccagacctaggagctccctaagccaggctgtaacaccctctttggaactctatggttcctgatgtctccaagcttccaggcaccactgcattcttggtgtcagctgtggaagctgcttatggtatgcctggtccagccacagacttgcaggaagcgggtgctcatgccagcacctggagctgcccaccctgctgcagccagcatgcctggctgtgtgcagtggccagaccccatacttcctcacacacccctcatcactccatgacgggctcacccttggcaggtgtgggacccagaccagtagcatgagctgagcatagcctgccaggccgagtgggccgaatgagcccagcaggccagagcaaaacatgagcaaaggcgccactggccacagaggtttctggctggcaaagtgacaccccaaggatcctgtaacagtaggagatttaataagtaaataaacatataagtatattacttcaatttttgataaatgataaataaggcaatgatcaaggtgctgtgttagagagaaaaaagaggggaaacaggaaggtatttccagctttccataaggtacttgaaggcctctctgaggaggtaaatttaagcttacatggaaggataagctagagccagttctgtgaagagaagagaaaattatctcaggcaaaggaaaaacatggccaaaggccattaatttgggaaaagcatacccatttattgttgggaactataaaagggccagtgtagctggtatttgctgcaaaacattaatgatattgtttaggttcacgaagctgaaaaagatgctaaaaccttgtggacatttttatacatttacctcaataatcagcttccttatgtatatttcccaaagataatgtgatttgattagtgccaaaattgatatgaaattattttaatttagaggaagaaaaggactatatagaaatagcattcccaagagtaccctcttgcccacgacttcaactccagtctctgcaaagatttctttcaccagcaatttcttttttgtttctcattgctatttacatctaaaattatttatatttttatgtaataagtaactaaccaaggccccataaactagtttatagtattcatcttcttcatgcataggtatttgtccatttttttattccttactccctcacagagttagattcccttcattaaggaaaatctcgattacctaggccaccagctttaggttccagtagttctttccaccatgtatctgactttgtctgttaccctatagggtacagaaaagtgacggatgccttcactgaaagtccattccgttttacatgtaaagtgtcagaagataagaattatgttctaagttctttctcaaaacagtacctagtattaatagaacgttttgtgcccaatggacactacgcaaacattcttagctgatttaacaattgaattgagaagattatgtatttctggctgtgtcacgtgtccagctcattaaatgcatcttcatgttagccaaagaattgagtgaaataataaagcatgtttttggcaacagctctttcaggtagtcaaatttttaattttaaatttggatttatttttctgtttggtaaaccaatgagacttacacttcagattcaagtcaacattttaattaatgtttactagcattaggacaaatacctaatgcatctggggcttaaaacctagatgacgggttgataggtggagcaaaccaccatggcacatgtatacctatgtaacaaacctgtacgtactgcacatgtatcccagaacttaaagtaaaatttaaaaaaataataaggcttacttgaatttgcaatggtatatttgaaaaaaaaaatggatatgttgttttaatttcactagcattttacaaatttcaatgcaagttttggcaaagaaccacatagttacataactacctggcatgcatcattttagtactatttattcagaaaggccttttataaaacaaactttcctgccaaaaaataggaagtacaaatattgtactctgattgtgtattacaacttgtcaaaagtgtgatgtggtgacctaattcaggaggcctgggtttgattacaactctacctccaattaaaactcacagtagctattttctgaagtctgatatagcattctcaaaggttctaactagaatgaggtttcttttttattattaataacttttctgtacctactatggttttgagagggtttctgaaattgtcataaaattggttattggttttcctttaccttccaaaagaagactgaggggtgtctccctaaggaagaaaaggtgctaaagcacttgcaatttgctgcttcaaactaggagacttatctagtgcatttgttctagaaaattagaatcatagacatagtctctcctggaagacactgaaagttctaggaagcacttggctacatttgaaagaaacactcaaaagagatagcttaatcgaagatgaaatccctcggaagaaacaagagaggactcggttctaggacctcagtcccagcaccatcaggaaaccttattttatccctatctgcttagaggatgcttggtatggcagaattctaatcctactttggggtgttgtccctttgaaacttaaaagtattgaaacaatcaattctctcttcctcttccctgctagcttgttgccctagttcattcctttatctcttgcccatattcctgcaataaccaccgaatgcatgtccctgcctactgtagaatggccttggaattaatttgaatggcttattcaaatcccccaatcccacccatgggaatgctaaattcagcactctcttcctctgtgctttaaatacaaaaaggatttttgagagcaaaggagaaagcagcatcacactcattctccactgatatggttaggctttgtgtccccacccaaatctcatcttgaattataattcccataatccccataatccctatatgtcaagggacagaccaggtggaggtaactgaatcatggggacagtttccccatgctgttctcgtgatagtgagtgagttctcatgagatctgatggtttcataaagggctcttccttctttgctcttctccttcctgctgccttgtgaagaaggtgccttgtttccactttgccttctgccatgattgtaagtttccaaagccgtgctgaactgtgagtcagttgaatccctttcctttataaattacccatccttgggcagttctttatagcagtgtgagaatgaactaatacatccacattctctcacttcaagccttagagcaggatacctcacggtcccagcatggacaggatgtgtagaatgtagaggagatgctctgttcattgtgaccagctctgcttgagccccagcagattcttgttcatgtaggagagaggggaatagaccaccacctgaaaaggatggaggtaatgccaaacacctaggcgtaggttttatctctgccctccttctttccatcagagcaggaactctttcttattcctccgttttctttaagaagaaggatacttatctttcattggcttgtttctctcttaaaatcaaggcagaggattcagggtctaattaccatggatttacctccattatcattcattggagacaagctcggttctaagcttagttctactttgggaattacgatattcttctggtgagatttactgagtttcaaaatgtttactcagtactcaccaaaaacatggtctttgtgacttaatttttcatttttctttagaaaatcaccaatacttaaagagaaattttgctatcttcttgtctttcttcaggataattacaaagagaacttcaagaaatttcacataccttgcctcttgtcttactcccttcagatatagctttcccactgtccccagactgtaatatccaaaaggcaaatctgaccatgccacttctgcttaataaatattcaggggctttactttgcctccaagattattaataggcatcaagggcccctcgagatgggttcccattgctccctgcactacccaacattctcagacaacattaaaatgctgcgcacaccatgcagggttttattttctttcttgctttctgtcttgctactcctcctccttgaatattctctcatccttcccctttgtcttggcaaattcctgctcattttttagggtttagttttatcttcactcctccagaatatctcctctgatctcaatgtgtctgctgtctctttg

SEQ ID NO: 96078 - DNA, 37145 bp, Homo sapiens
  misc_feature (1)...(37145): n = A,T,C or G
gggaggtgtttaacggcactgtggccttggtctaacttttgtgtgaaataataaacaacattgtctgatagtagcttgaagtagttttcatgggctttgttattcttggggaactgaccttttcctccctggtttcttgcgtgctcggtaggagaagtggtgatagggggttggcaggagctggtctgtttgagaatacagaaggtgagcttttcttttctttttttttttttttgagatggagtctcactctgtcacccaggctggagtgcagtggcgtgatcttggttcactgcaagctccacctcccaggttcaatcaattctcctgcctcagcctcctgagtagctgggattacagaagttcatcaccatgcccagctaatttttgtatttttagtagagatggggtttccccatgttggccaggctggtctcgaactcccgacctcagctggtccacctgcctcagcttcccaaggtgctgggattacaggcgtgagccaccgtgcctggcccaggaggtgagctttaagtagctggtgggcgaatatttgtgttgaaccctgcttgatgcaattctcgactttatggaagatggggttgccctgtttggtggaaatgagcagattctggggcaaaatttgtattttctgtccagtgactattagggactggagtgaaattcttaggttcaaattcctgctacaccactttgaggttagtcacttaacctctctgaggctccattttatcactggtgacatgaatatagtgatacctaactcacctatgtgtcctgagaagcaaacaagatgcaagtgaaatgccaacgccatacacagttagcacctattatgcaaagaaggagaccagtgttttgtgattcttgtactgtcgagtcacctcatctatgtcatccctgtgttgagggggtgtttccactatctgagggtcaggatggatttcactgaggtctgtccagctctaaaacccaagccctttctatggccctaagtcaagaaaatactaaatatgtagcctcccaatctgggaaagtgaaaaaccttttgctgaaagtgtcctgggcagagcatgggacaagattttttttttttttttttttttttttttgagacagggtctggctttgtcctccacactggagtgcagtggtgtgatcttggctcactgcaacctccacctcttgggcttaagccatcctctggcctcagcctcctgagtagctgcggctacaagtgcacaccaccatgcccagttaatttttgtattttttttttagagatggggtttcgctatgttgcccaggctggtctcaaactcttgaactaaagtgatcctcccaccttggcttcacaaagtgctgggattacaggcgtgagtcactgtgcctggccaaggtgtatttttttttttttttttttttttgagatggagtctcattctgttgcccaggctggagtgcagtggtgcgatttcagctcgctgcatcctctgctgcccaggttcaagcaattctcctgcctcagcctcccaagtagctgggattataagcacatgacaccgcactcggctaatttttttagttttagtagagacagggttttaccatgttggccaggctggtcttgaactcctgacctcgtgatccacctrcctcggcctcccaaagtgctgggattacaggtgtgagccactgtgcccagccaaggtgtttctttataggaccagtacctaaggactggaagtcaggagacctttgtcactagtctgactatgccacttcaaggctcattttgttcactggtaaaatgagaacaatacacatacctctcacagctggtgggaggatccagtggtgtccaaacaccagtctgtgcatggtggcatcagaattacttggagatacttaaccacagaatccagggctccacctgggatggggctctagaatttttttttttttttttttttttttgagacggagtcttgctctgtcacccaggctggagtgcagtggcgcgatcttgactcactggaagctccgcctcccgggttcacgctattctcctgcctcagcctcctgagtagctgggactataggcacccaccaccatgcccggctaattttttgtatttttagtggagacggaggtcacaggtttcaccgtgttagccaggatggtctcgatctcctgacctcgtgatccgcccgccttggactcccaaagtgctgggattacaggcgcgagccaccgcacccagcctagaatcagtatttttgaaaagtaccttaggagagtccaacgcgcacccaggtccaggagcacgtatggtcacgtatgcaaagcataggcattcaaatagcagctggagctgggcacggtggctcacgactataatcccaacacttttgggaggctgagacaggcggatttcttgaggccaggagtttgagaccagcccggccaacacagtgaaaacctgcctctactaaaaccacaaaattagctggaagtggtggcgcatgcctgtaatcccagctactccgggggctgaggcaggagaatcacttgaatccgggaggctgaggttgcagtgagccgagatcgcaccaatgcactccagccttagcaacagagcaagactctgtctcaaaaaaacaaaacaaaaacccaatagcagctgggactctcctgccctgggcccagtttcctcatttgtgaaaggggaatagatattcattgtactgacaaagaaaggaaggaagaggggaggggagagagagaaactatcttgaattttactaataggagaatggctgaataattttttcctatcaattgtcgaacaaagccagacactagttaaagtggtaaggacgaccgggcacggtggctcatgcctgtaatcccagcactttgggaggccgaggagggcagatcatgaggtcaggagtttgagactggcctgaccaacatggtgaaactctgtctctactaaaaatacaaaaattaaccgggcatggtggcgcgtgcctgtaatcccagctaccaggaggctgaggcaggagaactgcttgaacttgggaaacggaggttgcagtgagctgaaattatgccactgcactccagcctgggtgataaagcgagaatccgtctcaaaaaaaaaaagtggtaaggacagattttaatcagtaatgattattgcaacagggaagagagttcagtatgaactgaactcagctttaatttgtatagaggtattttaaagggaggttgaccagcctgggcaatatggtaaaaccccatctctacaaatgaataaataaattcgccgggcatggtggtgaggttgaggtgggaggattgcacgagcctgggaggtcaaggctgcagtgagctgtgattgcaccaccgcactctagcattggcaacagagaccctgtctcaaaaaaataaataaaaaaaataaaggaagattgagggaggaaggggtgggcaagtgattagtagagtcagggaagtgaaatattacaaaaggttaagtcagtgtaaatgcagtgaggctagctgtgtctgccagttggcaatgatcaaagttagaatttttgcctcccacagagcctgggagacagaggtcacatcctcggttgttgcctggaataaacggtaaacatttaccagcagccttgagttttctcaggcaggcaccttagcgggggctggctagagtcattttagagatgttagcagctgttagaaactgttagtgtttgtttaagtctttttttcttttctttttttttttttttgagattaagtttcactcttgtcgcccagactggagtgtagtggcacgatctcggctcactgcaacctccgcctcccaggttcaagcgattctcctgcctcaggcttccaagtagctgggattacaagcgcctgccaccacgcccggctaagttttgtatttttagtagacacagggtttcaccatgttggccaggctggtcttgaactcccgcctcagcctcccaaaatgctgggattacaggtgtgagccacggcgcctggactgtcttttttttctttttagagatgagtctcgctctgtcgctcaggctgaagtgcagtggtgcaatcaaaactcactgcagtctcaaactcctgggctcaggccatcctcccaccttggcctcttgagtagctaggacaacaggtgtgctccaccatgcccagctaattaaaaaaaaatttcaagccgggcgcagtggctcatgcctgtaatcccagcatcttggaaggctcaggcgggtggatcacctgaggtcaggagttcaaggctggccaacatggtgaaaccctgtctctactaaaaatacaaaaaattagccaggcgtggtggcacacacctgtaattccagctacttgggaagctgaggcaggagaattgcttgaacccaggaggtggaagttgcagtgagccgagatcgtgacactgcactccagcctgggcaacagagtgagactctgtctcaaaacaaaaaaaattataaaaaaatttctagagaagcgggatcttgctatgttgcccaggctggcctcaactcctggactcaagggatcctctcatcttggtctcctgaagtgctaggattacaggcatgagccacagtgcctatagatcaaggttgaggcttagaagtgaagggagcccagaggaacctggctagagtttggtcaaggagagtctttgtcaccatactacagaaaattaagcagctgttaaacagaatgaggccggtctgggcatggtggctcacgcctgtaattccagcactttgggaggccgaagcgagtggatcacttgaggccagaagttcgagaccagtgtgggcaacatggtgaaaccctgtctccactaaaaatacaaaaattagctgagcatggtggcgcctgcctgtagtcccagctagttgggaggctgaggcaggagaatcgcttgaaccggggaggcagaagttgcagtgagccgagattgagccactgcactccatcctgggggacagagtgagactccctctcaacaaataaataaacaaataaaagcagtgtgttagggtgcgagaacccgggtcggggacgcgggtgagccgcgcggtaatcgccctgtcctgccaccagctggaggacaggggctcctcagagcctcaggcccagagaacgggccccacgaccgggaagcgaatactccacagggcacagtctcccaatgcaaaatgggcacctggacccaatcatttctgaacttctagttttttctccctatggctatgaaaagggtcattttttttcataggactttaaaagaaggcttaagaaaagcacgcaggcctggccgggtagctcacgccagtaatcccagtgctttgggacgtcaaggcaggcgggtcgcttgagagtagagtttcgagacctgggcaagatggtgagactccgtctttatgaaatattttaagaaaatcacgtacacctgtggtccccgctacaagggaggctgaggcggaaggattgcttgagcccaagaggttgaggctacagtaagccgtgatccagccactgcactccatccccggcaacacaacgagaccatgcgtcaggaaaaaaaaaaaaaaaccaagaaaataaaaaagaaaccacctaaaggcgtcctccgcgcgcccgcccctccgccatctttgcgtccgccccgtcctgcgccgccacttccttcccagccagaagtttcgcgccaaattgttccgcacacaaaatggagcccggaaggaggcgaggtcatgcactttgcagccaatcatcttcggcagacagtccgggcggcggggctggagggctcagaacggtccaatcgctggccgcgaggctccggcgaaccaatgggagcgcagcggcygcggcgtccgaacaccgcctcttgtttttcccgcgaaactcggcggctgagcgtggaggttcttgtctcccctggtttgtgaagtgcggaaaaccagaggtgaggctagtgggagtgggactgggactgggagccagcaggcatctggatttcckggtgtagttggagtgggacaggagtttctcgggaactggggttggagtccgggagcgcggccgggggtccccctgctccggactcagggcagggacccaggcgtcggaggggaggaggtgccaggcgctgcccccarcctgttctggccgtttgttcccaccccaggcgcagtcatgtcgggattcgacgatcctggcattttctacagcgacagcttcgggggcgacgcccaggccgacgaggggcaggcccgcaaatcgcagctgcagaggcgcttcaaggagttcctgcggcagtaccgagtgggcaccgaccgcacgggcttcaccttcaaatacaggtgcggytcctgcggggccgggggctcgagttccagtgtggccgctcacacgcstctaccagcctgctagagtcctggacwgtcagggcacagatgggcccagacgggggaaagagccggtcctgggtcacagggctcatcccggcagcctcacgccttggtataaggctttgtgtatttygttttactttattttattttattttattattaacgtatttgtttattattttgagacggagtctcgctctgtcgccaggctggagtgcagtggcacgatctcggctcactgcaacctccgcttcccgggttcaagcgattcttgtgcctcagcctcccgagtaggtgggactacccccgccatcaccacgcccggataattttttgtaattttagtagagatggggtttcgccatgttcgccaggctgctctcgaactcctgacctcaagtgatccacccgcctcagtctcccaaagtgctgggattacaggcgtgagccaccgtgcccggcctgctttgtgtattttatctgtacctggagttaacttctgggtgagtcacctgttgagtgggccaccagcaaccagctagcgccacttggaccgtttagttctttatccagatcttgttcctgttcatctgcttcctatcatccttccatgtcatgtctgagaccttacaaactcaagttccctgtaggtgtaaaaggtgaagatggcagttaggattcacytcacttcgctcattcatttatttataccagtcttgcaccttcattgattgagcacctgctgcctgccagatactgttctgggtgctgggctgcagcactgaagctggacctggctcctgcttctaggtgattgtacgacctgtgacatcatgagaattctcataggcccggcctctatccctgaaatgttaaaatgcagagaacatgaggttgcaggttcagcactggcccattattagctgagtgacttccaggtgtcagtgtctctgggcctcaccaggccagaaatgggtaaagccattcctgctttcacttactcatgcagcagctgatattgcccacctgtgtgccaggcactgcgctacaaagatgaaaagacgtgcttcttgtcctagagaagctcctaagtcagaggagtgagtcgtgaagaccaacagataacttccacggtggtcatttcctccacagaggaaggtgaaaggacttagggaagttttccggggggctgaagtttgaggggacctttgagctaaggtcagagttgcaggtgtagaaagctttctgtctaggtaggagcaattgcttgtgtagaggtgtggggtgtcctcacagcaagtggctttcagtagcagtctggccattttactggctcctggacataagggagacggggctcaggcctgtgatactgcgaggctggggaacagcctgtkcgttggtcagtggtccccaaatatgttcttgccacagcagtcacatgggatgctctgctaagcatctgggctggacgcagtggctcatgcttgtaattccgacgctttgggaggctgatgccaatggatcatttgaccccaggagttcaagacctggctgggcaacatagtgaaacccaggctctatttaaaaaaaaacagtctgactagaggttgataaggcagatgtgttttctgctgccttggtgcctccagtttttttgttgttttgttttttgtttttttttttttgagatggagtctcgctctgtcacccaggtttgagtacagtggcgtgatcttggctcactgcaactgctgcctgccgggttcaagtgattctcctgcctcagtcccccaagtagctaggattacaggcatccgccaccacacccggctaggtttttttttttgtatttttagtagagatggggtttctccatgttggtgaggctggtacctttttggtttttttttttgagacagagtctcagtctgtcgcccaggctggagtgccctggcgagatctctggtcactgcagcctccacctctggggttcaggcattctcatgcctcagtagctgggactacaggcgtatgctaccatgcccggctaatcttcgtatttttagtagagactgggtgttgccatgtggcccargctggtgttgaactcctggcctcaagtaatccaccctcctcagcttcctaaagtgttgggattacaggcatgagccacctcactgggccccaagtttgagctgtgtgcattgttcttttccaagagaagttaaaggctctgcggagtccttcagtgacagaactggtttgttgttttgtgcacgctggcctgggtgttgaaacatcctttgactgtcttgtggaccccttccatggagctttctttagggcatgcctgtgccagcagtgagtagcctctgcagggttaaataatggaatgatctggaattagatgtgtgtttgggaagaggaatggtgaggtcatggtggctgtggtgtgggcagattcaggggtgcaggcacacctcagccagtgttggtttcctcttctttgcacccttcctgccccaccctgctatgtgcccactccagggatgaactcaagcggcattacaacctgggggagtactggattgaggtggagatggaggatctggccagctttgatgaggacctggccgactacttgtacaagcagccagccgagcacctgcagctggtgagtgggaccccatccntgagcttcccagggctgctctgccccagttactaatagcctgtgcccttccctttctccagctggaggaagctgccaaggaggtagctgatgaggtgacccggccccggccttctggggaggaggtgctccaggacatccaggtcatgctcaaktcggacgccagcccttccascattcgtagcctgaaggtgggtyggagggcagtggctgctgcatggtgcagagggctttggatgcagccagacctgagtgctagctgtgtgrccttgagtgaggcacttgacctttctgaacctgtctcctcctggagacaaaaggatcgtttgttgttttttgctttttgttatgaaaaattacacacccaaaagcagagagtagtataatgaatcccataaagcttcacccagatttaataattaacattttgtgttgtttcctattttgtcctttttcttttttgctaaagaattttaaagtaaattcatgcacagtggctcatgcctctaatcttagcactttgggaggccgagggaggaagattgcttgataccgggagtttgagaccctggctctccaaaaaacaaaacaaaaaaaaaaacaaaaaaaacaaagctaggtatgctggcatatgcctatagtccaggctacttggaaggctgaagtgggaggatcaaggggcctaggaatttgaggttacagtgagctctgattgtgcctctcagcactttagcctgggtgacagagcaagaccctgtctctaaaaataaaaaataaattacagacatgacactttatcccgaaaaaaaaaagttttcttacatagtctcattagcacctcaactgaaacatcaaagatctcttagtatcattgaatatacagtctagattcagattgaccaaattacctcacatgactcttacagctcgtgtgtctcagccaggaccaggcattgtactggattgttgtttaaatctcttttaatccaggacagcttcctttactctgggtgtaagttctttcacagatacattattgatttgctaaagaagcaggagccattatcctgtagaatgtgctgccttttagatttatctgaaggcctccttggggtggttacaacataccccttcccccccgtgatttttggaagctggaagttagatgcaaaggcctgactgtgtttcgatttcacataccgggcaagaacgcttatgggtggtattggatccctcattgcatccctccatccactatgctgagactgaccaggtgctaggttgaggtggtgatggtcactttattgtaatgatgcaggcatggagtcttgaattccgcytccccagcctcgcttctgcttcccacagcctcttcctgctttctttgagagccccagcaaaacttctgctcatgtctggttctctcgttcagccggaggagggcattgagaaacggagacaaggtggagagagattgtcccagtcctgtacactagtggctcaggagctttgtgaagggcaagggctggccataggaaggagtggatcggctgagaatttatgttttactttttattrtggataattcaaacattagaatataaagagaatcgtataacgaatcctcttrtactcatcacccagcttaataattagcaactagaggccaatttttttttttttttttttttgagatggagtttttgctcttgttgcccaggctggagtgcagtggcacgatctcagctcactgcaacttccgcctcatgggttcaagtgattctcctgcctcagccccccaagtggttggaattacaggcacacaccaccacgcccggctaatttttagtagagatggggtttcaccatgttggccaggctggtctcgaactcctgacctcaggtgatccatagatgccaaatcttgtttcatctgtggccctggagttcttttgaaacaagtcccatacatcatataatttgatctggaactatttctccatgtatctctaaaagatgaatctctttttttttgagacggagtttgactctgtcgcccaggatggagtgcagtggcatgatctcagctcactgtaacccctgcttccccggttcaagcaattctccggcctcagcctcccgagtagctgggattacaggcatatgccatcacacctggctaatttttgtatttttagtagagacggggattcaccatgttggccaggctggtctcgaactcccgatctcaagtgatccgtccgcctcggccttccaaagtgtcggtattacaggcgtgatccactgcacccagcctttgaagagtcatttttaaaggcatagctacaataacatcacacttaaaaattaacattacggccgggcgcggtggctcatgcctgtaatcccagcattttgggaggccgaggccagtgaattgcctgaggtcaagagttcgagaccagcctggccaacatagtgaaaccccgtctctactaaaaatacaaaaagttagctggacatggtggcagttacctgtaatcccagctacttgggaggctgaggcaggagaatcgcttgaacccgggaggcggaggttgcagtaagccgagatcctgccattgcactccagccttggcgacacagcaagactctgtctcaaaaaaaaaaaaagaaaaaagaaaaaatattactgccttattgtccggtgtgggaatagtcattaagatggggaaactgaggytcaaagagaagtgacccagacagaagaccacacagcaggttttgacagaacttgaactagaatgtgggcccctgcctcccaggtttgttctgtgttgtactctacaggtccarggatgtcgccatcagagctggggtcaggtctctctcctggcacctgccactttgtagtgaaatgtgcttagtgtatctcttgccctgccaccyccccccccaattgtgctgcgaggtctttaaaagcaggagctgtgcctgaggctcctctgaaccccagggtccagatagcctggcactgggtggatgctctggaagcattttttgagcggaacagaagagctgtggccctccctgcagctctgtgcccacctcctccaggctcctgcccaggatatttactggcatatctcagatgcgtcctggctccccttaaccaacaagcttcccgatggctctattacagtcggacatgatgtcacacctgstgaagatccctggcatcatcatcgcggcctctgcggtccgtgccaaggccacccgcatctctatccagtgccgcagctgccgcaacaccctcascaacattgccatgcgccctggcctygagggctatgccctgcccaggaagtgcaacacgtgagtctgtggcccasagggactgtgggaggtgacctgagtgaagatcagaaaggatgagaacaagtagcaagcactgcctgcagctgcttctagagatccactgggatgggctgggcaggggtrtgcccttaggattggcacagatctgatgccctgtggctctgagacaccntgaacagggtccctctacattggtgacttctgtctcaccaggatacccagacagcgttgtagggaacccagggttgggagggaaaagcagtccagggtaatgagtctacttggaatcttctgaagcaaactatggtttgctcactaggccagatctagcctgctgaccctatggcccaggaacacgttcgttcatttaagtattgcccacagctggtttcgcactacaaaggcagggtatgtggcctcttggctggcagaacctggaatgcacatcctccggccctttctagaaaatgtttgctgcccccagtctgaaggaaccccaccctcttcactggctgctctttcttggctccttcgctggtgcctcctcagcttcccatccacctgtggcacagctgcctcattccatgctgttgacatctctcacttggagaggcacgctacctcctccctgatcccccgcgtccaccctccaccccctcagtctgttttccacccagcagccaggtgtcccttgacactcaggtggtccagtcatttacttcttagtcaagtcctgcacagcccaccacgatctgctcctggcttccccaggcctcgctgcccctcctctctccaggcccggcctcactgcctccttcctgtttctggaatacactgactacccccagtctcactgcctttgaccttgctgtttcctctactgggagtgctgttcctcaagctaccatagtctgtgtcctcacttcttcaggcttctcttcacatgtccccttaccaggggcatcttgcccaacccttcatcttcagtttggtgtgcaygtacctcgtctctcccacacctgcctacttttttacttttcttcacagcatgtagctgtcactctttaatatgattgtttgcttgtatgtcttttcagcctcccttgataggaacttaggctccacaagagcagggacctttttgttcagtgctgtgccccctgcacctggaatagtgtcagacacatagtaggttttgctatgatgtttacttctttatgttgctataatatctattgaataatgacataattacctagggatacgtagaggcttagaccctcagaatggtctagaactgcctagaatcccactggaaaagatcttgggatttgagtggggctttagtaagagaattgatgaactagctcttcacccatgaggacaccatgatcctgcaagaagaccgagtgtgacctgtctgcctcctctcagcaagttaatggaaggacccagcctcaagcagttcccttgactcttaatccagtgctaggtccgtcagtgttgccttcctttcttacctccaggcagcgttgcctgcctggcttatctccagcttattctggagacccccataaattgccgctggcaacgtctccttgctggctcctgggatgaatgagccctgcctttggattctccaggtagctttggtgactcttttcccttaccttgtacagagatcaggctgggcgccccaaatgcccattggacccgtacttcatcatgcccgacaaatgcaaatgcgtggacttccagaccctgaagctgcaggagctgcctgatgcagtcccccacggggagatgcccagacacatgcagctctactgcgacaggtgaggcagacgggctgggaggtgggcatctacgacggtggatgtcccagctgtggccctaacccgagtgttgggagtgggtcatctggagcagggtgagtagggtggagaaggtggccagttgcagagcacctgctctgtgcctaatgcttccataagttcctctcatctcgtctttccataatctgcaggggcatgtcagccccattttgcagatgaggaaatgtaacttggagagattaaatgacttcctgtgtggaggagagccgggctttcagcctatgtgcattgctttccaaagtctgtgttcttcttaggataagaggcccaggatgcacagctagataaccaatagctggcaaagcctcttcccagcctgacaccccacctcctaccccaggctttcttttttttttgagacggagtctggctctgtagcccaggctggagtgcagtggcgcgatctcggctcactgcaagctccacctcctgggttaatgccattctccggcctcagcctcccgagtagctgggactacaggcgccctccaccatgcccagctaattttttgtattttttagtagagatgaggtttcaccttgttagccaggatggtctcgatctcctgacctcatgatccgcccgccttggcctcccagagtgcggggattacaggcgtgagctactgcgcccagcgtaccccaggctttctgttaagatcctgctgaacagccacggtggctcatgcctgtaatcccagcacttggagcggctgagacaggaggattgcttgaggccaggagttcaagaccagcctgggcaacatactgagaccctgtatctaaaaaaaaaaaatttattagctgggtgttggggcagacacctataatcccagctacttgggaggctgaggtgggagaatcacttgaccccagaaggttgaggttgcagtgagctgtgattacaccactccactctagcctgggtgacagagcgagaccctgtctcaaaaaggaaaacaaaaaagattctactgagggggagagggtactgagcttgggcccctcatagtaacctgggtggaaggttttgagatctttgattagggttctaacctgggcttgcatatcctgaaattgcatgcagatgttctgaggagagmggatctgtagcttctgttaacttcattagtggcaacagagtatgtaggggtcaggctcttgctccctgggcaagttatgtgactttgtcaagcttcagtttcctcatcagtaaaatggggataaggacagtccttaatctctcagagggctgcttgaaaatgcatgtggtgtttagcacaattccttcatgcagattacgtaatcaggatgtatgattttccaagcagttcatgaatcctgaaaacttacgaagtgggtatgggaagaggggagttggaggctcatggagtgacggtgatggtcttttctggagctgtgatgcctgatggtataaagcacttctatgtctgctgcctcacctgactccacaacatgagaggcaggccacttcgtcatccccctaggctcagaggtgcaatgacttcgttgaggtcacacagcgactaagtgtccctccacaccaccctgtctctgactgggggacttggagacttccctgtttcaacatctcattttkaaaacaggaaatgaaaacccagaggcaaaatgagctcacagagccatgaagaggcaaaaagggcgagtggcccctcaaggaggctggggggcgtgaagaggaagtcttgccctgagaggctaaagggcaccacacagygagctgacagcagacacgtggagatggggcttttggagggctctgtgggctggcactaagcctcctaaaccagcgtacaaatgagttagcgagttcagcgagagtcaggccaccacctgcctttctgtttggctgtcactgtgggcaacaccatcctccaagcagctgagcatgggctgagtgacgtggggagagaggccgttctctgggctccgtggggctggagccagctcagcatgyggtgcctgtggcaaaaatgctgcagtggaccctgcgtgtcctgggcatgggtggaatcagagacttgctgtccaagtcagaatctcagcttttctcctttctcctctaccctcctctcaggtacctgtgtgacaaggtcrtccctgggaacagggttaccatcatgggcatctactccatcaagaagtttggcctgacyaccagyaggggccgtgacagggtgggcgtgggcatccgaagctcctacatccgtgtcctgggcatccaggtggacacagatggctctggtgagttggctttggggtcctggcttagccctgctaaaaggctgtgcttgcatacttctggtaacaggcagctcgttacttcatgaggtagcccaggatgtccttgtgttgctcatatcattagaacgttcatttttatattaagtgatccctggaacttccacacattggtcctagctgtggctcctgggctgagggtgtttgcctaagtgcaggattaaggcagaaggactgaggtcaaatcactggggaattactgaaagccaagtcttcacttctgtgacaggaaatacaagagaagtgaaacgcagggttccaggcaggcagccgcctagtgtctagttggagaaataagaaaactgtgagaccgctggggacatgtgggtaaagtggtggctgttgtgggtcacgcagttccaaggaggtgctaaaggaggtctgagaaggaggaggtsggggctgggccttggggaaggttttctgggaggaggttaatctgagctgggctttgaagagtggtggatgtggaagaacttccaggcgggaggggatggcaggagcaggtgaaraccccggcctgggcaaggtactgagtggctggagggccgagtgggagtctaggggatgaggggccaggtggtgtaagaggccttgagtgccgagatggggagctcctgcttacacctgagggcagcaggggccactgagggttttcaggtttgtttcagccctctggctgcagtgaattgattcagaggggtggcttccccagggctcagtccatggcccaccccacatttacacaaactacctagattattacaactttaaaaccactgacaggtaagtagctctcacatttccatttctagcctgggcttctccccacgttccagactttaataaccaactgctgatttgacatgttcacttacatatctgaaaggcatctcgaactttacatggctgaagctaagctcccctttccccaccctcagactggctcctctcagtcttcccatcttcaccctttcagttgctcagacaaaaacccccaagtcacccttggtgctcttttctctcatcccccacatctaatcactcaggaactctggccagctccacctttaaaacgtgtccaggatctgaccacttctcatcctccccacctgctctgagcccttgtcagccctccctggatcaccgttgatcctccccagtgttcgtctccaccttgccctaccttctctgttctgcagcagccagtgagcgatgctgtcatgaccaagacactatatcactcctcggctgaaaggggagaccttccagtggtttccaaggtcctatgccatctggccctctgtttgctcagaacccttctccccacttcccctcaccctttggaccctggaacacaccaggcccattcctgagggcttgagagctgggatctctgtttactcagataggttgtgctgtcctggccctaagggccctaagggctctgccttctgggaggtccctgagctggtgccaggatgggcagtgggctggaagagctcccttgtactcactcatgcgcctgctttgcctaccaaggccgcagctttgctggggccgtgagcccccaggaggaggaggagttccgtcgcctggctgccctcccaaatgtctatgaggtyatctccaagagcatcgccccctccatctttgggggcacagacatgaagaaggccattgcctgcctgctctttgggggctcccgaaagaggtaggggcttgagttcccttgggtttggggaggnggctgatgatggggctcacagtaggataattactggataatcaggactgggcactcttytttgtatttcctgggcccctcagtctgccaggcacctttgccagcccccaagcttgccatcagctggctagtggctgatctgcgcacctgtctcagcgatgccctgaccctggcaagggggagactgggggcctggcaagtgcagtgggagagcactgagcttagggtcgtgtaggtaccaggacttaaatctcagcactgagcttggggtcagtagcagggatattattagcagctgccatttactgtgttcttcctatgcacagccattctttgttttttttttttgagacagtctcactctgttgcccaggctggagtgcagtggtgtgatctcggctcactgcaagctccgcctcttgggttcacaccattctcctgcctcagcctcccgagtagctgggactacaggcgcctgccaccatgcccagctaattttttttgtatttttagtagagacagggtttcaccgtgttagccaggatggtctcgatctcctgacctcgtgatccgcccgcctcggcctcccaaagtgctgggattacaggcgtgagccaccgcacccggccgcacaggcattcttctaagtgctttatgtgtctgaagcccagtcattcctcacagtaacctgttaacgcagctgttgtgcccattttatagatgagggaattgaggcatagagagttaaagggacttgctccccagcacatgcaggggagccaggagcctgctgtcatggtgcttgttctgccgcaccgtgcacagcccacaggcagctctctgtccttttctttcaagctgggaggaacgttgctcagatgctgggtgtacccgagcacagccataagagccatttcctttaaccctcctcttctgggaggcaagctctgtcctcattgctaggcaagacctaccatggtttgggaactacagagctgggtaggaacatgggtctcaggccacagccactaccttcttaccaactctgaggcccatgatagttgggggagtcaactgccagcccaccaatctggtgactggatgtcacatgcgatgccctcatggattctcaccttgtccatctacccttcgtcccccaggctccctgatggacttactcgccgaggagacatcaacctgctgatgctaggggaccctgggacagccaagtcccagcttctgaagtttgtggagaagtgttctcccattggggtgagtggcctgggatacctttgccaccttggcttgcagggaggaaggctgcagggcagggcctctgggtccycaggacacctgtggtgggctggctcacccggaatctcttcctcctttctcttggctgcggtcaggatggccgaggagatgggaggaagaagggagccaacaggtgtatgtaggtttggggcagggggcgagtacactgtactgagagtcaggatggggtttgggtctcaccctggccagaaattggctgtgggctttgagtaagtcacccaatctccctgagcgtcagtttatccatttgctaaataatgatattgttatcattaatagctaaaatctggctgggcatggtggttcatccctgtaataccagcgctttgggaggccgaggtgggcggattgcttgagctcaggagtttgagaccagcctggacaacatggtgaaaccctgtctttaccaaaaatacaaaataactagccaggcgtgatatgcacctgtggtcccagctgcttgggaggctgaggtgggaggatcacttaagcccagaacggggaggttgcagtgagccaagattgtgccactgcactccagcctgggtgacagagtgagaccatgtttcaaataataataataaataataataataataataatagctaaaatgaagggccagacactgcttgaagtactttgcatatatttacttagtcttcacctcaactgtgtggcaggtactattacccctgtgttaggggtgagaaaactcaggtacagaatgggtaagtgtcttggcccaggtctcactgctggtaagcattagagcaggatgtgattgaacccaagtgtctgatgagctgggtcctctgctgcgttgttgaatgggtctgcggggatcagagccagagaaggtctgacatgatccgagtggcggggttgtatagggcgagatggtggtctttggatagataggaagtgtgccaaatttgccacactggcactgtccagtagaaatagtgaactgcacatgcgacccatgtatgtcttctcagattgtctaacagccacattaaaaagtagctgggtgcggttgtgtgcatacctgtagtcccagctacttgggaggctgaggtgggaggatcacttgagcccaggagtttgagaccagcttgggcaacatagcaagaccccgtttcaatttaaaaggaagaaggggaaagaaaaaaggaaaaacaggtgaagttacttctgtttaactygctatatctaaaatctcatttcaacatgttgtttgatatgtagattattgagatactttacattcttaggagctctgagtctttgaaatcgtgcgtattttgcacgattaaggacatctcagttaggactttcccartttcaggggctctatggcagtatgtggcgtgtaggtctatatagagacgacaagggactcacgatgggggcaggctttccctgggagtcaggagtcctcatcctagccctgaggctaactcctcttctctgggyctcagtttgctcatctgtgagttgggcctcacaagactgtgtcacagggctgtggtsaggcttaggtgagccatggatgtgatgccctcagcggggagaacatctgggcacaccgaggcccagggcagcatccccttccagagggagacgcactgagttggagccttgagtcctattctgtaccctgcagccagctttgatgtgtgaccttgggcaaatcacaacctcagtgggtctttttgtcttatgggggtcaaagcatggagttgttattgggccctgacaccaccccactgccccaggtatacacgtctgggaaaggcagcagcgcagctggactgacagcctcggtgatgagggacccttcgtcccggaatttcatcatggagggcggagccatggtcctggccgatggtggggtcgtctgtattgacgagtttgacaaggtgagtctgatgaggtgggtagtagccaaaaggtgggtggcaccagggtatgtgacttcctgtgctcagccagcagaaatcacctytgacttgggagacatgttttcaatccctgggccggtcactctagtaactgtgggaagctgcttaacctcttcaagcctcagttcccatatctgaagagtggggagaagaaaggcaagcccacacagttgttcccatgattagaggtgacctggttgctgccattggccttgcgtggagctggtattcaggagtgagggctgctgttagttttcctgtttctactgctccctgctccctcacttcagtaggtctgatgatatttctctcttccccacttagatgcgagaagatgaccgtgtggcaatccacgaagccatggagcagcagaccatctctatcgccaaggtgagtggccctccatggagagcccagcctgcagcagcccagcgtggcccaaccgtcctcaggctgccctgattgggaccaagttctctttgcccaggcctagaatctgtgtgtgtgtgtgtgtgtgtgtgtgtgtgtgtgtgtgtgtgtgtgtgtgtgtgtgkgtaaacgtgtatataagaaggcatctttgccatctcctcccccttttcgtcrtctgtcgcctgttaggctgggatcaccaccaccctgaactcccgctgctccgtcctggctgctgccaactcagtgttcggccgctgggatgagacgaagggggaggacaacattgacttcatgcccaccatcttgtcgcgcttcgacatgatcttcatcgtcaaggatgagcacaatgaggagagggatgtggtacgtccaggggcagggctggtggccatgggacctgcctccaggcaggcttgtgattgtgtgggaaggagaatggagaacaagggccttggctggcaaagtcctgactgtcaggctgtgaaattggggagcacgtgagagggcggttgttgtggactgcagaggattgaagcagggtctggagtcctgtggcctgctctgcctctgccgtgagtgataagctgtgtgatttgggctaaatcagtttctccctgggcctcagtcccttatatatgaaacagaggagttgacattgggttatgagtaatagaacctcagttctggttagtaaatttttcaaagaaaaaaacrtagtggtttatagaattggtaagtccggcggcttaaggcccaggtagatctggattctcaaacaactgtctctgcctttctgttctgcttcccttggtggaatctttgtacttgggcagctgttcctcttgtggtggcaaagacaaaataagattttgtcctgttagcttgtagcttaacagcccccaggaaagaggaggccccgtcttttccagtacttctatcaaaagtcccaggatagactcctattggcttgggtagatccwatgtccatgcccaagttggggtggacaagatacatgccccaagtcggggtggacaagctgaacccacccctttatggaccagggcagaggagcaaggagcattaagttctctctaaaggagaatccagatgctcccatcagaacgagggcctggtgctgagcaaacaggctgagcacgcctgagatctcagcaccctttccggctccttgatgccagggccccatcagctctttctggctgttccacctcagtgctgggactcaggcttgggacggcctgtgggatgacccattatcccctctgctctccagatgctggccaagcatgtcatcactctgcacgtgagcgcactgacacagacacaggctgtggagggcgagattgacctggccaagctgaagaagtttattgcctactgccgagtgtgagtcctggacgcaggcccacgggggtgaggttgcccagcttccctgggtgggagagaacccagtcccctggtcctgctcctcctcatgaagaacagcccagatgttgctgttctgaggttctcagctctactgaatctgctctgctcccttctaaccttgcgtagctcactggctcttggcttcagttttcccacctccacaccaaggaggtgggatttagatggtcttgaagacctcctcgagtctgacatgcagggagkcagtgaagtgtagacatggtagacatgggctctgggtcatacctgccttcactctatgactttgrgcaagttggttggcctctctgagccttgatttccccrggcctatcgatgtttgctaggatttttgtaaggattgcacaagatgatgagtaagtgcttggcatagccctgccctgggtaaatactcagtgagtcgcagctgcaatttgattgttctcacagattttcaataataataattatatacatagtactggctggttgcagtggctcacgctgtaatcccagcactttgggaggcggaggcaggtggatcacttgaggtcaggagtgcgagaccagcctggccaacgtggcgaaaccccatgtctactaaaaatacaaaaattagccgggtgtggtggtgcacacctatagtcccagctactcaggaggctgaggcaggagaattgcttgaacccaggaggcagagattgcagtgagctgagatcgtgccattgcacttcagcctgggcaacagagtgagactctgtctcaaaaaaaaaaaawatatatatatgtgtmcacacacacacacacacacacactcactcttacacactactttctttgtgccaggcattctgaattactattcagtattttctatatgaataaattataaccctcccccaaaacctaccaggtaaggtgtgctattattcccttccctttatggatggggaagctgaggcaaaggaagttaagtaacttgcccaaggtcacatgccagaggtagtggagccaggatgtgaacccagctgcttgcctccagaggctgtgctcttaaccacagtgcttcgattsttgtcgtacagcgctttggtgatcttttgaaggagctaaaacccaggggttgagggctctttgaatgcactaccagtggggggctggtgggtccctgattcagcacctctgccagggtgagtgggtagtccctgggtcttcatccaagtctgagctctgtgtggcccagtcttgagaggcttgggcccacagctgtgagtcagggagccctggattctaatcttccctctgcactaagtccccaggtagccttggggagttccctccctccctctgggtctcagtctccacatccttaggatggttgagctaaggctttccctacatcagtgaytgtcagttggcctgggggctagaggggaggggatgggatagggtagatgctgatcagacttccccacacctaccgtcccaggagagtctgaggtgctcccagcccctggactgcagtcaccgccaagcctcctgtgggtgtcatcagcttgtcgtgtcttcagatgtgttgggtggaggagtttgagactgctgcaaagcccaccacccagtgggcctccatgccgctgtgattgtgccattgttcattacatgtatgggggaccttgtggcaagacaccacacagcgtctaacagtggggaagaggcggttttcaccctgcagacgtgcctggcttttcttcacctgttttttaagagaggcacccatatttctccccagwgttgatgtttgtggcagctgcccacagccagatttcacttaaatcttttccgattgttgtcccccagcccatatgagtgggcagctgtggtgtggtgggaaagtgcatgtctgtaagctggcagggggctgggggaaagggtaggtgccctaagagtccctcctggcctcacaccagcctctccccactgtcctgcaggaartgtggcccccggctgtcagcagaggctgcagagaaactgaagaaccgctacatcatcatgcggagcggggcccgtcagcacgagagggacagtgaccgccgctccagcatccccatcactgtgcggtgagcaggngggcagggctgggccatggcagatggggcttgctttacacagcagggtgtgcttggcaaccaggggcagtggtccaggcttttcacttggcacaggcccatagtagctctgggcaggaagagtccctttggagcataarctatggcctccttgatctcaatgatgatccatgtttcttgatttaaggccgggcaaacctagacccctcttgtctgaatttggcctggcttctcccattgtaggaagyccgaagggagggaaggacccaggcctgggagtcaagagtcttgggtcccagcctctagcccactgtgtgactgtagggaaattacattccttctctggccctcagtgcttttagctcctaactctgttcattcttgtgactttgtagacaatacagtgggtaagagttgggatttacctggtttgaatcctgtctccagcactgactggttggaaatggatttggctataagtaatggtaaatccagataaagtagcttaaagaaataggaagttcatttctcttttctgtagcactgtctggaggaagatggtatggggactggtgtgaggactcctcaagctcccccttactcttagtccgagatggccgctagaacttcagccatcacctccaggcagcaggacaggaaggaaagagagcttcccttttaaaggacacttcatgaagtcccacacaatgcttggacttacaacttactgccatagattggtcacacaaatacaacctggtacaaaagatgtctgggatgtgttttagtggatcgctgtgtgccagactaaaaactggggttccaagctaggtgcagtggcctacattgtgatcctagcactttgggaggctgaggcaggaggattacttgaggccaggagtttgagaccagcctgggcaacatagcaagactcccatttctacaaaaaataaaaaattagccaggcattgtggtgcatgcctgtagacccagctcctcaggtggctgaggtggaaggatcactggagcccaggagttcgaggctgcagtgagctatgatcatgccactacaytccagcctggtccacagagcgagactttgtctcaaaaaaaaaaaaaaaaaaaaaaaattgcagttctatgactaagatcaaaagggagatggattatggggacacctagcagtctccaccacagtcttaccactttgggcaagcacctccctggtaacgggctggctggngaggaagggaatagcggaccgaggctaccctgagcacgctgttgcccccacaggcagctggaggccattgtgcgcatcgcggaagccctcagcaagatgaagctgcagcccttcgccacagaggcagatgtggaggaggccctgcggctcttccaagtgtccacgttggatgctgccttgtccggtaccctgtcaggtgagcagatgcaggggccatggtctcaattgatctgggttccctggctcggagctctgtgggcagggctctggcctgctgggggcctgcagtgtgtgtnttgcttctctgagtttgctgagcttctctgagtttctttttgcnataagacccctctcctcctttctccccaccgctgtttcctccaagatgggaagaagcagcttctctccagacccttgaacacaatcctcttgacccaggtcattgatgataacccttctcactggctaggaacaacagttgatgctctgcttcctagagcttgtcagcattttcagtgcttccagagttatttcttgcattttgccttacagctgccccctggaagccaggtgagcagtcagtcctgcccatgttagaaatgagacagctgacactcgaaggggcctttccctggtgcccaagatcacagtygcttggctggaatgcaagtctcctggcccctaggccagcgttttccacaccataagccatactgtctggtttcggtcagcctttcaacagactgtcccaggcaccgatcatgagccaggctacctacgctggggaaaatctgttccttcacccagcagatacttcattagtgttactgtttgccaggcactgttctaggtgctgggagtataagagcaatcaatcacagggtcccggccctcctgggttctcattctcgttctagttggggagagatagacagtagagaaacaaatgcaggtagtgtaggtagtgaaaaaggcagtgagggagatgatggcagggccaggtgtgttggaaaaggaggacgtgctctttcccatggagtgagtgggcatggcctctgcaaggaggtgatgccaagcagggagctgcatgaaggggacagtgtggctccttgggggaagagctgctcaggtggaggcagcrctaagtgtcagtttccccaggagggagcaggtttggtgcatttgaatggggaggcacttgggtgaggaatggggtgggtggggcctgttcctcctgtcccccttggtgaagactcagcctctaccctggagacacttgctgtcacatgagacattgcaggtggaggcctctgggatgctgcaggcacagagggcaggggtgatatggagtggtgataatttgagttgggtcttatgggctatgtaggagtttgcctcacagactcccctctcaatgacttcttgaccatgagcccaccatctccttagctgaaacaccaaggcctctgtggcagtaattggaagtcacgagcctcctggttgccgagggctcctcagggcacctcgtagatgtgtccagggcaggctggcttccctcctgggtcactgatgggccccttccaactctctctctaatctatctgctccagcaacaaaaggagtcctgctgtggcctccaagggcccgcaggacttggtccctagtgacactctggccatgtctctgctgcgctgggccccgggctgctttttgaatgagacaggtgtgttcctgcctctgtgactttgtgcttggcctggagtgtccccacatgtgccatatcctgtctcctcaatcaggcctgcaccaccctggcacactcggtgcccttttctgacttactcttcggggcctggctcaggctgttcttccttgggctagaggctgtctctgtccaagaactcccattgtcccagctccccrgctgcctcacttctccatgcccacaggggtggagggcttcaccagccaggaggaccaggagatgctgagccgcatcgagaagcagctcaagcgccgctttgccattggctcccaggtgtctgagcacagcatcatcaaggacttcaccaagcaggtgagcctgccttggagtgggggtgtgagccggcacggggtgcaggtcttctgctggttcccacccactcagcactggcatcttactcagcagacaggccctgaacgggggtaggatggacaactgtccctttctcagaccttttctagccatcattccttccctagggacatcttcatcaggagcagggatgggggtattttttctgtcccacgaaggggaggggagagcagaggtggttggattctggtgaaaccccatacaagttccccgcagcccttcccgtctgtgcctttccccgttggcgggcgtttcatggagtgggaaggggcagagccatgagagtgagctttctggctcactgaggagggtactgttggccccatagagagaagatgggatttcccagatgctctggaaaacctgtcacctttaaaatctcaggattaatcctagtttctggtctccgctccttgtacatcatctcattttgattcagggcagtttaatgggtggtatcgtgtctattctataggtgcgcagactgaggcttagagaaaggtttagagcttcggttctagagtcagatgggacttaagtcccagctctacctcttaattgctgygaccttgagcaagtggcttagcctccgtgtgcctcagtgtctggtacacagtgggcactcaggaagtgtgggccctttakgtcaaaggagcctgagtacaaagttccccgtgagcctggggatgtctgggctctgtcggagtcccctcgggcagcacgtgccgttagccagccatgtgctcccacagaaatacccggagcacgccatccacaaggtgctgcagctcatgctgcggcgcggcgagatccagcatcgcatgcagcgcaaggttctctaccgcctcaagtgagtcgcrccgcctcactggactcatggactcgcccacgcctcgcccctcctgccgctgcctgccattgacaatgttgctgkgacctctgcctccccactgcagccctcgaacttcccaggcaccctcctttctgccccagaggaaggagctgtagtgtcctgctgcctctgggcgcccgcctctagcgcggttctgggaagtgtgcttttggcatccgttaataataaagccmcggtgtgttcaggwatctgtgggtttgtgcactcggtgacctgtcacctccatcgtgccctcatggcagggtaagtgtgagggaacagggtctggaggcagactggccagggtttctgacttggatctgccactcagacttstgggtaagtcacgtgacttgagtgctccggtttcttcatctgtttagcggggctcataaagccactcccttgatgctgggaatccagtgagaccagggagtggggaagcgcttctcaaagtgtgtgattttgatccgcctcacctgttccccagtaacttattggggggctgcgagccgtggtgcggcggtcagactgcctggattcatggaccctctccatgccttagtttccttatctgtaagcaggctgatactagaacctgcttcacagggttgtgcttagggtcagtgagcagctgttagtgaggggaatgtagtggccaccaggcaggaactaggactccagccagttctttcctggtgggccacgtgtaactgtgtggccttgggcgagacatttcacttttctgtgcctgagtttatcagtaaactggagatggggggattcctcaccctgagttgtgaggattgaatgacagaaggcactagtgacagtgatgctggaggaaggagtgttgccaagtgcctcggtcactttgcctaatttcagaargtcactctgagttggtatgttttgtgtttttaaaaaagctaggattcataaaattaaatagaaatcagtgaaataaaatatttgatatttaaaatacatttagaaatacaaagtgtcaagcaaaacgtgaatttggaaatctatggaacattagataaggtatttaaaagtaattgccatgtaaaaatgacaygaacttgaagtaagattatttgatttttctaaaaatacaagaaagcttggtgcatccgcctggtcattgttgaatcacaaatgtatttttgtgcagaagattcctgcagctcaaagccctttctgattccatactgttcggggaaatggagagatgagaggagctaaatcagctttcctctgactcactcccgttcaaagctcatttcttttctgataattttgagagtgtctggaacagcttttgttttcttggtggggtggcaaccttactgggcgygctgtgggttttgcatccaaggctgcatctccggttcctgctagcctttcatcttgctcaggtggggactcgcgtgcatctcaggcccaaggtcctcccgtcctgcttgttcatggagtgtggaactctcatgaggttcaccctgcagtggcaactttgctggtggccttttctccacccctgtggtgggtggtgctgctgtggtcacctctgttttacaggtggagaaactgaggctcagagagtcaagtgtcacagtgagggagtgcagggcaggcttcaaacctggtggctccgaactccacccatgtcaccttttctgccagattctctcttggcagtccctgacctcggcctgagtgggatgctgggcagagacagtcctggcctgggggaggcaggtgccagtcaggtgggggagactgaccctggggtaggttcccaggggtaggtggcctgactggcaggcacaggactgagaggccaaagggggtccgactggcttttccgtggtagttggggtagggctcataggaggagcagctgtgctcagagcatgccagtctccttccagatcggggcagcagcatgaagagaggcccctgagccagggaaacacctgcttgttggggaaagcaaaggctgaggagagagcctgaagggaggccaggagaggggagcattcaggctgagtaatagttggggctcggcttagtggaatctccagtcaggcctcagtgacacctagagaggcagggaggtggggcaagsgggggagctggattcccgagctggtgctgccactcagggtggctgagctcttcactcacctgtgacctggctcccttaggcttgtcttctcagatctgtccctaccctcaccagctacaggccgcgacccagcggacatttctctctgctgagcaaatcacttcacccctcagcctcctttcatctgtagaaagggcacagcagtacagtagccctttcacccaggggtggctgtgaggattaactgagggggtagacatcagagcagctgggcctggccccggggaggtgctcccaggaagggctgggtgcctgtggttttccctgcctcacagcctctgccatctcggatttcaccttttcatgcttttgtgtgagcagaggccgagcctctgctgctgtgttccctgccccactctactcctggctgcatgggtctctcaacttcgctcaccactatgagagccgctccaccccttctccagttccaggtctgggaaggagagagcagacaagcttgctcatgatggagtccttttacctggtttctctctctgttcacagataccacctctgttgatctgggaactaagaccatgttgcttgtccttagtcacatatgacttaatttgcacccattgtgggccactggtgtcagacaggaagcctaagcgcaggtatcactgaggaggatacacatgctaactacacgatcttcaccagacctgtgagcttccagccaccagatccaaagtcacagagcacagggacttacaaacccagtgctggaaaacatagcaaaggctatatccaatttaggtttctctttattggaaataaagatggcccatacttcaaatatgttatttagagaatgcttataaagagcagcctaaagtcccattctcttgcctgtaagcaacaaaattacaaaaatgttgaatttctaaaatgcgaaagttaagcattccagagaccagctcatggaagaaggttttatgtttttgggtgttgtaactattatccatatgtatttaaacatgaatacgtctgtttggtatttaacacattttttttttttttggctttcaaggcctttatttttttatttttatttttttcccttttttaatttattatacttgtttttggggtacatgtgcagaacgtaaagttttgttacatgggtatacacatgccatggtggtttgctgcacccatcaacccgtcatctacattaggtatttcttctaatgttatccctccctagccccccaccccccacaaatgtttaattaggagtgtcaagtctggatgaaccaaggtagatatttattttaagacattatggtgaggccaaagagtacattaaaatggttttaatttgtttttatagatcaaaaacaagcattttttattaaaaatatgaggcagtaaagcacagtggttaagaacatggacttggggccaggtgtggtagctcattcctgtaatcccagcactttaggaggctgaggcaggagaatcacttgaggccaggagttcaagactagcctgggcaacatagtgagacccccatcgctctctctctctctttttttttttttttttgagaccaagtctcactctgttgtccaggctggagtgcattggcgcgatctcggctcactgcaacctccgcctcccaggatcaagcgattctcctgcctcagcctcctgagtagctgggattacaggtgcccaccaccacacccagctaattttttgtatttttagtagagatggggtttcaccatgttggctaggctggtttcaaactcctgaactcaagtgatctgcccaccttggcctcccaaagtggtgggattacaggtgtgagccactgcacctggcctattttattatttttttagagatgggggtggttctcactgtgttgcccatgctggtctggaactcctgggctcaatcgatcctcctgcctcggcctcccaaagttcttagattacaggtgtgagccactgcaccagccaggattaaaggagttaacagccccaaagcactcagaacaccaccaggcccagggtaaaggctttttcagtgttccatatgtaaactatctacatatgtagatagttttttacatacgtaaaaaacctactattgacgtatgtaaacctacacacattggcttgctctaacagaagggctgtgttgtaaggtagtaagctccctgtttctgcacgtggtcaggtagaggcaacccagcatctgttggcgggcttggtcttccaggtcagggagacttctccccggctcctactcagggctcaccaccacctatttcatacttactagttgttttagagacagggtttctctgtattgtctggtctggaatccyccagctctggttattcacaggcatagtcacagtgcactacagccttgaactcctgacctcaagcgatcctactgcctcgacctcccaagtagctgggactacaggcgcatgccagtattcccagttcttttctttgaccttttttttttttttttttttttttttttcttttttgaggcggaattttgctctgttcccaggctggagtgtagtatcatgatctcagctccctgcaacctccgcctcccaggttcaagcaattctcctgcctcagcctcccaagtagctgggattacaggtgcctgccaccatgcttggctaatttttgtatttttagtagagacaagatttcaccatgttggccaggctggtcttgatctcctgacctcaggtgatccacctgcctcggcctcccaaagttctgggattataggcatgagccaccgtgcccggccaaatcttttctttgaaatgctaggtcctaaggttattatctccaaattacagatgagaaattgaggctacaagactttgaggaaatgactcaatgtctcagaggcagaagtgaaggatctgggtgagccaccaagggtcgtcttcttaggagatattattgccttcaagatttcaagattgattgttccgggctctgagattctagaattctctcctgccattcctcctcacccctcctgcccttgttttttgttcttccttttttttttaagatggagtcttgctctgtcacccaggctggagtgcagtggcttgctctcttggctcactgcaacctccacctcctggttcaagcaattctcctgccccaggctcccgagtagctgggactacaggcgcgcgccactgtagctggctaatttttgtatttttagtagagatggggtttcaccatgttggctaggctggtgtcaaactcctggcctcaggtgatccgcccacctcagcctcaaaaagtgcaggcctgtgccaccgtgcccagccattttttgttcttccttagagaaccagctcagcctagtgcttctcagccagtaggcctcattctagagcaagacttctgggctccatgctcaatagctgtggaatatattaccctctccaaatctcagtttccgtgtctgtaaaatgggtcgggcttttctggtgttaacaccgaaagtcttgcatcccaggagccccttcagccctaggcacacccgttggtcaccctaaaaatggggggaataaaagcccatctggaagagttgtggtcaggttgggctgaacagcgttcactggtattgagcatggtacctttcaggggcctgcagagaatgggagagaaaattactgctccttacacagggtgacggagtccatggcctgagtgtgacacctaatgccaccacttccagctgtgtgccctgagttcagtttatcttcctgggtctctgttcccccagatgttaagaggattgataatagtgtgggctgagtatagtgagagtataggaagatacagtgaaataacaagagctttgccaggaagtgggcacctggtgcccgctgggcaggagtgcctgtagttaatcattatgtgtctcaaaaggtgtcaaaagcttctgaacacttaatgctgtgttttgggcctggagccccaaaaccagccagtggggactttttttttttttttgagatggagtctcgctctgtcgcccaggctagagtgtgcagtggtgcgacctcagctcactgcaacctccgcctgccagtttcaagcaattcttctgcctcagcctcccgagtagctgggactacaggcgcgtgccaccatgcctggctaattttgttttgttttgtatttttagtagagatggggtttcaccatgctagccagtctggtctggaactcctgacctcctgatccacctgcctcggcctcccaaagtcctgggattacaggcgtgagccactgtacccagcctttttttttttttttcagtcgtatttccatgcaggacacagaaggaccagtggggactcttaccttgtctctagctttggtctttttaaaaaaaataaccctgaataatcaggagaatttttttgatgaatgagggcactcctctccagctgtcccaggggtgcgaggagaacagtgtccatgagggggcgccagagcaccaggcccggggctgcagcctcccgcacccacccggcctggcctgcagggccagctctccaggcgctcccagggacttcccggcctcctaccctgggaatctggaaactccctggctcagactcagcagcccagacgctgcctggaggatcctctggttctgggcattcaccactggctttgtttggacaaaggctctgctgcgtgacagatcctgggggatgcctgagttatcgttatcatgctccagcggaagtgggtatcctcgtcc

SEQ ID NO: 96079 - DNA, 13273 bp, Homo sapiens
aaaggataaagcgtttcatagtagaagatttcagttgtatctgacatacacaaaacattactttctaatggagaaatctgtaaccaaaaaaagcataaataattaaagattttggtaactgctaggaagaacataaacagggcacagtaacagagagtacgggcttgtggggaaagacctccaactagatagaggagtctggagagttttatttgaggaagtgatatttaagctgagttctaaaagataagaaggagcctggcttgcaaagaatgaaggtggaacgaggagggatttcagaaagagggaattaaggggtatgggggagaggaattgacacaaaatcagtgtctttagaatagtgattgagaggagatatggtatgaagtgaggttggagaagtgggcacatagcaggtcatataggaccttaaagaccatcataaggagtttggaaagaaaaatgtaatgtgatgccgtggaagtaggagagtgataagatctggtgtttgttttacagagtttctctggctgctgtgtgatggtgttttggaagggagcaacaatggaaatggggaaactagtgtgatattcaggaaagagatgatggtggcttgggttaaggtggtttaaggcagtggaggtcaagtgaagtcacacacacagaagttgctgtaggttggatgtgagggatgaggggtgaaggaagggtttctggctttcataattgtcaggtagtaccaggggacttcaagggtggtgatggtggagaattaaggacccaattttgggcatgttgagtttgacatgcttgtgtgacagctaagtagtcatattggagcatggggagaggtctctgctaggggtgtaacttggtagttattaacatgttgatggtatttgaagtgatgggaatggatgagacaacttagagaagatgactcaggattgaaccccaaggaacacttgccttttagaggtctgtcgagggagaagccataaaaagatactgaaacagtaaccagtgatgcatgaaaaaacaaaaaaaatggcattgtagtatctcagaagccagaagaagagaatgttttaagaagattgtcagctttgttgaatcctgctaagaggtcagataaatgtggaagtagtagaccttgataagttgatttaatggagtggagggcttggaaactttgttttgagtagattgaagaaaatgagaagtgaagaaattgagacagatatagacaacaactttttcaagataatttaccctgaagtggtgagcagggaaatagcaggtagctggagggagatgaggggtcaaaggagaactttaaaaaaattagggttcatttaatcatttacttattatagaacattagatttagtggtaagaagatactgtctgaatgcttctcatttaaaatgacatagaaaattagctaagaggttgtgtgtagtggctcatggctgtaatccctgcattttgggaggctggggcaggaagattgcttgaacccaggaattcaagactagtctgggcaacatagtgagacccgccccttctctaaattttttttttttttttttaattagctgggcgtggtggcatgtgcatgtagttccagccacttgggaggctgaggtgggagaatagtttgagcccgggaggtcaaggctgcagtgagccatgatcgcaccactgcactccagcctgggcgacagagtgagatcctgtctcaaaacaaacagacaaaaagtaaaataagaaaattagctgagagtaggtagtgaagagtgaatgagggaggtttgaggagaagcaagaaatagtcattttggggagtaggaaagctttcaagggcagctttggtggattgcttggcatcgttgagtgtccatttgaggtttgtgatcatgaatatatagtgaagtcagtcagcttggttatgtgatttttcttcagcaacattcagctgattgggcataggcactagaaaaggcagacaattggatttaaccaggattggagttgtgtcaggtggcagtgatggagaggacaaatgattgagggtatttgcaagggagagattgtaattatggaacacggcatcaaaattggacaaagagggtgcagaaccggagtgggtagataatggaaaagtggttgggatgggaggacttcatgacgtcaaaaattgtagggaggggataccagagaaagctagttagaagtaagggaagttctttgagagtataattgaaacgtaataaggaaagatgggtcttttaagatgatgcagcttttcttctcttttttttttgagacagagtctcactctgtcgcccaggctggagtgcagtggtgcattctcagctgactgcaacctctgcctctagggttcaagcgattctcctgcctcagcctcctgagtagctgagactacagatgcaccaccacacctggctaatttttgtattttcagcagagatggggtttcaccatgttggccaggctggtcttgaactcctgaactcaagtgatccgcctgcctcagcctcccaaattgctgggattataggtgtgagtcaccgcgcccagccaagataatgcagtcttctgttttaggggtggtagctctgggtttcctaataactgggagtaagagctctaacaaatcacttaattgcctttcccaagaggctagctttgagatggaccgctttctccatgtatatatacatctagagcttagtttagacatcatagaaggtaaccaccattcacagaagtttctgggtctattctctgaatgacatcagtagtagcagtgttttggccagtgcacaagtacagtatgtgtacaccaactcccaaaccctatctctgtcgtttgttgttgttttttacttttttcttgagatgagagttttactatgttgcccaggctggtctcaaactcctgagctcaagcaaaccctcctgcctcagcctcctgagaagctaggattacaggctcacatcaccacacctggcttcatttgttatttaaagtcttggtaatgggcagaggtagagtgcagggttatttatatccagggtaagtttttcagtgattttttttccagtcttgattcagttttgtcagtgaataggtatgatttagtggaaatgatcttggagtcttaaaaacgaacgttgaacttttggctctttattcactagctgtgagaccatgagtatattatgtaaccactttgggcctcaatttcctttgatctgtgaaaaagataacagggcctgtcttacagagatattgtgaagatgcaatgagataatgcatgcaaagttgtggcacataatatgctctgagtaaatagtagcggttggtggtgttacattgaaaccagcaagtgggagaggaatgttcactgttttgtcttccagggtggtttacatcccctaactggaaagtggcagccatatctacgccttctcccatgagtcgctactgctgcatgtggccagtgcctctgtctagaccagcttctcagatttcggtgtgcctgagagttacctggggcttttgttatcatatgattttgattttgtaagtctagggtggggcctgagattcttcaaatctaaggagtttccagttgatgctcattctgctgttgctggtccatgtgtcacatttgagtagcagaattctgttagagattgccctgtgggaatccctgctattttaagctgagaggaagtgagggaaaaagagcctcattctttcgacttttttttttttttttaagtcagcttcatagacaatactcatacatctcatttctctacctcagtgttgttttggtgagtctgtattgtctctaccagtccaggaagtgataggaatataaactatgtatagagggttgcctcagatttcttctgaagaatttttagtgcctgatttctcaggtacatttttgagaaattgtgctggctcccccggtatacctacttccccccgctatcctcttacaaccacagagaaactcgtataaaacaagtagcctgccagcctggccaacatggtgaaaccttgtctctactaaaaatacaaaaatagctgggtgtggtggcaggcgcctgtaatcccagccacttgggaggttgagacaggagaatcacttgaacccgggaggcggaggttgcagtgagccgagatcatgccactgcactccaacctgggccacagagtgagactccatctcaaaaacaaacaaaacaagtagcctcttgaattattggagtcagaggcagagcatctaaaatgtggctccagaccctttctgcccaccagactcacattgcaaaatccagcatttttgagatgtaggaattcaggaagcaaggttagaattattggcaatacccatattgctgtcccagattatctgatttttctttctcagaagcaagcatgccagaaacttcttctgtgggccctcctcagaagactttctttagtgctcaaatggacacattctctcctctgaactaacagatagggtgataagctatcagtcacaaagtctgataacatgctctcctgatagaatgaagtatgtgtgcatcttaatctctgtgtataagactgtgattctttttagagtctctttatagtgtggagtttttacacctttttgtctcttaatgtgaattgtatatagctataaagcatagctttccttatttgactttgataattggaaataaatttttttcttctcctaccactttgttcccccttttttctttctttctttttttttttttgttttgttttaaaggtagaaaaatgtgaacatgcaggagcatgaataaaaaagataacttagcttccctgtgggtttttggtttttgtatgttttcataaaggtaacatacagaagagttttatttctgaccagactgaccacctaattttaaagattatgatcagaaaagaaatagatgcatttataataggaatttacaagcccttcctgtggttccaaagaagtttatggtggttccacccatgggagtttcagaggtagtttgcagagtttttgtgacatatttaaacttttctttattttgagggtttcttttcttggtatttttctcctgctttgctgcagggtatgtcttttatattttattttattttattttttatgtttgttatgttatgttatgttatgttatgttatgttatgttatgttatgttatgttatttttgagacagaattttgctcttgttgctcaggctggagtgcaatggctagacctcggctcaccgcaacctctgcctcctgggttcaagcaattctcctgcctcagcctcctgagtagctgggattacaggcatgcgccaccatgcccagctaatttttgtatttttagtagagacaaggtttctcatgttggtcaggctggtcttgacctcaggtgatctgcccgcctcggcctcccaaagtgctgggatgacaggcatgagccaccacgcccaaccttttatctttatcctatcctaaacttgattaaaagataacactataaaattacagtatgaagatccagaatttcattgtatttattttattgatacttggttaagaatgaatgactgccagtggtcatggtggctcatgcttgtaatcccacactttgggaggcccaggcaggtggatcgcttgaggtcaggagttcaagaccaacctgggcaacatagtgaaaccccgtttctaccaaaaatacaaaaaaattagccaggcgtggtggcgtgtgcctgtggtcccagctactctggaggctgaggtgagaggatcgcttgagcctgggaggcagaggttgcgatgagtcgagatcacgccactgcactgcagcctgggctacagagtgagaccctgtctcagaaaaaaaaaaaaaaaaaaaaaaggattgtgggagaagatggcggccgctgcacaatcccgggttgtctgggccctgccaatgtcacattctgccattactgcaatagccacatccgtgtgtcacagcccactccattgccagcttcatcatgccctcatacctcatgggaaaggtgaatgttcctcaagtcagtgggattgtggccactgggtttggagcaacaggattcctgggccgatgtgttgtcaaccaccttggacgcgtggggtcacaggtgatcataccctatcggtgtgatacatgtgacatcatgcaccttcgtcccatgggagacctgggctagcttctgtttctggaatgggacgcgagagataaagattctatctgacgagtagtggaacacagcaatgtggtcataaatcttgttggacgagactgggaaaccaaaaactttgattttgaggatgtttttgtgaagattccccaagcaattgctcaggtgtccaaggaagctgaagttggaaaattcattcatgttgcacatctgaatgtgaatattaaaagctcttctagatatttgagaaagaaggctgttggagagaaagcagtgagagacacatttccagaagccattatcgtaaagctgttggacatctttggaagagaggatagattccttaattattttgcaaatatgtgttggtttggtgctataccccttgtttccttgggctggaaggcagttaaacaaccagtatacgtcgtagatgtatccaaaggaattgttaatgcagttaaggatcctgatgccaatgggaaaacctttgctttcgttgggccaaatcgatatctcctctttgacctggtgaagtacatctttgctgtggctcacagcaaaggggtacttcctcccgtaccccttgccaccttttgcctatcagtgggtagcaagagactttgaaataagcccatttgagtcctggacaacaagggataaagtggagcgtattcacatcacagacatgaccttgtctcacctgccyrgcttagaagaccttggtattcaggcaacaccactggaactcaaggccattgaggtgctgcggcttcatcacacttactgctggctgtctgctgaaattgaggatgtgaagctggccaagaccgtcaacatttagtgcctcccgagcaactcttggttttggtgtcttttgggtcagcccgtgtggtttgagcacccagccaggtggtctctttagagaatcctgtacacagtgaataagatcccaccattaaaacatttgaggttaaaaagaaaaaaaaagaatgagtgtcgagtaataaaagactcttcaaagaatttgaaaaaatgaatctcttatcagtgtaattttaatatagttatttacagtatggtatggggagtgttggtgacttaagatttagggcatgagcccatgtaactagagaggaaagttgtgtataaaaactgattatggacatgtaaaagagtctaagtaacactttatggaaagtcaagatttatttttctttttttcttttatttagaaaacaggctatctcagtttcaggcttggaagttctttctcctcttttgtactagaaatgtagtaatcttgccttcagaagaagcagagaggttctatgtagagaaaaagaaaaggtttgggtgaggccaagaagaatacctgccccacctctccaagtttaaatgagctgggagtttaaggtgggaggagagaaaacgttcgtctgcggaaagcatgcgttcagtgtgaaagaaaaggaaaagtgattctatttctaccctaagaggaagaaaccccactatggcaggtaactaagcccagagcacgcacagtgggaatattaggtagggagagtgaaagtacctgcatggggcctaccttgaatgtgagacttgtagaccttacttggagattttataagcaggaaggagctgtttcagcatgtctgagggggagccaaaaccctgaggcagctggaaggtggtttttgtttgctttttattttgttttgtgttttctttaatgagtgggaaggagtggaatattcctcaaaacctgttaccgtttgagaatgttttgtgcacctactgtgtgctaggtactatgcaaaagactccatggccaaaaatggatgagccaagacgagatgttaggtctccactgaggaagatgtgcagaggagaagtggtttgctataggaatacttggagaagtagcccacagaggtggtcaatgccatgttacaaacaccagtccccacagagaaaggagagctcactcacagctggggtttgcttttggatttgaacatggagaaaggggtcggggaagcaaggaacacgtatgggcattgacattggcattagaatatgggggataattacgtgattttctgaataaaaaccattaggacaggtgatttgataatacttgttcaccactgggcataatgaatgaaaactcgcctggcatataggaagtacttaataaatgtttgaactgaattaaaattagaaaacatggtcaccaggaacatggcagacagtttacgtagttatatcattacaacacctctgaaaggagtattaaacctattttttggtagaggaaacagaagcctggacaggttggaaactttccccaggccataatgatagtacttgtagatctagaattgaaacccaagccgtgcaccttagcccgtctgcgtggtgagtaaagtgtctgtaccatgctacgagctcatgatccacttgactccttcagaagccaggctatgttgatgtgaactagggcagtagtaataaaaaagatgaaaagcctattcagttttatatcttaagttttcctgtgttttgaaatcttgcaagattaagaattattagtggtgaaatgacgtaaagaatagtggtgtcaagcacacattgtgagaaaggaatgtgggctctgagcaggttctgtgtgtgtgcttggcttctgcaaggggctccacaattggggcagagggaaagcttggctcacttgccttgatcttagagggcagagatttttgattgcttcattcatgtttaaagaactcatcttaaactaatgtatatctagcactagaaactggtgctggtggtttattactgaccccacccatccctgtcttttgcaataatctttgtgagtggtgattgtgtttctagaagtagaattgcagagagagattccctgaaggcaaatacagagagagtgtgctgtacactctagttcagatactcagagctgggaactcccagagagagagagagaaagagagagagagagagggagggacggagggagggtgagagggaggagagagaacaacagaacagtcagctggagcggaggggggaggagaccagtcttttcttttttttttttttaggattttttaactcaagtgattttggggggtttctccccacctcaaactcttgccccccagttttggcatcttctttcctgtggttcactgaagtgcctttttgcagtccaggatccactgaccgctgagtttgagcagcccgatctgacatgatgtacctctgggtgagtacagagtgctgtgggtgagggtttgcacttgcacatataaggagtggaaagctgcgaggttctgctgttgcacaaatggcctccccacagagcacagactgccacatccccttctgttccaaggtgttaggtttttaaaacctagcggtgattgtgacattgttttttttcctccccctatgttgtttatcttgtcagacttaggcgcaagggctgaactccctgcgcagtaccatcccctgggcttggtaggtttggagaaggcaagtggggcaggtgaagttgtgagctggttgcttcaggaactgcagtcttcctggtggctcaggatcgacttgtgttttgttttgggggtactgaccttgttaagccatgtctttagatattgagagccaataggcggcatgattattaattaggaataagctttcataagcttttatctaataatttttactatccttcacaatagtcttgtgaaataggtcactcactactgttattaaaattgtgtgaggaaagtaattaagccacaaagagtgacttgcccktagttagaaatcaagtctatagcagttagaatagtaattaataatgagacattataaagcattttatatttgccaggaatgtagtaccttctattactgtaatttaccgtcaatagtagcattgtagtttgggatggagagaaactttctgggactggagaagtttgtaaattatgaaatgtgataacttttagagaaatgtcaggggaaataatagagaaactgctcccccaagccgcctgcaatttttagttgttaagacaagaacatcttacagtccgttgcaaagatggcagtatgtctcttgagcaaacagctgttgtgtgttgctaagggagcctactagatgtgatgctcttggctactaaccagctttttgaaagtttccctttgccctttgcccttcagcccagatgtctggaattgcaggaacctacttggctaacacaggctaaatttataaattatcagaaagcaaatgttaactgcgtttgcagagatggagcttgttcacagaagatgtatatgtatgtgtgtatgttcggaggggctgcttttcgtgcttctcccttcatgtttaaatatgaccttgaaatattattttctcttctctattgattttttttgtagtatttgtaagagctcagaacttttctgacacactaatgtgcattaagtagttttcgcctccctgtaaactagtcatctgtgcaggctctttgcagccttgtgggtgggattgatcagccctgttgacctgaaggatgggctgttctgtcttttgatttgtttggaagaggagttatgaaaggaagcaagttgaattaatctcattttcactcacttatgtttgatgaaagcagacagtgacagtctccttagttatttcctttgtgcttatgttacagttacttgtgtatttatctcaatttttttttttacttattaaccctggaacagagcttccctaccaatgctacatgccagattgagatagaaatatgccaagattactataccccacaacccttggagcagccagctggggcttgggagtcccctggtcactttgatcatgtgcaccctaatttgtttaccactttgtgctataaaaatatttcctatgtatgccatgacacctgaaggcttgggtagcactgcctagagggcaaaaagcaggtcagctctatctcttttattatttgtgtcatctagcccaatgcctttgtttacttcattgaggacgtgcagaaggagctatagcgaataatgcccagatacatagaaggaagccttggtggtcacgcattcagtgggaggcacagaggagctgctgtggactaggaataggagatgagagttttagtgtaggtttagccagtaccaagccatgtgactttcggcagtcatataactattctgagactcagtttccacatgcgtaagataattgaactgaacctcttctgattctgaaattccatgaagtgaattttatgtaacagtagatatgcctgaaaaatgcccagttctgcaaggatgtttaggtctaggtgatcagagaaaactgtcaaacatactgtatcacctcccttgcatgcttggtttggtaccagtaatgggtcaaaggcactctttctgagtattctagaaaaattactggactatgttcagttgtcagtacctctgaattggtgcagatgggcatttttagaacctgtagaattgaagagtaaaagttacagcttatccaagcattttcatttgtgtagttagatgcagctcattaatttgctcctgtgtgtctagaactctgagatagaatgctatcttgtgcgctctctatgctgctttgccagattttctccccgctttcctgttgagtcatcctcttttttagtgaatttggtagcgtcagttggcagcatgaggtggtgaaaagaatacgggtttcagaaacctcactaggtctaaatcccacccctgccatttccaagtgtatgactgttaagttacttaacctctctgagcctcagtttcatttgtcatatagggaaaatagtggcactcaggattgttgtgaagatttgagataatctatgaatatacttaacatagtgaatggcacacaatagatgctcagtaaataactagtacaagccaactttttgctttgaacatttgcataggcagactactcaccactccgaagtgttttctgtatcacgttgagggtatctttgaattcatctagggagaactttgataaacacaaactagttttttgtgaaatatttttcctcttagtttgtatgttaagtactcgtggctcgggagcccttgttaaggttgcctcctgatggagaaaaatccccattatttgttgtaaactttttttttttttttgcgttgcacagtactattaagcattcattatgtcatttattttccctctctcgccatcatcaaaaacagggaaagagacagacagatatgattcctgtactgaggcaacttacttgtttgatgattatgtaatttatatccaataaacataattatagaccacttacttaaattaccagaaaacaggatatgttctccctgtctgtgcagtcttagctggacaggcaccaggccctctcttattcatgctctatatggatgaacttctggattttattttgaactgttgttttttcatagttcaattctgtcttcttaataaatcagttcagccaacatttaatgaatgcccataatgggtagagccagctgttgcaaatacaaagatgattaaagattaaagacatagtgtgccctggccggccttagtggctcacgcctgtaatcctagcactttggaaggccgaggatggcggatcatgaggtcaggagatcgagaccattctggctaacatggtgaaacaccgtctctactaaaaatacaaacaattagctgggcatggtggcacgcacctgtagtctcagctactcaggaggctgaggcagaagaattgcttgaacccgggaggtggaggttgcagtgagccgagatcacgccactgctttccagcctgggcaacagagcgaagacatagtgtgcccttaacaaatttata

SEQ ID NO: 96080 - DNA, 25592 bp, Homo sapiens
gtgaaaccccatctctactaaaaatacaaaaatcagctgggtgtggtggtatgcacctgtaatcccagctacttgggaggctgaggcaggagaatcacttgaacccacgagggagaggttggattgagccaagattgtgagatggtgccactgcactccagcctgggcaacagatctaaaaaaaaaaaagaattccacagtctcccccaacctcagcacacagcacacctcccctgctgcccctaggcttcttaactacacagcctttaggagggtgttgaccccatttgtaaatgaacaaccacctcacagagtgggacggacctgcccaaagtcactagtgggaggagaactccaggaattgtcagcctgcctgtaaaccccactacacagaggctgccccttgggcctggaccacccatacacaacaagtcacataccaggtacagaaaaagagcattgacagccccggtacttggacatactgacacatggcctcctaccaatagccaggagccagggaaaagcctgggttttggcaagacgggattgaggaggaatctcgactgtgctgtgtgaccctagaaaagccgttgcacctctctgatgtcagtacctacctctggaaattgagtataagggtactgtcttcagagatgtgttgggaaaaataagtgaaatacccaaaccaaacatgaaagtcactaacctccaaacttcagccacacgtctggcccagaagagcccagggtcttcccttcatagcagaatcctgccaggctcaggtctcaggccctccactttcagtcctggctgcttctgggtccctccaagtcacctttctgtccagtcttccctcccaccagtcctgctcttttctccccaaggcctcccctggtccccatctgagcaccagttgccagggataagccttcctcttaaagggacatagtggtggccacaggtacccccctacctggtcctcctgggtctgtacctcagggcaaataactctccctctctgggtttcagtggcctcatcatgtggaaagggttgttatgagaatttacggagagactgtaggaaagggatttgtaagcagcagcccatttgttaaggggccaagggtgcttatctctgtttttagaaaagtagatccagtccataggagacaaacacccctcctgcccagtgggccaccttccagatgttctggatccaagcactacgggtagggcccaggaattcgcacttcatctgtttctaggaattcttcagtcatggaacaggaaaatgaagatacctggtcaagtgtcctgtgtggtggtcagcccatagtaaaggaataagcatcagtttggtttttttgttttgttttgttttggtttttttgacacagagtcttgctctgtcacccaggctggagggccgtggtgcgatctcggctcactgcaacctctgggttcatgcgatgctcctgcctcagtcacctgagtagctgggattacaggcatgcgccaccacgcccggctcatttttgtatttttagtagagacggggtttcaccatgttggtcaggctggtctcggactcctgacctcgtgatccaccgcctcggcctcccaaagtgctgggattacaggcgtgagccaccgcgccggccgtgttacagttcttaaaggtggcgtgtccggagtttgttccttctgacgttcggatgtgttcggagtttcttccttccggtggcttcgtggtcgcgctggatcaggagtgaagctgcagaccttcgcggtgagtgttacagctcttaaggctgccagtctggagttattcgttcctgctggttgtgttcgtggtctcactggcttcaggagtgaagctgcagaccttcgcagtgagtgttgcagtttataaaggcagtgtggacccaaagagcgaaagaacaaaccttccacgttgcggaaggggaccccagagggttgctactgctggctcctggcagcctgcttttattctcttatctggccccccacccccacccccgccaccccccgcccccaccgccccccccacccccgccaccacccccgcccccacccccacccccccaccgcctcccccacccccccaccgcctcccccacccccccacccacatcctgctgattggtccattttacagagagccaattggtctgttttacagagagctgattggtccgttttgacagggtgctgattggtgcctttacaatccctgagctagacacaaaagttctccacgtcccaactagattagctagttacagagtgcggacacaaaggttctccaagtccccaccagagtagctagacacagagtgtcgactggtgcattcacaaaccctgagctagacaggctgctgattggtgtgtttacaaaccttgagctagatacagagtgccgattggtgtatttacaatcccttagctagacataaaggttctccaagtccccaccagactcaggagcccagttggcttcacccagtgcatcttgtaccggggctgcaggtggagctgcctgccagtcccgcgccgtgcgcccgtactcctcaacccttgggtggtcgatgggactgggcgccatggagcagggggcggcgctcgccggggaggctctgtctgcgcaggagcccacggcagagggtaggctcaggcatggcgggctgcaggtccgatccctgcccagcggggaggcagctaaggccctgtgagaaatcgagcgcagcgccggtgggccggcactgctgggggacccggcgcaccctccacagctgctggcccggctgctaagcccttcactgctcgggccggcacggcctgccgctctgagtgcggggcccgccaagcccacgcccacccagaactctagctggcccgcaagcgccgcttgcagccccggttcccgcccgtgcctctccctccacacctccccgcaagccgagggagccggcgccggcctcggccagcccagagaagggctcccacagtgcagcggcgggctgaagggctcctcaagcacggccagaatgggcgccgaggctgaggaggcaccaagagtgagcgagggctgctagtacgctgtcacctctcatcacctttcatagttctatcacgtggggtttatatcctcattacatataaagaaactgaagcccagtgaggaaaggtgacctgtccaagtccttgtagttagccaggaccaaactgcagttctcctgattccaactccaatgatctctccaggacaccatagctacccagtcagaaaaacaagaattgtgcctggggatctggtgcggtgggtcaggcctgtaatcccaacactttggtcacgcctgtaatcccaacactttgggaggctgagtcgtgaggaccatttgaggccaggagtttgagagcagcctggacaaaatagtgagaccctattctacacacacacgtgcacacgcacacaaacacaatgcagattttcatggcttcgtagcatttcatcttctagatgggtcttagttcatttaaacaattccatatatttttccttttttctattttcttttctttcttttttttttgagacggagtctgctctgttgcccaggctggagtgcagtggcgtgatctcggttcactgcaagctccgcctcccaggttcacaccattctcctgcctcagcctcccaagtaactgggactataggcacccgccaccacgcccagctaattttttgtattgttagtagagatggggtttcaccgtgttagccaggatggtctcgatctcctgacctcgtgatccgcccacctcagccttccaaagtgctggattacaggtgtgaaccaccgcgcttggcctttttttttttttttccgagtcagagtctcgctctatggcccaggctggagtgcagtggtgtgatctcggctcactgcaagctccgcctcccgggttcaagggattctcctgcctcagcctcccgagtcgctgggactacaggtgccgccactacgcctggctaattttttgtatttttagtagagacggggtttcaccacgttagccaggatggtctcgatctcttgaccttgtggtctgcctgccttggcctcccaaagtgctgggattacaggcgtgagctaccgcgctcagcctcttttcctattttctaaaagttgaattgctgactcatatgatctgcatctttttttttttttttcttgagacagggtctcactactgttacccaggctggagtgcagtgggaagatctggttcgttgcagcctcagcttcctggtgattctcctactttagcctcctgagggaccacaggtgcctgccaccatgcctggctaatgttttgtatttttagtagagacagcattttgccatgttgcccaggctgatcttgacctcctgggttcaaacaatccacccaccttggcctcccaaagtgctggaattacaggtgtgagccaccgcatccagctctacagttattttttatttatttagttagttagttagttagttagtttgtttgtttgaggtgtagtctccctctgtctcccaggctggagcgcagtggcatcatctcggctcactgcaaccaccgccttccaggttcaagtgattcttccgcctcagcctcccaagtagctgggattacaggctcctgccaccatgcccggctaatttttgtatttttagtagagacggactttccccatgttggccaggctggtctcaaactcatgacctcaggtgatctgcccatcccggcctcccaaagtgttgggattacaggcgtgagccaccgcgcccagcctgttacttattttcatgtgaaaagcaaacctacaaagcaggtggtgttcatcccattttataggtgaagacacaaagcctctgagaggtgaagtgacttgtccaaggtcccatagtggtggagctgggaaggcaacctggaagtgactccaaagtcaacgcaatggttaaataattgtgaatcgaatctgggaaggttggctgggaacggtggctcatgcctgtattcccagcactttgggaggctgaggcaggcagatcacctgaggccaggagttcgagaccagcctggctaacatggtgaaaatacaaaattactactaaaaataaaaaattagccgagcgtggtagtgggtacaaaataatcccagctactcgggaggcagaggttgtggtgagctgaaatcgtgccattgcactccagcctgggcaacaagagcaaaactccgtctcagaaaaaaaaaaaaaattagccgggcgtggtggcgcacttctgtagtttcagctactcaggaggctgaggcaggagaatcacttgaacctgggaggcggaggttgcagtgagccgagatcatgccactgcactccaacctgagtaacagagtgagacccagtctcaaaaaataaataaataaataaataaatcgccctgtgtcaaaaataaaataaaataaacataaaagtaagtaaaaatacaaaaattaggtgggcatggtggcacacgcctgcagtcccagctactcgggaggctgaggcatgagaaccgcttgaacctgggaggtggaggttgcagtgggcagagatcccgccactgcactccagcctgggcagagcgagactctgtctcaaaaaaaaaaaaaaaaaagaagaatctgggaaggtctccaagcaggtagaccctgagagctgggtcttatgtgtggacagaaggaataaggctcggggaaggcaatttggcaaagtccaaagcctgaacaaaggccttcaggagatttcttttcttttcttttctttccttttttttttttttttttttttttgaggctggagtgcaatggcgcgatctcggctcaccgcaacctctggcttctttggaatcaagcgattctcctgcctcagcctcctgagtagctgagattacaggcatgcgccaccacgcctggctaattttgtatttttagtagagacgaggtttctccatgttggtcaggctggtctcgaactcccgacctccggtgatccgcccgcctcgacgtcccaaactgctgggattacaggcgtgaaccaccgcgcccggctcaggagatttcctacagctcaaaatttgtaaggcaaagagatggccacaaaccttgtgagagtggatggggagcgacctcggctctcttagtcccgcctggcccactagacactgcactgcatggtagaggccccgcccgacccagccccttaatcggcctgttgcaatcactatcaacccgccaattctggccccgcccctgtcttccgggttcaccctctcacttcctgcgggtcccaggctcaggcccctcctccgccttgtttggagcaatccaatcgaacctggagggctccgctccgccctatgccgcgctcccctcctccacgagcaatgagaatcagctcaggccccgcccccgcttccgcmcgcctagaccacgccccttcttcatttggccaatcaggcagtccactggcccccgccccctaatgccccgccccgtcagcacttatccctgagctgcttctgccgttgcatcttcgggactccgccccgcgcgcggacctgcagccatggcagtcaccgcccaggcagcccgcaggaaggagcgcgtcctctgcctgtttgacgtggacgggaccctcacgccggctcgccaggtaggaccctgaagattggaagctcccaccgggagtgtcacgcggacacccccgaggctgagtgtggggtctgcagcagcgtgaccgtggacacccggggaccgagtgtgggatgcggcggtacccggccccctgacatccggggccacccaccgggagtgaggggacctggccctcacgtcactgaccccgcagcgtccttgcctgtgttctgcttgggagtgctggggttggatccagtactggagggaggaggctgcgagcaggggcctagctccctccctccccggaggctgtcacacgccgctaaggcctggctcacggacgcccccgcctcctgagctggggatcccaccctagttcagccctacgacacaccagtggtcggagctggcttctgaaccggggttccaggcacacaagcacacagccaagcgtcagtcatcatctggtgggagacagggcgtctcggagtcttcccaccccgacctttgcaggcctgggactgggtctagtttctgaagccccatcacccactttaccttccacccccagtcgtggagcagagagggcttcttttcaaattcgtttatgagctctacccacccggatgtgagaggctccaggcctagcctgtttgctgtgaggacactgaggaatagtgagggtaagagtctagttttcttctaaagactctcgctgtgttgagcctcttacctctgctcagtttttctcccattgggtctcattgtgagtgagtccccaaaagccccctcaccagctggatgcatcagtaagcaggcttcattcatgccctccctrtgggtaacccaccctccagtctgggggcctcaaggaccaaccaacaggtctcctagcgtgggggagcagtgggatgggctttactgggcagtggctgatgggaacccaggtcttagcctcctctcttaggtcccgaatgcccctccccatcctctgtggtgaagttgccctggcttgggccctggaggccttcctgcaggggtggatccgggaggaagatagcaggactggagcaaaggtgggccatttgcttgtgggtcacgcctgtaatcccagcactttgggaggccatggtgggcagatcacctgaggtcaggaattctagatcagtctggctaacatggtgaaaccccgtctctactaaaaatacaaaaattaggctgggttcagtggctcacgcctgtaatcccagcactttgggaggccgaggcagacagatcacgatgtcaggagtttaagaccagcctgaccaatatcgtgaaaccctatctctactaaaaatacaaaaaattagccaggcgtggtggcatgcacctgtaatcctagctagtcgggaggctgaggcaggagaatcacttgaacccgagaggcagaagttgcagtgagccgagaatgtgccattgcactacagcctgggcgacagagggagactcagtctcaaaacaaaacaaaacaaaaagtagatgggcgtggtgtcgtgtgcctgtagtcccagctactggggaggcagaggcaggagaatcgattgaacccaggaggtggaggttgcagtgagccaagattgtgccattgcactccagcctgggcaacaagagtgaaactccgtctcaaacaaacaaataaatgaataaaagaactggaacaaaagtggcagggcctaggcacagttctgactcctccctctgaccttttgctccacaaacataacaacctgaataagaacagcctattaatttgtctacgggccagcctctgtgcttagtgccttttgaaagttaatttttaatcgtacacattttcatgagcacactctcctggtaaagaatggaaacgtaacagagaagggtaaagtccactctgaccgcacttggggagcctggccggctccccaagttaatgtggttactgtggtgtggcttccctccaggcctttatctggatctatttgcccagagcaaatattaagcattgttttgtgaggctatttttgttattgttctttggctcctcaaaaatcaacttgattgtgatgctattttgttgttgttgttgttagagaccggggtctcactctgtcactcagtctggagtgcagtggcgctatcacagctcactgcagcctcgaactcctgggctcaagtgattctcccgcctcagcttctggagtagctggtagctgggactacaggcaagtgccaccatgcctggctaatatctttttttttttttttttttggagatgaaatctcattcttgtcccccaggctggagtgcgatggcatgatctcggttcactgcaacctccacctcccgggttcaagggattctcctgcctcagcctcctgagtagctgggattacaggcgcttgccaccacgcccagctaatttttttttctttttttttttgagacggagtctcgctctgtcgcccaggctggagtgcagtggcgtgatctcagctcactgcaagctctgcctcccaagttcacgccattctcctgcctcagccctcccgagtagctgggactacaggcgcgtgccaccacgcccggctaatttttttgtattttttagtagagacagggtttcaccatgttagccaggatggtctcaatcccctgaccttgtgatccacccgcctcggcctcccaaagtgctgggattacaggcgtgagccaccgcgcatggccaatttttttttttttttttttttaatttttagtagaaacagagtttcaccatgttggccaggctggtctcgaactcctgacatcaagtgatccaccctcctgggcctcccaaagtgctgggattactggtgtgaaccaccgtgccagcccatgcctggctaatttttaaaaactttcggccaggcacggtggctcacgcctataatcccagcactttgggaggcccaggcggatggatcacctgaagtcaggagttcaagaccagcctggccaacatggcgaaaccctgtctctactaaaaatttaaaacttagctgggcatggtggcaggcgcctgtaatcccagctactcgggaggctgaggcagaagaatcgcttgaacccgggaggcagaggttgcagtgagctgagatcacgccatcgcactccagcctgggcagaggtttcagtgagccagaatcacaccactgcactccagcctggatgacagaacaaaaattcgtctccaaaaaaattttttttttcatagagacaatgtcttcctttgctgcctaggctctagtctcaaactcctgggtcaagtgatctttctgccttggcctcgcaaagtgttgggattgcagacctgagccacagtgtccaacctgtctaatttttggtgtctaagctttgtactgcttcagatccaggtagaatgtgggcttcctgggttctcagcactaagtgagggctaagtggaggtcccagacatgttgaaagccagaatgctatgcttcccctctccccccatagaaaattgaccctgaggtggccgccttcctgcagaagctacgaagtagagtgcagatcggtgtggtgggcggctctgactactgtaagatcgctgagcagctgggtgacggggatgaaggtaggagtgaggctgggggtagagggagtggggagtttgagagattcctgggcgtcttcaaagatccagtcctgcttctgtggggcagaagaaatagagagagagcagccagatagttccctyactgatttgacaaacacttgagcacytcctattgccagggattgtgccaggcccttgagaaatggctggggcaaagcaagcagaacctgcccttatgcagtttacattctcatttctccctgctgagtcttgatttcctcatctttaaaatgggctgaaccagccggcacagtggcttacgcctgtaatcccagcactttgggaggccgaggcggatggatcacttgagatgaggagttcaagaccagcctggccaacatggtgaaaccccgtctctactaaaaatacaaaaaattagctgggtgtgttggcacgtgcctgtaatcccagctactcgggaggctgaggcaggagaatcgcttgaacctgggaggcggaggttgcagtgagccaagatcaggccactgcactccagcctgggtgacagagtgaggctacacatccaaaaataaataaataaataaataaataaataaataaataaataaaagggcagaaccaatgatggctaccatttgtcaaaaatgatcatgtgttaatgtcattgcatttgatccccacaatcacactttagagtaggcgtgatcatcccatttaacagaggatgactctgaagttatccaggaaatcgactggacctcagagcccctggtctcagcccagtcaaagtgggtgcctccagttcctcaagccagaaacttcctcgaatttttccttttccccacctcttgtttattccatcagcaaaccccaaaatatctccctgtcccctctgtctccatctccaccacgccatcatagtccaggtaaccacgtgccacccagaccccgcaacagcctctgggctgtgctccctgtgcctcccacctcccacccactccaactgcttcgcctggcagtcagagctgaaacctccaactctcccatgcagccagccttgagaacccagtgcgatggcagctatagaacagaagggagcccctctgcagaggggcaggggagcacagagtggaaatgatgccctctgccagagagtactgcatggcttccagaggaggaagctgratcttggaggatgagtggcagggaagccagggaagggcggttctgacagaaggacctgcatggatgcctgtgtgcagaggcccacaggtgtgactggcttctttggaagaaaaccaagctgcagagggagaaaggctggagaagcaggttgtagcctcagattgaacaaatggcctttgaatgtgaaaccaagggtgtaggcttcctctctctttacttgcccgtggggtcacagacgtggtctcacactctttcttcctcctgtcctctatgtgaccctgaagtcattgagaagtttgattatgtgtttgccgagaacgggacggtgcagtataagcacggacgactgctctccaagcaggtcagtgtcccccagggcttagccaggggcaccccacttttccatagtggagcagtccaagggggcttctgtcctgggctgggggagagacactgtgcctgtctcagggtcaggcagcccaggccacgctcagagccctgtgttccttggccagaccatccagaaccacctgggggaggagctgctgcaggacttgatcaacttctgcctcagctacatggccctgctcaggctgcccaagaagcggtgaggtcccaccagcctggtctccagaacctggggcctgagggaggagaagtgtgggtccctcagagggaacctggagatacttgggcccctgattttttgmggggagtgtggattcttgtcccctttgaagtcctaggaggctggggtcccaggtggggctagatttgaattcagggccgttctggttctctctggctccccgccctccctcaccaccagtggaaccttcatcgagttccggaatggcatgctgaacatctcgcccatcggccggagctgcaccctggaggagaggatcgagttctccgaactggacaaggtaccactagctatgcaatcttaggcctgtagggcctcagtcactcaatttatctgagcctttattttctcatcagtaaaatagactgggggatgtgttctgatttaactgataccctttcaggcacctactgtgtgccattgttgtagacacacctgcatctttacaatgctgctggtcccccttcctaggtgaccagcaccaggcagccacccactgagccaggccaacacctgggaacatcatttccaccttcccacccacatcgggtccaacaactcttatttcatcagcctctcgagtcagtgtcaaatctgttcatctgcagaactgagaccccactttctagattacccctttccccagccccaggctgccccaactttcctctctgtccctccctaccccttgcatagccctgccagcctgctctccagcaatgccactgagaacctttctttctttttctttttggagatagagtctccaaaaaaatagatagaggctggagtgcagtggcatgatctcagctcactgcaactcccacctcccgtgttcaagcgattctcctgcctcagcctcccaagtagctggaattacaggcatgcaccactacacccagctaatttttgtacttttttagtagaggcagggtttcaccacgttggccaggctggtctcgaactcctgacctaaggtgatccgcctgcctcggcctcccaaagttctgggattacaggcatgagccaccacgcacagcccattagaacctttcaaacatgtcagccgcattcaccccccagccccaccccctcatttacaatccttccttggctcctcgttgccaactggatgatgtcctagccccctgctatggtgcctcaagccctgagggctctgtctggctctggctctccgcgtctcctttctatgcccttcaagttccactttctattcctggaacacaccaaggtcctctcacctctgcctgtactgcccctgctaaaccttgatgtgcattttgcttttctccccaccgcctccctccctctcggggatggagcaatccacccatccagacctttccatgctggcccgtccacgtcattctgtcattctctctgacctgttcggtggctctccctgccctctgctccagctatggcctcttggctgattctagagtgctgtgcctctgtcagagcacacttctctcaggcccagctcgtccctcccctccttcaaatcccctttcacatccttttcccagtggggcctccgagagtatcacatccactgctgcacttcctcctccttcccctaccttatttctccccaagtagccttggacaactttcatcatctacttttaaaatccgaattactgtctgtccctgtcccagaactgtaagctccatgagggatttctgcggcttgttctcctctggatcccctatgcttggcacatggcatactttttgttgttattgtttttgagacagggtcttactctgttgcccagtctggagtgcagtgcagtgatccagtcctagctcactgcagcctcgatctctcaggctcaagcgatcctcacacctcagcctcctgagtagctgggaccacaggtgcattacaccatgccaggctaatttttaaaatattttgtagggatgggatctcgctgtgtctcccaggccagttttgaactcctagcctcaagtgggccttctccctcagccttccaaagcaccaagactgtaggtgtgagccaccgcacctcgcaaagaaatacccttttttgtttttttttttttggagactgagtttcgctctgtcacccaggctggagtgctgtggcacaatctcggctcactgcaacctccacctcccgggttcaaacaattcttctgccccagcctcccaagtatctgggactacaggcacatgctgccacgcccggctaattttttttttttagacagagtcttgctctgtcaccaggctggagtgcagtggcacaatctcggctcactggaacccctgactcgctggttcaagcgattcttctgcctcagccttcccaagtagctaggattacatgcaccacaatgcccagctaattttttgtatttttagtagagacggggtttcaccatgttggccaggatggtctcgatcttctgacctcgtgatccgcctgcctcagcctgccaaagtgctgggattacaggcgtggccactgtgcccggcctaatattttgtattttagtagagatggggtttcaccgtgttgcccaggctggtctcgaactcctgagctcaggcaatccacccacctcaaccttccaaagtgattataggtgtgagccactgtgcccggcaagaaataccttttgaatgaatgaaatgagctgtattatctccattttataaatgaggaaaccaaggctcgatgagaagggccctgcccgaggtcacatagggagttggttgcagagcaaagatttgattttgccattggccctctggtgcctccctgagggtgcctctcagctcagtgactcctgactcccacctgtgccctgaggcttaggggaggcagtgcccacaggcacagggactttttttttttttcttgatagagtcttgctctgtcacccaggctggagtgcagtagcatgatctcagctcactgcaaccttcgctgcctaggctcaagcaattctcctgcctcagcctcctgagtagctgggattacaggcccatgccaccacacctggctaagttttttggttttggttttggttttggtttggttttgggttttttttttttttttttttttgagatggagtctcactctgtcgccaggctggagtgcagtggtgagatctcggctcgctgcaacctctgcctcccgggttcaagcgattctcctgcctcagcctcccaagtagctgggactacaagcgcctgccaccacgcccagctaatttttgtatttttagtagagacagggtttcaccatgctggctaggatggtctcgatctcttaaccttgtgatccgccctccttggccttccaaagtgctggaattacgggcatgagccaccgcgcccggcctaatttttgtattttttagtagggacagggttttgccatgttcaggctggtctcaaatccctggcctcaagtgatctgcctaccttggcctcccaaagtgctgggattatagatgtgagccgctgcgcccggccacggggactttttttttggggtagttaggattggtcttaggcaaagaacccttcccccccaatacacgtgctgagaagttatcccttcctgtccacccaggttcccagtcccagctctacccatttgccttgtaacctggaaaagcatctttactaacgtgtgcctcagtttccttatgtgtaaggtgggggtaatagcagttcccatcccatgggctgtcatgagcactggatgaggtggcacatggaccccacctggcatggagttggggagccacaccctaactccccaccccagagccttctcaagtatttttggctcttgtttgctcccttctggcactggaggagcatgaaccttcctgatctgtgcgccctgccctggcccagagctggtgtaaataaatgcttaacccagctcatcttccagaaccctgaagcggggatgagtacttcccttccttagatgaggacactgaggccagagggtgagtaaccagctcgaggtcacagtgccggtccctgctgaggctggccttgcacatggggctgtctagtgaccagccttgttctccagagaagggaggtgcagccagcctcggccatgtggaaacatttcttcagagcctggggcagtcttagtggtagccctgggcctacagagtggacgctggtggggactctggcctccctggggcccacctacctgctggaaagccaggccaaggctggcagggggctcacatcccttatctctgcttttccatgagagggaagcaggcaggggtcattcattacttctctgtcctttagtccaggaaataggctcagagaggtcaggtgacttgcccatggtcacacagctgaggagtacagtagccaagcctggctacttgccttcagatctcaggctagggggtgtctggctttatatctgacatcctccctgggccacttctccaagctccatgctgctgaccactgcctgcctttccgccccagtcctacccggctctgactacagggccataccagccaccccactcctgtgctccagaatcctcagcgcctcttggtcccccaggatgtggtcagacttcccagcccggtctcgagaccctctgtcagctgaatgtcctgctggctggtttagatgttcagctgcccctcagactgggcatagctgctcccctttgtggccctctgagatggagatcctgggggctggcggggagaatgtccccctgctccacgtttgcggagctgctgccagagttcctgctcagagggacggggccggcctgggcactacctagtccccagcccagccgcgtctttgcatgctgggtgctctgccatgcctggcatcctgctgccctctgtgaatgcccacagccacctcctcacaggtctcctgctctcagctcccatgctcatttctgagtatttgctttgttgagctggttacagataacaggatcgagccctgccctgaggtggacactgatgtgggatccagattgcccygtctcctcgcccttcctactcgtgtctctcctctgaggtctccttcagaagacccagcccacagccccattggcagccccatcccttctggatttaggccctggctctgccaccagggctaggtgaccttgaccaaggcacaacccctctctgagccttagtttgcgcatctgcacagttgggggtcctacccacctagaatgctcagcacgctcacgtggactgtgtgcccagccagggcctggcacacagcaggtcctctgagctgccatccgctccctcccctctgcagaaagagaagatccgggagaagttmgtggaagccctgaaaacagagtttgctggcaaagggctgaggttctctcgaggtacgtccaccctgcagaggacctgggaggcctggtacagggcccctcctcaaaccatctgcccctgccaagaccaggctgtggcccccagtagctttagtagcccctccccggctcagggcagagagggtggctgagcccgatgcagaaaggggttcagtgtttactggcccccagttttccccacctcatacctcagaggtaaacgccccatgcccacccagtttctcaggccaaaaaaccagagcctctcccttgaatgctctcccccaccccttcccaagtccaaactcctagaagtcacagggccccctgtctggaatcccaccggtgctcacacttccactgccagcagcttgtcccaggctccaactgaccctgacacaactgggctcccctctgccacctcacccattccccagtggccagagaggctggagctggagtcatgacatgcctctgcccaaagtcctccccaggctcttcctccctctccatgtgatgcccagggcctgcccgtcctccccctacctctcctggcctcctccgttgctgggacgctcgttctcttccctgcctcaggggctgtactttgcgccccagccatccccactcggctcaggtcccagctcattgccacctcctcagaggtctcccctgatcaccctggccggatgagcttcccccacccacttcatggtcttgttcattctccaacctgtgtcataacttccttgaggatcctaagtctgtcccgtgtcctrttcctggccctcagtaggcactcaagggttgttgaatgaatgaatgaacaagcagcccttctgttagccttgtctgcccctcccagcagggaataacagtccccacccctgcccacaggaggcatgatcagctttgacgtcttccccgagggctgggacaagcgctactgcctggatagcctggaccaggacagcttcgacaccatccacttctttgggaacgagactagccctgtgagtgtggcccaccccaggtttcccctaacgcagtggacagtgagaagccaggtctggtggcttctccaatgcaaatcacctgaggtcaaggccagaacatggggcaacacaacagacctcttagggggctcctggagaacaaccattgctcaccagccccgttacacagattggaaagctggggccccaagaggctgggcacttgttctacatcacacagcaagtcagggcaggtctgacaaggggtgagaaggtgggcttcctggcagttctgaaggggcaggaggaggggcaggtccgtagcagccaatgtggagagggactccacctaaatatccctcctctgcccatcctctgtgtgcagggtgggaacgactttgagatctttgccgacccccggactgttggccacagcgtggtgtctcctcaggacacggtgcagcgatgccgggagattttcttcccagagacagctcatgaggcgtgaccggggcccacatctgtgtgtcgtgacttctgaagagtttggcctaggcctaaagagaggtcctggtgttggatagatgccagggcccctcctctggcccaggacgcctgctgcaagcccacccagatggggccagagtctgtgtggacaaccgtccccagccagtctgctcctagtggcactggcttcgtcctcccagggcccagagtgttccccatgctccacctggtggcccaggccacagctgctgcttgtatttcggtacagaagaggtttctttctgcaccaggaggaggcgtgctcaagtatcggtacgagatctagcctgccctgcctgcctgccctgggcgatgaggtacggtggggaaggtgcctattttagagaactttgtcacagtattaaagttcccagaacaaagtaggtgtcagctgtgtctgaatggataattggccccagtcacatgctgtcacagccactactttgccgacaagtaaacagcacagagagggcagggacttggcccaggtcacaaaggaagtctgatgcagtcgaggagggggccattgaatccccaaagaagagctggtttggtgtgtccacccccagccccttccttggggaccctgacacagaggcagcttcaggccacggtgggtcacagttgagggtttattgccagtgttaggaagaatggggggtctgggtggccaggggtcttgggaggaattccaaatgagcactgcagggcctgtgagtggggaggagagctgctgcccccctgccacccaggaggccccagggctgatgccaccatatcctgactgctagtggtgccttaaaaggtggcctccccacaggaggggagccttgggggcccccaggagtcagccctcaccaacaagccctctctcaagggggccaggggcctttattcctcatgggacaggctgggccgtgcccattttaggggagctgaccacacctcagcagctctgggctcccagattttatgtggtgggccctggggccgggggtgggatgcaggcatcccggctgatttctaccctgcggtcttggggcacctacaaggcaagggatcctcctagacagtcactgatcccctcatcctgggcatttgagcccccagttttactcacagactgagtctcataagggtcccacccctggccagccctccctcgaaccacggccccacttctccccggtcaggcgatgtgctctctagaagggagggtggtaggcagggggtgcacccagaggtggaggcagacagggccctccttcctggcctcctgggccaggccaccctcacccctgcctgggagtgaatggccacgaccccgggtgcacacacatcttggccccaaaaggactccaggtgacagcaacagccacacatcttcagggatggatgcaataagagccacacctcggccactggtctgttagggctttgggaagagagtttgacgtggaggccgcagggccagtctcccaggctgggggccctcctcgtgggtgccccggacgtgtgtccgtccctcgcggcatccacagcagccgtcagccgggcatggcccagagcatcagtggggcttgtgagtcagggtaaaggaggtctgcagccaagctggagagatggacccccaccctctgcaaacccctgggctcggctcagtacagcccaggggaaggagcccagcgccactgccaggctgaggaggagggactggccggcgaaatgggagccccaaaccccttccgccctcaggcccctcttcctgcctctccatggcactgagagagcagagcaggaaggaaggctggcctcggcagtgagaggcctgtgtgcctccgtgtcagtcctcctcccctgccagaggctgagaggctccccaaaagcacccatcggccaggcttctgagggaagggtccaggctgtggcgggggacctcagccaagggagggagatgtaagtagcacagagagcctggctccgggccagggactgacacgggacagctcaggggcggaggccagggagtgagcccagcgcaggctctcgcagctcagtcaccgtggggacgggtaagcaggagggcgagcgggtcctgcgtgtctgcggcagggaggggaggagagaggcagtggacagcgcgaagccaggtctggtggccttgccctccacctacctcctggccagcttgcacagtagtcacgggtcgtggggtgggtggaggcacacgctcatagccacaagcacagacggacagacagacgtgcacactgaggccaccgaaggactcatcagccagggcagtggggcatggagccggctgctgcccgttcaccctgtgtggctccccaacccccggccagctggcctgtgaaccactcagcctaggagcccacgacctggccagaccacgtctcgtggggagtgtggggggccagctgagtgagcaccacctccacggcctggaacttctggttcttgggagggatagggcacatcttgtaggtcacctcrtcgccctccactggcacgtactccccctcgatgctggcrggcaggaagaggggtattagcccagcagcaggccctgtgccccagacaatcctgtggcctggccttgggggcagcctggccctaagcctccctaggccaggaggcctggccaggccttgcttctcagaacctcagctctcgaatctgtaaaacgggactcatggctgggcacagtggctcacgcctgtaatcccagcactttgggagtctgaggcgggcggatcacctgagtcaggagtttgacaccaacctggccaacatggcgaaaccctggctctactaaaagtacaaaaattagccaggcatggtggctggcacctgtaattccagctacttgggaggctgaggtgggagaatcgcttgaacccaggaagtggaggttgcactgagccgagattgtgccattgcactccagcctgggcgacagagcgagactccctctcaaaaaataaataaaataaaataaaatgggactcataaactgtacctccctttctgggtcccttggggaccgagatgtgaaagggcacggggaggtccctaaagctctgagaagctcagtgacctcccccggtcctcctggcattagaagtgggtggggccaggcctagacatgatatccatctctacctcctggcccacccacatgaaggccctttccaggccaagaggctcaggagctggcctagccctctcagacctccacgatgctgtaacaggatccagggcccagccgctggctcccaggcttctggggtctgcgtgcccactccctccctggccccagccctcctctcccaacgcaccctcagcccctactcagaggacagaaaaggcaccatgaatacagacctcagccagtgagaggagaggcctggagagccatttttgaggcaccattggggacactagggcaggggccaagaacagggaggtggaggggactcactcagacacatgtacgaagatgtcctcggacccgttctcgggggtgatgaagccatggccctgtgagcgtgagaactgcttacagacgcccttgaacacggggccagctgaggcccgggctgtcctggagatagggtagtgggattggagctgtggcctgaggaactcctccccggatccctacagccattctgggccctttctgctgagcgtgcctcagggctgtgagaaacttgacccaggccagaaaccacacagtcatccccattcaacgataatgaggccaggcacggtggctcacacctgtaatcccagcactttgggaggctgaggcgggaggatcacttgggcctaggagtttgagaccagcctggacaacatagggagactcccatctctacaaaaaaaatttttttttttttttgagacagggtctttctctgtcacccaggctggagtgcaggggtgcaatctcagctcactgcaacctacacctcccaggttcaagcaattctcatgcctcagcctcctgagtagctgggattacaggcacccaccaccacacccagctaagttttggcatttttagtagagacagggttttgcagtgtttggccatgttggccatactggcttgatctcctgtccttaactgatccacctgtctcgacctcccaaagtgctgggattacaggcatgagccaccatgtctggcccaaacatttttttaaaaaaatgagctgggggtggtggcacgcaccagtcgtcccagctactcaggaggctgaggtgggaggattgctgaaggccaggaagttgaggctgcagtgagccatgactgcaccactgcactccagcctgggcaacagagcgagaccctgtccttcccaaaagatcctttggcctcccccatatggacccgtattactcccctatgccacctcatcggtgacctaccccaaaggcccaggcctagtctttgtcccgcctacctacccctctccaaaggttaactccgtgtcttgggttttgcccatgctgtaccatctgcccagaatcgccagctcccttcttcacctgatacatcttccatacccaaccaggacatcatctcctctggtaccccatgctgggtcctcacccctaaccctgctgggtggtaatggatggtgaacaagttccctctggattgtaagcagcttatggatcctgactggtcaggagctcagtaaatctttgtggaatagatggatagatgaatggatgggtggatggatggacggacagacggatggatggacggatggatgggtgggtggatggatggatggatggatggacaggtggatggatggatggatggatggatggatggatggatggatggatgggtgggtgggtgggtgggtgggtgggtgggtgggtgggtgggtggatggatggatggatggatggatggatgggtggatgggtggatggatgaatggatgtatgggacaaacatccatccagttactggaaggtccacacacagttcccctgtcccaggtgaggacaacaggagttggaagaggatggggatggtcagcccctgtcctgacaagggtcaggggcctgggcaaggggcaggtactcacgctgaataggtcctggtccgcttggtgggcagagggctgggtaggtcccgaggtgggacaccaccccgctcccagaccctgctgccctccctgtggaaggggaaggtgggccagactggggacttgggggagtggagcgggggcacaactgggggtgacgtcgactctgaagtcatggtggggccagcaggagagcctggtgggctctggggcccaggggccggtgaggggtttggtcgtccttgcgggcagggcccggcctggccctgctctgcggcctcaccagccacgggctccgtctggaagaggaagaaagaggcacaggtgagcctagtccaggggagcagctcctgaaccctggccacagtgaggagggctggtcccacctgctatcctcacggcgttacttcaagtcacaaacgaccccatcgtggttcagagtcctcaccagaaaaacaaaactaggggtcatatgacccctaagtccttccagtttgcagttcaattctcttaactccaggggcctgggaggtggctgggtagggtggccagtgatggtctagaatatggttcggcataagggtcagttgtttcagagtcacacatctgggttcaaaccttagctttgtcacctacaacttggtgacttcaagcaagccaagccacacatcagctccaacatggcaggtgggagtatgggctccacacccaggcctgggtttgaatcctgcatcctccaccttctggctacatagccttggctctggtcaaatttttttttttgttttagacagagtctcactcttgttgcccaggctggagtgcattggcacgatctcggctcactgcagcctctgcctcctgggtataagcgattctcctgcctcagcctcctgagtagctgggattacaggcgcctgccaccacacctggctgattttttgtatttttagtagagatggggtctcaccatgttggccaggcaggtctcgaactcctgacctcaggtgatctgcccaccttggtctcccaaagtgctgggattacaggcatgagccaactcgtccagcgcattggtcaacactcttaacttctgactcttattttctgttctgtaaaatggggctagcattgatcctttgtttttttttttttttttgagacatggtctcatccagtctggggaacactgacatggtcatgactcactgcagcctccatctcctgggctgaagcgatcctccc

SEQ ID NO: 96081 - DNA, 72172 bp, Homo sapiens
  misc_feature (1)...(72172): n = A,T,C or G
ctacctgggcctcccaaagcgctgggattacaggcgtgagccactgcccctggcctacttacagcttagctttaagatggtaggctcctgcccagccccaaaatttaattaatttacattaacttttaacctttctccttaggggtgcaatgatgagaaaaaaaaaataaaaggttaagaaacactgagtcacgacgggcgtggtggctcacgcctgtaatcccagcactttggaaagccgaggcaggcagatcacctgaggccaggagcttgagaccaggctgaccaatatggtgaaaccccatttctactgaagatacaaaaattaggctggacacggtggtccatgactgtaatcccagcaactttgggaggccaaggtgggtggatcacaaggtcaggagttcaagatcagcctagccaacatggtgaaaccctgtctctactaaaaacaaaaaattagccaggcgtggtggtgcacgcctgtaatcccagctactcgggggctgagacggaagaattgcttgaacccaggaggcataggttgcagtgagccaagatcacaccactgcactccatcctgggagacacagtaagactctgtctcaaaaaaaaaaaaaaaaaaaaaaaagccaggcatggtggcatgtgcctgtaatcccagctacttgggaagcttaggcaggagaatcgcttgaacctgggaggcggagattgtaatgagccgagatcgtgccattgcactccagtctgagtgacaagaaagaaactgcgtctcaaaaaaaaaaagagtcagaccacctaggccctagtcctgggtctgtcacttattagccacgtgaccttgggctaaccaagttgcttaacatctctaagccttagcatcctcatctgtatcacacagaacttttggaaaacaatgttcagctaagtaccttgcatatattaagagcttcataaatgttagtgctatttttcttattttctggttgggcgaactgaggaaaatggtaaacaaaaggaataaaggaatcaagattaaggggattacatgatgtggcaccataagaacctacaaatcagtcctctggtagcaatgtccatagacatcatccctgtctcctggttattcttgtggctttgaaaaattataaatgagaatacctagcttagcttacctgtctaattcccttatcaattatgaaagttgcaggaagacaataataacaaggggtaccttggttgtaggaaggtttctgcataggaaagagcctcggccacttaatctacatgatgatctgtaaggctgagagcctggatcatgtcactggacttctttgtgttccttggaaactagkgctgaaaatgtgagctagattccatctcaaatgtcctcagaacattcgtgtataatgtgaagtaggggaagtgacatctagaataagtctcagggacagaatgaggcatgaggatccaaaggtatcagttcacacaccacattcagaggagtcagacagcaattaacatttattaagcattctctggttgcaagcttacgctacataagaactctagctagacccatgcaaaaattcaagaaaatgctgtcttaaatggcttaaacagatatcctgtatctagtttaggaactgtttgttacttttcttcactgctgttaccttatcatgctttcactgcttatagaccagaagtaattaacaaacacctactatgtgctagacaacctacaggggatacctctggatgacttacagggacagcaccaaaatacaagtaccatgcttgcaccgcatgtcaggcactgtatcatgacctaaagaaaaggagaggcaaatagacaaaccaaagtcctgcctctaatgaagtgtaatctagctagtagactagatttggattttcggacagcagaatgtgacttgatagttgaaggtaaatgcaaatcagagttgaggacaagagaaaggtccaaatcattatgtttttggtacttcaggacctttctcatctccctaaacaacagaagattcaatggtgtactcactttttttttttgagaaggaatttcgctcttgttgcccagattggagtgcaatggtgtgatctcggctcagctgactgcaacctctgcctcctgggttcaagcgattctcctgcctcagcctcccaagtagctgggattacagatgtgtgccaccacgtatttttagtagagacggggtttcaccatgttggccaggctgctctcaaactcctgacctcaggtgatccacctgcctcaacctcccaaagtgctgggattgcaggcatgagccactgtgcctggcccaatggtgtggtcttatctggcccaatctctcccacttactgggggtaggcaggatccaagtgcgtgaaatgaggtactggcgttactgccttcaccatgggcacatcccagaaacacttgtaaaaggacaacataaggccaggcgtgatggctcacgcctgtaatcccagcacttcgggaggcccagatgggtggatcgcaaggtcaggagtttgagtccaacctggccagcatagtgaaaccccatctctactaaaaatacaaaaactagctgggcatagtggcatgcacctgtagtcccagctactcgggaggctgaggcaggagaatcgcttgaacccaggaggcggaggctgtggtgagccgagatggcgccactgcactccagcctggacaacaagagtgaaactccatctcaaaaaataaataaataaataaataaataaaaggacaacatagtgaaataaggacactacaaggtttagttgaacagcctgggcttgtcagaggaactacaaaatgggcatcataataataatccctatttcacaaacttattgtgaggaacaaggtgtgataacatctataaaagacctattcttcgctcatgggaatatgaagaattacgcatcttttgccttattctgaattagaattaaattagataactaggtaccatcattaacctagtgagactgtatcatacttccttttgttttttgaagaaaacaagctgattcatagttttctcccacaaagaaccctgctgccaatactaaccgaaaaaaatggggtaaatcttgcctgtagcactagtctataagctctctctcctggcatttggctcagagttgaatagaaagtagccactgccactacacagtgtcaagggacaaaaaaaatcacgatgcaggtccacaatcatttctgcaatattaaaccaaaggcatctgttacctgcttaaagctgaagtcaacttgaattgtcccaaattcaactttgtcacgatatacacccaaatagtgcttaatgatagatttaagtggctatgacacaacatgggctgtacaggacttataaacagacagggtctctgtcacccaggctggagtgcagtggcgtgaaaatggctcactgcagccttgacctcttggtcccaagtgatccatccgcctcagtttcccaagtagctgcgaccacaggtacacaccagcacacctgactaatgaaaaatatgtttttttggccaggcgtgatggttcatgcctgtaatcccagcacttggtgaggctaaggcaggaggatcacttgagcccaggagttcgagaccaacctaggtaacaaaacaagaccctgtctctacaaaaaaaatttagccaggtatggtggcgcatgcctgtagtcccagctacttgggaggatgagatgggaggatcgtttgagcccagggggtcaaggctgcagtgagccttgcacatgatcatgccactgcaccccagcctgggccacagagcaagagaccccatctcaaaaaaacaaaaaacaagaagcaaaaaacaaaaaacaaaacacttttttttttttgagatgggatcttgctctgtggcccaggctggtctttaactcctggactaaagtgatcctcctaacttggactcccaaagtgctgagattacaggtgtgggccaccacgcccagccggatgtcatttctgaataagaataaccacagagacatgaatgagagggctctccaaattgctggtcttgacaaagatttgcttcccttgcattcttccccttgatgcaaaataactgccttttattggactacacccagtttgactcacagaacttgaagaaattataacctagatgactagatgaacacagtaatctccatagaccataggagattgcagtggatggcaaagtgttactaaacaaaaggagggaaggtcagatggaaagctgtacacttacgtccttctcctggatggtgcactccttacaataataggcatcagagaccccaggtcctccacagatcacacagcgcccctggtaagatccatagttacactcatcacatatgcgcaccagagtgcagggacgcacataggagtcacaaatcacacacttgccatcacctgtaaggaagagaatggagtcatgctcacaagttcttcagtcctctgctatctcctgccatggggaaatatactagtctcctgggaaatacactagtctccttttgacagtgactttagggccctcctcttggcatcacaaaacttggtttccccagtgtccatctcaagcccctcaacacatacaaaagtttaccaattaacatatgtgaagagcttagaaaagcacctcggagatgataagcctgtataattgctggcaaagtgctgtgtgttggggaggggtcatgctactctggcgattcttcccgttgaaaactagagagatacagcgttaaatgtgcaagcggcagtggggagttagaggggcctttggctaaagtgcagcattcagtgttcacatacttccaggcacatctactcaaagccctctttgtggcacttttgctggttccacagaaaactgggagtgggaagggtgggttgttgggacggtgtgttccactcacatttttcacacagtcttccgatggctgcaagatgaaagatggtaaaaagtacaattagaataaaggttttgagaaagaggagaagtacctcctcgagctgggggtagggacatgagtaaggactgcagtgagtgagacctgcggatagccattttatcattacaaatttccatatgaaccaaacctacatccaagcaccctcctgaatctcctccaacgccctgggcaagctcagagtttctctggacctggttcagaccccaccccccgatacctgcctggggctcccagyacgcgcacccccgccctcttctcatcagaggccacaaacctgcgcgctcctacaacaccccgcgcctgagaggcgggaaacgtggcgcctgcgaggcaagcccctaaggaagagacgggaacccccgaccccycagctcctaataccacccctgcccagacagccaggggtagggcgcagtctcaccaacaccagcctgcttgcggcaaaagatcaaatcaggatgatgtttagccatagctcctaactaagccggccaccggaagcttcgggaacttccgtccgacctttaacccccattgttcctgcctccacgtcgctgtgattggttctctaagcttccgtcagtttacaatccttgcaccaggcccgtcttgctctcgcgcgagtttttgtcgctgctgggcggccaggtcctggcaggtgcatgaaactcttaaaaactctcccagatttggatggcggagataactaaaatttgttcttgggtaaaacatctttgtgcttggtatctatttctgcaagtgtctttgggcagtccgatttcctcttgcgtgtctgttcgttgcacgtgagctccgcccattgcgttcacagggttctggcgcctctagggaggcctcgccttcaccgtgacgccccactcttccgggcacgcccctgcccaaaggctttaaaggcgccgtgtgggacgtcactttaatgcgacctcatctttgtcagtgcacaaaatggcgccctacagcctactggtgactcggctgcaggtgagcgagctcagggacctctgggttcacsggggcggggtgcctcctactgtgccggcggctgtgggcgaggcagggcgaggcgggcccaacctggggccaacttctcgtgtacctgtcccggttgtgggcccggcacccgtgcccrcttctctggtgccctaggtcaaggcgtccccggcacagtcagctttcctggccctgtccctgcctcgcaagaagcgtgggcccaagcagcggcggccgggtgaagagcggaggcacctctttcttctttttgaggacagcattgcctgctcccgtggggtgtgtttccattcctcaaggtgaggacaaggtgactagggggcgcggtcgttgttgagtcttctaggcccagttcctgaggcctcacttcccatctcttagcaacagaggcatgacagcatctacggttgccaggcctggagtctggagaagaaactaggaccctgtaccaccttttgaggaccctgcggaacgtggaatgtcrgggaggggggcggtcttctgggcccatacgtagtaaataatrtaataatagtctctcacctttgcacaagatttgaggcctgttttaattcttcrtaatattatttgattcmtgtaatcgtaggaatgaggtggtttttctcatttgatgataaagctggtagaaagtaggtgaaagttctgattctcaagagtgtcaccgaagtgctgtggcagaagcatgggccctaccaccactcagttcttgtttatgtcagcctgccctcacagaactttatgaaccacggtgcaattatttctgtttgtcagaatgcagtacgaatattttgagcctcacaataagttgcttgtcaaatatgggaggataaggagactccagtttgaccttgactcccctgttaggagctatctagaaagctgactgactgccagatgattttttcacttctaacttgacagccctgggaaggtgttatactcagaggttcaatgtcaaatgtgtactttgttaataaaaatcaagcaagcatctgtagacattctctgtcaacctttcacatttaactttgtgaattccttttggatcaagtggcgcaactttgataatagaattttacgagttgttatgcgttgtactctcaggaagcttgtggtacttgaacttatttttcatcacattgcttaaatttaaacttgaacttatttttcatcacattgcttaaattgaaaccatatggtttaaagtaaaatcatcatttatctgaaagaaaatatttctgatctcaattccgggctaagggaaaggatttgcacctaattatctctttacatctttttttttttttttttttgagacagtcttgctctgtcacccaggctggagtgcaatggcgcaatcttggctgactgcaactctgcctcctgggttcaagtgactctcctgccctcagcttcccgagtagctgggattacaggtgtgcaccaccatgcttggctaatttttgtatttttagtagagacggggtttcaccctgttgaccaggctggtcacaaactcctgacctcaagtaatcggcctgccttggcctcccaaagtcctgggattacaggtgtgagccaccacacctggcctcttcacgtcttttgattctctaggttaatgatgtggaaatagttgtttcttcctgtctcatgatttaagggagtcaggcaagattatttgrtaagataaatgattatagagttcttgaacttggaagagaagaatagtatcacaccattttgaaccgaaaaggatcttggaaagtatgagtattagactggtgtagaaggagatctgggctctctttcctgatcctgtgaccttgagtaagttacttcctgaatccattgtctgtccattggagatgatcttcattgaacaaatgtatattcagcaagtggatgttagaaagtgatgagcaagtagaatgagtttacaaccatcacgtagactaacctcttatacaggtggaaaaatctaagaccttgagagcctgggtgacttccagtagcagagtcaggattaaaatcctggtctccttgtttgttccttcagctaagatgaatgaacaatattatgcagtttgcacactgcctcccaataaccaggctgtctcaaataacyaactaacacggtttctctgagaagcttgtatatttaccccttttgtgcttagatacatttgagaagtgatggttactaccttaatagtcatgtatgcaaaaccctatgcctgtagtcaattcattcctacctcattcaccatatatttactgagcgcccaatgcttgttctggataccgtggtaagcaaagacagtccctgttctcgtggagcttccactgtattctaatgtacctgactgcagagggccttggagatctttctcagccaaatatagtatttttctttccttggctggaccaaaggtgaaggtagataatagaatgatgggtgttactcccagcactaagagtacctaacatttatcttactgtgtatgactaatttcacatgactctgtgagatgaggcaggcctattagcctgatttatagatgaagaaacaggattagagagcaaacatagtgttatggttgagagcatggactctggcatcaggcagcctagatttgaataccgtaatgactctaacactcatgtagctgtgttttgggtaagttactcaacctctctgcacctgtttccttgcctttagatacaataataatagtatgtctgtttcaatcatgtaatagttgtaaagtatttagaaccctgcctggtacttaataagggctatataattgctaaataaatttgtggcagggtgcagtgtctcacgcctgtaatcccagcactttgggaggccaaggcaggtggatcacaaggtcaggagttcgagaccagcctggccaatatggtgaaaccccatctctactaaaaacacaaaaattagctgggtgtggtggcaggcgcctgtagtcccagctactcgggaggctgaggcagaagaatcccttgaacccaggaggcggaagttgcagtaagccgagatcgcgccactgcactacagcctgggtgacagagtgagactccgtctcaaaaaaaaaaaaaaaaaattgcctggggctttatcagtagttgttagtaggtatggtttgaatctggacatgtctgattccgaagcctgagggcttagcaactggcactatgctgcttccctttggcatcgagctcagcctgtggatcagggcaccataacctcagaacagtgccaagttgaatgtgtactctcgtttgacagtacctgctaccaggtagtaagattagaaataagaaaatagaacgtgggttttgttttattttgttttgtttttttaaagaaatgggggtctcgctatgttgcccaggctagtctcaaattcctgggctcaagcaatcctggcttggcttcccaaagtgctgagattacaagcgtgagccactgcaaccagctaaggaggtgagatttttgaaaaaccacatttattctctggtttttagcatttatttttgtgcatatgactgagtagtacacaagaggggctgagcagttgcaagtatgtttattaggtgtttggttttgccttgagataactggggtgctgaggtttcatgtgaccttgggggaagtcatgtaacctcttgcatataaatttgtgatggcagttaactacaaaaatatttggcagaaactctgtgccatgttaaaataaaatcttggtttgaattgtgaaacagatgattctggttgtatggtcactgtgataaccttcgcagatatcagttgttattagaattgagtgaatgaattggtaaataagcttccatcttagatgtggacagagggaacagacacaccatcctgaggattaagggagcacagcattacctttcaaaccaactgcttcacagtgttctttgaaagctttggctgggctcggtggctcacgcctgtaattccagcacattgtgaggccaaggcagatgcatcacctgagatcagaaattcaagaccagcctggccaacatggtgaaacccaatagctaataaaaacacaaaataagccgggtgtggtggcacatgcctgtaatcccagccactcgggaggctgaggcaggagaatcacttgaacccaggaggtggaggttgcagtgaaccgagatcacgccattacactccagcctgggcaacaagagtgaaactctgtctcaagaaaaagaaagaaaaagcttaatgtctagcactgcctagcattgttctagacactgggggtgcagtagtgaacaagaatagtggggcttaaattgttgtcctggggaaattacgtagaaaaataagaatattgtattactgagtgttgtggggaagataaggtagagagaataggggtgggaacatggcatttttaactggggtgtttggggaagacctcgtagaagaggtgacatctgaactgggacttaaatgatacgaacgcagctgtttaccatttttggaggagacttcaaatagaaggagcatgtgcagagcacccacctaggtatgagctgagtgtgttgaggataagagctaaggccagtgttgctacagtgtcctgaggagcgaaaggtctgaacaagaggctggggctagggtcaggcaggcttcggtaaggaaatccaagtgtagtgaaaactgggagattttaagccagggagtgatgtgatctgatcatctgggctgctgcgtgcatgatggaccatagagggtcaaaaggaggaggcagggagaccagtgggggactgttggagtcatcccaggaatggcagaggagtctgggactagggatctggggggtggagataatgagatgtattcaaaattgggatatatttggaggcagatgggttggcgcatgggagggatagagaataagggtgactcctgggtttggggtcttagtaactgagggatgggtgagcttgattgaattcagtggtcgtgtgtttgcagtcattttttttttttttttttttttgagacagggtctcgctctgtcacccaggctggggtgcagtggcgcgatctcggctcactgcaagctctgcttcctgggttcatgccattctcctgcctcagcctcccgagttgctgggactacaggcgcctgccaccacgtctggctaattttttgtgtgtttttagtagagacgggtttcacgtgttagccaggatggtctcaatctcctgacctcatgatccgcccgcctctgcctcccaaagtgctgggattacaggcgtgagccactgcgcctagccttttttttttttttttttttttttgagacggagtctcactctgtcacccaggctggagtgcagtggcgcgatcttggctcactgcaagctccgcctcccaggttcacgccattctcctgcctcagcctcctgagtagctggaactacaggcgcccgctaccatgcctggctaatttttttttgtatttttagtagagacagggtttcactattagccgggatggtctcgatctcctgacctcatgatctgcctgcctcggcctcccaaagtgctgggattacaggcgtgagccactgcacccggcctgcacagtacttataaaaattagctaagggcagaatctcattgataaatttttgattctttcatcagttctcaagtactttatttcacaggtgagaaagccagatgacgtcaagtgtcttacccaggggccctcacttgagtcgagtatgagcatattgtctcatgtggactctgtcctatctggtcttattgtgaaacctggtgtgtgtccaagagggccatcttgtaaatgcttaccttttttataaaaaaaaaaaaattgttttttcctttttttttttttttttttttgagatagggcctcattctgtcagccaggctggagtgcagtggtgtaattatagctcactgcagccttgacctcctgggctcaagcagtcctcccaccccagcctccctagtagctgggactagaggcatgtggcaccatgcccaactaattttttattttttgtggagatggggatcttgccatgtcacccaagctggtcttgaactcctgagctcccaaagtgctgggattataggcgcgagccactgtgcctggctagtgggaagagagtgttgagtcttccttggctccagctttctttgacttgcctcgttttcccagcacctggtttggaaggcagtggtgggctctgggcctctcagcatgaaggaaggaaggtattgtagagagacttcttgtagcctttaaaaagcagcaaatgggccggacgtggtggctcacgcctgtaatcccagcactttgggaggctgaggtgggtggatcacaagctcaggagttcgagaccagcctggccaatatggtgaaaccccatctttactaaaaatacaaaaaaaaaattagccagtcgtggtggcgcatgcctgtgatcccagctactcaggaggctgaggcaggagaatcagctgaacccaggaggtggaggttgcagtgagccgagatcgcgccactgcactccagcctgggcaacagggtgaaactctgtctcaaaaaaaaaaaaaaaagcagcagatggaccctcaggagccttaggagacttctgccactggcttactgggtagcttcgggcaaagtctcaactctctgtggtcctgcagttagttacacatctgcaaaacagtgtaattaataactacccttcagttaagaagggttctgaaggcctaatatttgaaaagttgttttgactctgtttgatgtgttataaagcattgtgagccgggtgtggtgcctcatgcctgtaatcccagcactttgggagcccaaggcaggtggatcacctgaggtcaggagctcaagaccagcctgaccaacatggtgaaaccccgtctgtacttaaaatacaaaattagtcaggtgtggtggcgcatgcctgtaatctcagttactttgtgggctaagacaggagaatcgtttgaacctgggaggcggaggttgtactgagttaagattgtgccattgcactccagcctgggcaacaagaatgaaactctgtcttaaaaaaaaaaaaaaaaaaggccagacgcagtggctcacacctgtaatcccagcattttgggaggccaaggcaggcagatcacctgaggtcaggagtttgagaccagcctgaccaacatggtgaaactccatctctactaaaaatagaaaaaaattagctgggtgtgtgggtggtcgcctgtagacccagctactcgggaggctgaggtacgagaatcgcttgaacctgggaggcagagcttgcaatgagccgagattgcgccactgtactccagcttgggcaacagagcgagactctgtctcaaaaacaaaacaaaacaaaaaaacaaaaaaacacacacactgcaaatagtttctgatattattttaggaataggccatttctaagattgagagtagggacagattttccccttgtagaatatcttcattttggaagtcttgaaaggtagggagaatgggccaggcatggtagctcacggctgtaatcccaggactttgggaggccgaggtgggtggatcacttggggtcaggagttcaagaccagcctggccaacatggtgaaactctgtctctactaaaatacaaaaaattaactgggcatggtggcgtgtacctgtaatcccatttacttgggagactgaggcaggagaatcaggttcaagcgagtctcctgcctcagcctcccaagtaaattaaaggtagggagaatggtttccatattatttatttatttatttatttatttatttatttatttttttgagacggagtctggctctgtctcccaggctggagtgcagtggcgcgatctccactcagttcaagctccgcctcccgggttcacgccattctcctgcctcagcctcctgcgtagctgggactacaggcacccgccaccacgcccagctaattttttgtatttttttttttagtagagatggggtttcacggtgttagccaggatggtctcaatctcctgaccttgtgatccacctgcctcggcctcccaaagtgctgggattacaggcgtgagccaccgcacccgacctctttagttttattctgcagcacctgggccagaggaaggggcaccagctttggagccaggcctggaattccaccttgctgcgtgaccctgggcaaaacagttagcattccagagcttcagtttcctcatccattaaatgggcacaatgccttctgcctcacagggtagtcgtgggattgtgtggataaagtacttggggcaaatccagtgcagggtagaggcacttggtgaatattcatttctgtctccagcccctgcagatggcccgcggcatccatcaccccagcctttatccttagctcatacgtttaaaaaagaccagttgtggccgggcacagtggctcacgcctgtaatcccagcactttgggaggccgagatgggtggatcacgaggtcaggagtttgagaacagtgtggccaatgtagtgaaaccccgtctctactaaaaatacagatatgagccgggcatggtggtgtgcgcctgtagtcccagctacttgggaggctgaggcagaagaatcgcttgaactcaggaagcagaggatgcagtgagccgagatcacgctgctgcactccagcctgggcaacagagcgagactctgtctcaaaaaaaaaaccaaaccagttgtgaaaattgcttgttcctcccatcatctccccagatagcaggtaagtggtagttgttcaaggaaacctttttttcaagatagagtctcgctctgttgctcagtctggatgcagtggcatgatctcactgcaacctccacctcctgggttcaagcagttcttttgccccagcctcccaagtagctgggatcacaggcacgcaccaccatgcccagctaatttttgtattttttgttttagtagagacagggtctcaccctgttggcaaagctggtctccaactcctgacctcaagtggtccagctgccccagcttcccaaaatattgagattacaggcgtgagccactgcgcctggccaagaaaaccctttcaatactgttttaaaagagttgggggaagaggtagaaatgaatcttttggtttagttttttaattctctaaggacaacattggggaagtgagctttagagttatatttgcagtatttatttttatcatgaaatattcaagtctaggcccttggtgaattgaggcctggtgagtatttctgctttccccctggagagattgagatggtttctgattgggagctttaattctgtgggcatttgtgggacttaccaaagaggtatctagagttcctttaaaacccccgccctgtccctgccacatatcttcttttttttttttttttttttgagaaggagtctcactctgtagcccaagctggagtgcagtgagtgacacgatctctgctcactgcaacctttgcctctggggctcaagcaattctcctgcctcagcctcccaagtagctgggaccagaggcatgcgccaccacacctggttaattttcttgtatgccacacttctttagttccttgtagccgggctccttgaccttctgcagggcatctgtggttgtggtatttataagcactcactgtgtcatgagtgtgttcacagagctctaagacaagggccctgtctgtggaagagcttttagggtggtgagggagaagtcatctaaatagctataatacacggtactgaagcaaggagtaggtgggggaatttgctgggtgggactaagtacagcctcagccacccgtcctggaacatggatgtagtggtggtgtgtttggtccgcccacagacaatgacagatgcccatccaggcctggaggagcggagaaacgcattacccaccatctgttgagcaatcaggccctctgtgccagtcacagaactaggtcttgttttacaaatattgcctcatttgtccttcacaacaaccctaagaagtacatatgagtagcctgtttcacagtgatgaaactgagtcccagagaggttaaatagctcctctgaggtcacagctagcacatggatgcagatttgactgcagaacccaggctttttaccagtcagccaaaccgtttccccagagggagtagaaactgatctctgtggagtgggctggatataggggatacagttcagtcggctctgtgcctgtttgggttatgtctttgagactgtgattgtctcctgccctaaacaccagtgaggctggtgggggagaggctagaggggtgggttgcacagaggcagctttattccttgactgagcttcagctcagcctcacaggctgcctgttgagcttgcagagaatgcccgtctcaagtgtgtaggtgcagagctgctgcctgyggggccagagcagggcttgggatttgtatgcagttcatagtgtacgactgatgtaggcagcaaaagagaattagtcagatgagcgaatctgtcatcagcctattccttaaaggaaccccctgctgcctttggtacccatttagaggctttgacttggagagacatggctccttgctccctttccaagcctctgaaaaggactgcatcacttttgttcctgccagttgcatagcaaccaagctagctgactgcctgctggcaggagggaattgtttagctttgatttcttaggagaggagccaggcatcgcctaccaggagggggagaaaattgttagaagccctgcaatggaggtgtgggaagatgcttctccttaggagggtgtggactgatgtgcattcctgtgttgcccacttagacagagtccacctgagacttctctgccaggaagggctaggcagttagttgctaagagatgtgagcccgaagtcatccttctgtgaaatgggctgccgtgtaatgtatgagttccccactgctggagacagcttggctaggttgggtgagtgtgttaggcattcaaatacagaaggagtggatagatgaggccttttcagttccatttcaattccaagatgtgctgtcctggtgcttgggacctgctctggggctctggtctttggtggctggggagggagaagtaggcggcatagtggaaaaacatctgcccgtaatcctctccccagtacacaggcaggccacgttttagtagcagcatctcattctcccaggcgaactgagtaatagcagcttacgtttattgaatgcctgccagaagcccagctaccaagctctatgcctttcgtatatattttttgtaatagaatgcagtatattcataaaagctctcttctccccgtcccagtccccagggcaattttgtgtttatcattctagacttttcctctgtatttacaagtctttctaatcctcacaaaatctctgccatttttgttgttgttgttgttcttccgagatggagtcttgctctgtcacccaggctgcagtacagtggctcgatcttggctcacagcagcctcaaactcctgggctcaagcaattctcccacctcagtctcctgagtagctcagactatagacacaggctaatttttgtatttttttgtagagatgggggtctcgctttgttgcctaagctggtcttgaactctgggctcaggagtggtggtgatccacctgtctcggcttcctaaagtgctgggattacaggcatgagccattaccctcggccaaaatctctgctcttttacccccatgttacagaagaggaaattaaggctcagagaggtaaagaatcttacctgaggtcccacagctagggaagctgagattccaagccagatccctccagccctagagtggatgccatttctgtgactcggcacttgtcttggagtgtttccatgatggcactctgacaagtgcttggtgacttctctgtcagttgttaaagcaactgtctcaagagacctggcctctcccggaccctggcctgtttgggtggctcggcaccctcagctctgtagcttgctctgtatgctggggctcactggtacatggctccccaacaagcagtgctgtatgcaccatgctggacaaggtgggcagaagcctgcccgagaataggtcagtccgtttcgattgtagtattctctgaatacaactggtcccaagggaagacctccgacctccgtcctttgggaagagagggcagcatgtctgactttggccgagtggggttgtggggagttctgagtgggtgtacatgtgatgtgccgtggggtgggcccttttcccatctgccacagctctgaacccgtgctgttgctcatcacggcttctgccagaggcacttaacttgagtttgaaagcacaatccagaaggccrgtggtcgtgtcacggctctgccttcatctgtttcatcagtaagtctttcttgaacttcttctatgtgttggacattgtcctaggttctgaatatattgtgaccagaatagaccattttttgtccccatggagcttatattttagtggactttactttcccatctggtccaagtctctgtcttctcatgtaaacaagggacagaatgacctgtagtartcccacttggcacaattgttagggtaagagagctgttgtcatctcgccagcagcatcctttcttcccttgtcttgcctagccgtgtggtgcctggctccccggtgggggtctgctgtggggatgccccttccctcagcgtttgcccactgttctgtgttggtagatgcaggatcagcagagcctcccttactccctggaagccctggagatttgtggctcatccagctagactcagcaaaggcacttagggtcagcagttgggaccaacaaccccctggaggactcagcccacctggccgctgggcctgaagcagaggttgggagacactgtcggtagcacagggagaaagtctcggcctctgcaagttcccagctgtttgaccttaggcaggccccttcctgtctctgagcctctgcagcttcaggcagttagggaggctgagctatgcacagcaaggttcacaagagtcacacagagatgtgtgggaggtgatagttactccaaaacagatctgtgggcatctggctactggtcaccctgatgggagactcccacttaggtgtaaaattaggaagttgttttgtggctgaggaagtgctataaygatgcttaggatggagaagacataattgtggttttcagtgatttgaagggctggttgtggaagactgactagcctcatttgatctggttccaaaggataggactaggaagttaggcctgtcatgtgccaggcactggtctaggttctctcctttcatcctcactgcagcctgtgaagcattatccccatttacagatgggaaaaattgatgtttagagggattaaataaaaccacagaaggttatacagcttgtaaggggcagagctgggatttgagcccagatctccaaagctggaatgatgtaatgggggcacattttcatttgatttaagaagcattagtttaaaatcttagaactgaccagtagtagaataggcttttgggaagagagtgagcttccagacctagtcatgttgaaccagggggcttatgggagttgatgaggggagattttctgcctcgaggccacctcagtcctgccctcagcccctttgttccccagaaagtgggggaaagtggagggcgagggcgcagtgaaagtatttcttctagatgagggcctgggatttaccagtgaggattttacaaggcctgagacgtaggctccaagtatgggaaaaaattttcccgtttcccagttttgggaaaactgtgttggatggccttatgggtgacctcaggaatgtctctgtggcctgaggttgaactgagcattgagtgtgttttacttttggaatcaggaaataaaaacagaactctgtaaagttatttttaaaaaatatggctgggtgcagtggcttatgcctgtaatcccagcactttgggaggccaaggcgggcggatcacttgaggtcaggagttcgagaccagcctagccaacatggcaaaaccctgtctttactaaaaatacaaaaattagctgggcgtggtggtgcatgcctgtaatcccagctactcagcaggctgaggcaggagaatcgcttgaacccaggaggcagaggttgtagtgagccaaggttgcgccaccgtattccagcatgggcgacagagtgagactccgtcttaaaaaaaaaaaaaaagaaaattaaaaatatgcccaaggcatcatcatcatccttccttaaataatactgggctgggcatggtggcttacacctttaatcccagcactttaggaggctgcagtgggaggatggcagatacttgaggatgtgttctctcaaaacgacagtaatctaagaaaaatccattgaatccaggaaacaagaatccaactcaagaggaggacaggatattctaaggatactaatggatgtgagttccagagaggtattagaccttatggggaaggagacagaggctccaggagatgacgaggctggtggatctcctgacgcattcataatatcgagtgtcgtagccgatggagagtttgagaatgaatttgtgataagtacaccaagtgttgaagtttgttgtctttggggcagggaaatggggggttgggacttgagtcctggtttcctttataatgatagtttttaaattttaataatgcgtaaagatgttactctgatcaaaatagaaaattacattaaaaacaaaagtatcaaatactactaataaagattagtattatcagggttgtatttgctcagaaacttcagccctgacacctgttcagtgtgggtacaatggattccatggtaccagggattgtggggagggagagatgcagcatggactagtgcttggtgccttgcttggagtcattgagtattagagacccacaagatatcctgtaccaggccagggagctggtggatgggtaatgatgatagatgtccctggatgggcttcagggagtctgtaaaattgtgtgttttatgatttttctatattttctccatgaaatatatcttgctttttataacggaggaaaaattctggtaattttttttttaaatagagactaggtctcactatgttgcccaggctggtcttgaactcctgagctcaagtgatcctcctgcctcagcctctcaaagtgctggaattacttttagtattttacatattacataattacatacttgctattctttgggaacccattcatattatttcatgcctcacagtaactcagaataacattcatatcatttcattcctcrcataatactgcagatattattctttttttccaagtgaggaaattggggtgaaatgtgcttgtcatgtaggtagtaagtgacagagctgggctttggagtcagctcttttttttttttttttttttgagatggagtttcactcttgttgcccaggctggagtgcaatggtgcagtctcagctcactgcaacctccacttcccgggttcaagtgattctcctgcctcagcctcctgagtagctgggattataggcgtgtgcgaccacactctgctaatttttttgtatttttattagagacgaggtttctccatgttggtcaggctagtctcaaactgccaacctcaggtaatccacccacctcagcctcccaaagtgctgggatccgtgagccactgctcctggtcaggttaagttatcttcactgtgccacattgccccttgtaaacagcaggttatagttcaggtttttaggacagcgagccacaccctcccctgcctggctgggtttccaccctgatcttccactatttcctgctttgtcttttttttcgagatggagtttcactcttgttgcccaggctggagtgcaatggcacaatcttagctcaccacaacctctgcctcccgagtagctgggattacagcatgcgctaccatgcccggctaatttttttttttttttttttttttgagacggagtctcgctctgtcgcccagtctggagtgcagtggcacgatctcggctcactgcaggctccacctctcaggttcacgccattctcctgcctcagcctctcgagtagctgggactacaggcgcccaccaccacgcccggcaaatttttttttgtatttttagtagagatggggtttcactgtgttagccaggatggtctcgatctcctgaccttgtgatccacccgccttggcctcccaaagtgctgggattacaggtgtgagccacggcgctcggcccgcccggctaatttttgtattattagtacagaccgggtttctccatgttggtcaggctggtctcaaactcccgacctcaggtgatccgcctttcttggcctcccaaagtgctgggattacaggctcgagccaccgtgcctggcctcctgctttgtcttttacaccccagcattttgagtgattggcagcttctgcatgcttcacttggtgagtctctgtgtgcatgctgtgtgttctcttcacctgccctgcaaatgcctggttgccctctgcgaccctgctcaggcgctgctctctctgtgaagccttgtggaaacatcccaggcagagcttctcattctctgtgctccactcctgccccttgtgtgtgtgtgtgtccttctttcaaaggttacagtgaggttttgcatttacttcctgatcttggctagactgaggcatattagtctagtgactgtctcactcttcttggtatctgagtcctattgcttggcacataatagagtgcaaatgtgctgctaggaaagagggtacacgataagctactgtcaacctcttcttttttttttgagacggagtctygctctgtcacccaggctggagtgcagtggtgtaatcttggctcactgcaacctctgcctcccaggttcaagcgattctcctgcctcagcctcccaagtagctgggactacaggtgtgtgccaccacgcccggctaactttttgtatttttttttttttttttttgagacggagtcttactctgtcgcccaggctggagtgcagtggcgcgatctctgctcactgcaagctccacctcccaggttcatgccattctcctacctcagcctcccaagtagctgggagtacaggcacccgccaccgtgcccggccaattttttgtatttttagtagagacggggtttcaccatgttagccaggatggtctcgatctcctgacgttgtgatccgctcgcctcggcctcccaaagtgctgggattacaggcgtgagccattgctcccggcccattgtgtagcatttctacaccttcaaggtccctcgtgatacctggttcctttttgtctcctcagtcttattttctgccatttcttcttcactttgccacaaccaagctgcttttcttttgttttcttttttttgagacagtctgtctctgtcgcccaggctggagtgcagtggcgccatctcggctcactgtagcttccgcctcccaggttccagtgattctcctgcctcagcctcccgagtagctgggattacaggcgcccaccactacgtccggctaatttttgtatttttgatagagacagggtttcaccatgttgaccaggctggtctcgaactcctgtcctcaggtgattcacccacctcagcctcccagagtgctgagatgacaggcatgagccaccgtgcttggctgcttttcttttctttcagttgcaagtgctttcttgcacatgctgttctctctgtgccaaattccctggactccttcccctaaagcccatttgtttagcctcagatcaaacatcactttcttggagaagcccttcccccattctggattaagctgtccagctttatgctgttacagcagcttaactttttatcacagcacttctctcacatagtcacttacacagtcccttgagtgatgacttgacatgttttctcacctaaaattcaggcaccacaacacatagtctgggactggagaaacatttaatgaatcaggaagacgttagtttaaattggggaggtagtatgggagggaaagcattgacttgataattggagggcttgaattctgcccctaacttctgttaactaggtatgtgaccttggcattcatatcctcatctgtcaaacaaagaaaaaattcttggtgatctggggtcatcttgagttgtgataatctatacttctagatgaatcatcaaattaacacagctctagagggctgcttatctaggatgagaatccacctgcctgcttggcctctccacttgggtatcagatagtccartgtccagaaccaaactcctgatctcaccgtgcatgcctgctcttcccgttgccttccccatttcgtttatagcaacccattttcccagttacttaggtccaaaacctaagttatattcttgattccttctctcacaccccttggccaacttttcagcaaatcctactattattaccttcaaaatatatgcatctctagccagtttttttgaacttgaactcaaacatgatctggtttgagcctgataaaatcttgcctacttttgcgcttgattgctcatatttctgtggcctcactgaatcttgcacctaatgtgcacaatagcaactataatactacagcactttctgttttggtgtcttccttattctaccagatggtaatcctgacggtaggggccccatggtggtgttcccagtgtccaatgtggtacaactaggcatccctcaggtgcgctatagcagatgggacgtgggcatgtcaagatagtgagccctggctttaccctaccctagcagggtgacatgctgagcctgccggttgcctcctggcagcagtttagtctgcttactgctctgtggtgtccaaatgtattattttgttaatgtgccttaacttggaaaagcttggaagcctcatggtaacagcatttggcacctaggaaggtattcattgttaaatgaattctttgttaagtgaggtagactacagggatcattctccctgttttatagaagaaagagtaagctgtgtgaccagccagtggcctgatcataatcgagtgctgttctgagtctcatgtgcgttctggggcaacacactgggttgcatttcacatgtgcacacatgtagctcgttgcttccttacctgcatgtacatgaaggtgaaggctgtggctaagccagaagggcctgggttctgggggtttcttccttgatacagataaatccattctgacattgctgtgctttcctccaggcctttggggattaagggggtttactggagagcctgcttgctggggaggaatatttatagactgtgagctggaaggaactttggagaacatcaggttcagtggttaccagatgtggctatctcagagtaacctggtaatcttttactgatgcttaggccctactgcaggtgatctggttcrgagctctgggagtgatagggcttagaagctgagtttttacaaaaccttccaggtgattttgatacagctggaataatccagttcctcctcctccccttttttttttgagataagatcttgctctgtggtccaggctggagtgcagtggcacacatgatcacagcccactgcagccttgaccttctggactaaagctgtccttccatctcagcatctcagggagctgggactacaggcgtgtgccaccttgctcggctaattttgtttatcctttgtggagacagggtctcactgtgttgtccaggctggtctcaaactcctgggctcaaaccatccttctgccttggcctcccaaagtgctgggattacaggtgttgtgagccctgcactggccaaataataatactcttaatagtaatacccagaccacattcttaatttcttccaaaatgtctttgatagctatctgtttccaaatcgagatctaataaaaaacatacattgcatttgtttttccatttctgcctgtcttaatctacagcagcacccccgctccctgccccagcactttcttccccatgacattgactctttgaagagaccaggccagttttcctgtagaatgtccaccttctgggtttcattgttcttttttcctcctgcatttcccttactctggaggtaaggttccaaagcttgcttagatgcaggttaaacattctgggcaagacttctttataggtgaggccgtgtcaccaggaggcaccggtgtcgggtggtcctgctgtcggtggtgccgtgtttgatctctgggttaaaatggtggtaatcagatcctgctattgtaaaggtacattttttttttccttttccttcatagtgataacttcctgtaagtaaacttgctgaaacaaagggtttgcacatttcaaaaaaccaaaacgcttttgattattgtcaaattgccgctaaacaattctgctattctatattttaaggagtatgcttttcttcactatttgcstggtttattttttctttttctgattacaaaagaaatgtatatatcatgcaacatttaaaagttacaggccgggcacggtgtcttacacctgtaatcctagcactttgggaggcccaggcggatggatcacctgaggtcaggagttcaagaccagcctggcaaacatggtgaaaccctgtctttactaaaaatacaaaaattagctgggcgtggtagcacgtgcctgtagtcccagctactcagtggggggctaaggcaggagaatcgcttaaacccgggaggcggaggttgcagccagccgagactgcgccactgcactccagcctgggcgacagagcaagactctgtgtcaaaaaaaaaaattgtggtcaaatctaacagaaaatttgacattttaaccactttcagtgttcaattcattagtactaattatgttcataatgttgtgcaaccatcaccattatcttctttgtaaacagctgtagagtggcattccatggtgcatgagccagaatttattcaatcagtgccctgtgtatggacaattgggttgttctcttaaaaacagcgccgcggacagtacctttgcctgtctctctgctcttttatatattttaattagatagtttcctggaagagggaaagctagtcaaagagtgcaaacactttacattttaatatgtattacctaattgtctttcaaaatgttgaacctctttacagtctaactaaaagcatctaagactgataaagtattgatttgccttgataactgttggctctcacaagactaactcaacctgctctgtattttaatcctgcttagtaaggaagagctggttgggaaagtagaagcaacatccctttttttaactaattggtatttatgtaacacctcctgtgtatcgggcttgcttttcaggccgggggattttagttatgaataaacagagacaatctctccctagtggagcttacagactaaaatatttggagacagacatcatctcatgaatgaagtcaaggagaggtaaagggcatatataataggaggctctcatagggctggggattcggagaaggattccctgagaaagtgaaatgtatttggagtttgatggatcaactggatgttccctaggcaaagggcagactgggaatggaggtggacagcaaacattccaagcagaagaaaaactgcatctgtaaagacctgtggcaggtccctttagaatgtgttctggccaaggaggttcatcatgttcagtgcccttgaggaaggcgggttctgaatttcccagataccagatagatgagatcccactgccaggggcccatgagcagaasgggtttgagagggatgggagactttccaaggcaaattctaacaaattacaaataatctggagaggagaaagagaggcacctaaataaatcagtttagagttttagaatgacttgtccaaagttggaagggggtcaggtaaccaaggaggaacagtgcagagcagctggaatacatcagaagggggtcaggaatgccaaaggacctgatgagctaaggcttctggaaaatgctaatcagccacaagggcctttaaaactgtctgcagtaagaaaaataagaagaggcatgctgtttctggcaacatccagagaacgaacacaatgtcaccacttctagttttacgttcatctcctttatggaggaaacaatatagtataacacatgtggagtgcttttattatgaataggccatatgccaagcactttatgtagatgatttcatttttatcaatgctgtgaagtttatcttcattttatttatggcaaaactaagatgtggggagcttaaataacttccccagggtcacagcagttaagtggtggagctgggttgggcaatctgactatagttcttcaatccgaactaccacactgtkctgggaaaggaggggccatatgaggtgagagggactggccgagattctagaggtagcaggatctagaagaagtgatccatcacagaaggagagacctgagcttgcatcctggagtcaactgcataccagctatcgaattctgacttacctccctgatctccagtttccacatctgtgagatgggaataagttacttgcactgttatattgggaattcaaaataggcacagaaagtgcttggcatggaacagatgcttaattagtaatttttaatttttattctaaaagcagggtaaatacccaaagctagtcttttatttatttatttaacatatgagagatatgtggtccatgaatgaatgatatgtggtgtcttagtccattttgtgttgctataacagaatatcacatactgggtaatttataaaggaatttaggccgggcgtagtggctcatgcctgtaatccctgcactttgggaggccgaggcaggcgratcacctgaggtcaggagtttgagaccagcctggccaacatgatgaaaccccgtctctactaaaaatacaaaaaattaggccaggcgcagtggcttatgcatataatccgaatactttgagaggcagaggcaggcagatcacctgagtttgggagttaaagaccagcctgaccaacatggtgaaaccccgtctttactaaaaatacaaaattagctgggtgtgctggtgcatgcctgtaatcccagttactcgggaggctgaggcaggagactcgcttgaacctgggaggcagaggttaccgtgagccgagatcacgccattgcactccagcctgggcaacaagagctaaactccatctcaaaaaaaataaaaaaagaaaattagccaggcgtcatggcaggcgcctgtaatcccagctactcaggaggctgaggcggaagaatatcttgaacctgggaggcggaggttgcagtgagacgagatagcgccactgtactccaacctgggcaacaaatgtgaaactccgtctcaaaaaaagaaaagaaaagaaaaggaatttatttcttacagttctggaggatgggaagtccgagattgaggggctgcatctggtgagggccatcatgctgtgtcatcacttagcagaaggcgtaagggcaagagagaggggaggaagggggccggatttatccctttatcaggaaccgactcgcatgacaactaacccacttctgtaataacagcattaatccggtcatgagggtagcgcccttctgacctaatcgcctcttaaaggccccacctctcaacactgacattgggcattgagttgccaacacataaactttgggggacacattcaaaccacaacacatggtggccttgcccttgaagttagtctacagggtaagcatatttcttgcccatgtgtagagaatgaaattwaaaaaaaaaaatacagggtaagcatgttgatatggccccctcttttaacagtttccatgtgacatttcatgcactacagcctctcactgctctgaagccaggagtcaagctgagatttcccctgaggactggagaagataggtgaactggcaaagactgaaagtctagctgtcttttacttttttgttgcaatgagcagatagactagtgagaatgagtgtttcatccttactaatttataaacctaagctgttcaatctggcaatttaaaattcagtgacataagaaattccattccttggctgggtgcggtggctcatccctgtaatcctagcactttgggaggccgagatgtgaggatctcttgagtccaggagttcgagaccatcctgggcaacatgttgtaaaaaataaaaaggccaggcgcggtggctcacacctgtaatcccagcactttgggaggctgaggcaggcagatcatctgaggtcaggagttcgagaccagtctgaccaatatggcaaaacctcctctctactaaaagtacaaaaattagccaggtgtggtggcacatgcctgtaatcccagctacttgggaggtggagacaggagaattgcttgaaccctggagacagaggttgcagtgagctgagatcacaccagacagcacagatctagaacatgttcatcaggacaggaagtcctcttggacagcactggatgttrggaacagacactttcacatagttggaaagcagaacggcacagtgattaagggtgaaatgtgtagctgatttcatttgtgtttaacactgtgaagtgtatctccattaagcacggaggtttaaggagttaaatgacttgtctggggcaacagcaggcacgtgggtcactcaggctggatttggatcccgcctgagataatcataggagccgcttcactgggtggctgtgaagattaggccatgtaatatattccaggtgcgtcacactgtgcttgtctcatattagagacatcatagtctttctttacccataagttgtattctgtatctttttttttttttttttgagtcagagtttcgctcttgttgcctaggctggagtgcaatggcgtgatgtcggctcactgcaacctccacttcccgggttcaagcgattctcctgcctcagcctcctgagtagctgggattacagtcgtacgccaccatgtccggctaatattgtatatttagtggagatggggtttcaccacgttggtcaggctggtcttgaactcctgacctcaagtgatccgcctacctcggcctcccaaagtactgggattacaggcgtgagccactgcgccaggctgtattctgtatcaacatatgattttgtcctttttgttttttgagacagagtctcactctgtcacccaggctggagtgcaatggcgggatctcggctcactgcaacctctgcctcctgggttcaagcaattctcctgcctcagcctcccgagtagctgggattacaggcgtctgccaccacaccctgctaatttttgtatttttaatagagatggggttttaccatgttggccaggctggtctcgaactcctgacctcaggtgatccactcgcctcagcctctcaaagtgctggaattataggcgtgagtctccacgcccagcctgttttgttttgaggcaaggtcttgctctgttgcccaggctggagtgcagtggtgagttcatagctcactgcagtctggaactcatgggctcaagtgaccctcctgcctcagcctcttgagcagctgggactataggtgtatgccaccatgctcagctaatttatgttttattttattttgtagaaacaaggccttgctgtcttgcccaggctggtcttgaactcctgggctcaattgatcctcctgcctcagcctcccaaagtgttgggattacaggtgtgagccactgtgcctggcctgttttgtccttgacaggtcttgctatgttggccgggttggtcttgaattcccggtctcaagcaatcttcctgtgtccgaaagtgctaggattacaggcatgagccaccgctcctggcccagcattatttcttaagcccatctacgtattgataagtagtctgtagtttgcttaaccgtgccctggctgttgggaattggggctttgccttttcccggtactatagataagattacaatgtattgtcttgcctactgaccaggcaataggtattgttacagttatttttatttctttttttttttttgagactgagtcttgctctgtcgtccaggctggagtgcagtgatgtgatctcggctcactgcaagctccacctcctgggttcatgccgttctcctgcctcagcctcccgagtagctggggctacaggcgcccgccaccacgccgtagtagagacggggtttcaccgtgttagccaggactgtctccatctcctgacctcgtgatccacccacctcggcctcccaaagtgctgggattacaggcgtgagccaccgcgctcagccacagttgtttttatttctaaggaaactgaaacttagggcaattaatttgtaaaaataaagaaacaggttggtaatttcacattggaaagctgtctgagatttgttagtaagtgaaaaagatgagttgcaggccaggtgtggtggctcacacctgtaatcccagcactctgggaggccaaggtgggtggatcacttgaggtcaggagtttgagaccagcctgggcaacgtggtgaaaccccatctccaccaagaaagtacaaaaattaaccaggtgtggtagtgcacgcctgtagtgcccagctacttgggggactgaggcaggagaattgcttgaacctgggaggcagaagttgccgtgagctgagatcgtgccactacactccagcctgggcgatgagagcaagaccctgtctcaaaaaaaaagtaaaagaagaagagttgcagaacaacttgtatggtttctcatttgtgtgtagaacatggtgggggtagctgtgtgtacacttaggaacgcacagggtaataatcatggaaacgtactcagtactttatataatccctccagatcctcacaatagctctgtgaagaaatgattgcttggagaggttaaattgtccaggatcagtaagttgtggggccatccttaaacccagggctctgctactccatctaccccatgcactgggctcctccacccgtcacagggatagcgtttatcactgcagcagaaatacactaccttcttcctatgcacacgcactgtggaaggtcctttgatgtcatgtcattggtgggttctttgcacctacccagtgaggcaggcagtgaggagccatcagtcaggtttgagcttgagggcaaatggatgtgaagtctggactggggatgttgcccctgccataggttagaatgggtgatggtcaggggtgctgtttcagaatgtggcctgttcttactgctgggtgactcgaacagggaatggctgctctgggtacatactgggttcaggtgctgagattgacagcgtttggattatatatccaggtgacatacagaagggagcctggggcagtggcttcagctttgcctcttcccttacccaaggtatgacgaggaacaccaaccacctagaagggaagcagctcttcccttcttgctgtcatttcttttttcttttttttttcgagacggagtttcgctctgtcacccaggctggagtgaagtggggtgatcttggctcactgcaacctctgccccctgggttcaagcaattctcctgcctcagcctcctgagtagctgggattataggtgcccgccaccatgcccagctaatttttgtgtttttagtagagacagggtttcaccacgttggccaggctggtttcaaattgctgacctcaggcgatccacctgcctcagcctcccaaagtgctgggattacaggtgtgaaccactgcacccggcctcttgctgtcatttctttggattcatttattcttctctggtaacaaggtacccttgaaggttgttattcatagtttaagattaactaatacaggcccggtacagcggctcatgcctgtaatctctgctttgggaggctgaggcgggaggattgcttgaggccaggagtttgaaatcagcctgggcaatgtagtgagaccctatcactacaaaaaataaacctaaaagaattagggtgggcgcagtggctcacgcctgtaatcctagcactttgggaggccgaggcaggtggatcacctgaggtcaggagttcaagactagcctgaccaatatgtagaaactgcatctctactaaaaatacaaaaattagcaaagtgtggcggcgtgtgcctgtagtcccagctacttgggaggctgagacaggagagttacttgaacccgtgaggtggaggttgcagtgagccaagatcatgccactgcacttcaacctgggcaacagagcaagactccctttaaaaaaaaataaaaaaaatattgggaggccgaggcaggcggatcacgagttcaagagatcgagaacatcctggccaacatggtgaaaccctgtctctattaaaaatacaaaaattagctgggcatggtggtgggtgcctgtagtcccagctacgcgggaggctgaggcaggagaagtgcttgaacccgggaggcggaggttgcagtgagctgagatcgctccactgcattctagcctggcgacagagcaagaatccatctcaaaaataagtaaataaacaaataattgggtgtagtagtgtgcgcctgtagtcccagctaccgaggaggctaagatgggaggatcatttgaagtcaggagtttcagactgcagggaagtatgatcttgcccctgcactccagcctggacaacagaacaagacactatctcttaaaaaaaaaaaattaactaatacagatcccaccataacaatcatttatttattgctgtgtaacaaattgcccccaaacttaaaggcttaaaacaacaacaagcatttatctcatatttttgtgggccaggaatttgggagtggcttggctgggtggttctggcttggggcctctccagaagttgcagtgaagatgtcagccggggctagccatctgacgggttgaaccggggctggagcattcgcttgcaagatggctcactcacacctggcaaggtggtgctggttattggcaagaggcccctgttcctgtctaggtgggcctctcccaggattgcttaacaatatggggactgtcttcccccagagcaatccaagagagagagcaagccaggcagaagctgttcttcttatgacctagtctcaaagtccaatagcatcccttgtcacattctataaagtagaagtaagtccgccacacattcaaagggagggtaatggctgggcacggtggctcatgcctgtaatcccagcactttgggaggccgaggcagatggatcacttgaggtcaggagtttgagaccagcctggccaacgtggtgaaaccccgtctctactaaaaatacaaaaattagacaggcatggtggtgcgtgcctgtaatcccagctactgggaagctgaggcaggagaaattgaagcttgaacccaggaggcggcggtatcagtgagccgagaycccaccactgcactcccacctgggcggcaagactccgtctcaaaaaaaaaaaaaaaaggaagggaattaggcaccaccttttgaagggatgaggaaacatccaaagctcacgcacagggttttcctcattcattcttccctctgacccatggatatttgttgaatctccagtatgtgccaggtagtccagacatagagatgagtaagataaataaggcttgatctcaaccctcaagaagcttatagtgcaggtagactaatagctatggtttggatagtgttttacagcttaatgagcactttcacttatggtcttatttaaccttcccagtaccccgtgtgatcaccagagctrgttatatccctattttctatctcctctgggttttagtcaatgagggcttttcttacattgatacaccttacatgatagaacttgactttgatcccagcgatttttgtctataaatcccttgcacttttttcctaccccaggctgtgttccttgtggctgctttgtcatccctgtcctgcagatgaggaagctgaggctgcagttactgaacagctcttgacactttaattcctggatttttttcaccatactgagctgccctcggggatggactctcctaagtgctccattgacagtggctgtcatgtttcttcttgcagaaagctctgggtgtgcggcagtaccatgtggcctcagtcctgtgccaacgggccaaggtggcgatgagccaytttgagcccaacgagtacatccattatgacctgctagagaagaacattaacattgttcgcaaacggtaaggctgcagatgggaggctgtgactgtcaagggcattgcgtctgctgcctgcccgtcaggcagagaaggaggtgttttgtgaaggatgcttggtgatagtggcagggtcaaggtattcaaggtacaaaggtttctgctgaggaaaggcattccagatcagtggtgtaacttctgtcctctctgccaagggagaatctgtgttatcaagaagcctctagatgtgaaccacagccaggtctctgagacactttggcactataacctgaacctcccaaccttttcagggcaggctgctgaccctcggcctgccctctggaagccaccaggcccagtgcctggagaatcatcttctatttcctcttcagtgcacaggcacagaggagagctcaggtctgagacccagaagataaactaagatgggacctttttaatttaattttattttattttattttattttatttatatatatttgaggcagagtatatatatatttatatatataaaataaaaatatatataaatatatatatatttgaggcatagtctcgccctgttgcccagactggattgcagtggtgcaatcttggctcactgcaacctctgtctccccagttggaacgattcttgtgcctcagcttcctgagtagctgcaattacaggcacctgccaccacacccggctgatttttgtagttttagtagagatggggttttgccatgttgcccaggctggtctcgaattcctgagctcaagcaatcagcttgcctcggcttcccaaagtcctgggattatagacgtaagccactgcgcctggcctattttattttatgattttatgttatgttattttattttttgagacagtctcactctggtccaggctggagtacagtggtgcagtctcggctcactgcaacctccgccccccaggttccagcaattctcatgcctcagcctcccgagtagctgggactacagggacgcaccacgatgcctggctaattttttgtatttttgtggagatggggtttcatcatgttggccaggctggcctcaaactcctgacctcaggtgatccacctgcctcagcttcccaaagtgctgggattacaagtgtgagccactgtgcccagctgggactatttttttttttgagacagggtctcactctcttgcccacactggagtgtagtggcacgatcacagctcactgcaacctcaatctcttgggtttgagtgatcctcccacctcagcctcctgagtacctgggaccacaggcgtgagccaccatgctcacctactttttttattttttgtagagatggggtatcgccacattgccactgatctcgaactcctgggctcaaaactgttctcccaccgtggtctcccaaagtgctgggattacaggcgcgagccatggtgcctggcctaaggtgggatcttgagcatgtcttttttctggacctcattttcctcacttggtaaaatggcagtcagctctgccctgctgtcctgtgtgccaggtcctgggttagatgctgccaccaaaaggatgaataaggtaccacagaggatgaggagtcggggctggcaatgcacaccagcctgcactgccacacttccaccttgctcttcatcaggcatgaaggagagctgtcatagaagtttgctttgattgattggaacctgaacaactgcagatggggctgtgcccttgcctgcctggtggcttctttgatactgacagtggtgatcctgggagagaacaaatctgagtctacccgctgggtagctgaggctcagctggagaaggaacctgcccacaaccatgcagtgcatgagtggtggtgtctcgtctttgtaccctctagtactctaaccactaccccatactccctttctcatgccactttgctttctatctactggtatccccacttcggttttaagggtagggacttccttaatctggatctccagcctccagcacagcatcatctaattatagtaaaggacctattgtttgtcaaggacggctgtgacaggagtacccaccttgttgtccagtctggcctgggtacttgacacacattatttctgttctcaacaacccctgtaggttgttgctttccatctctgccccccaccattctgcaggtaacaaaattgaaagtcaggttggggaaataccctaaggccatacatgtattgagtgactgaccccacactcaagcctgggtctctgtgactccagggcttgttcttgtgggtttcttctgggctccatgttagaatcacctgggaagctttaaaaatgacggacacctgggccccactcccagcaattctgattcaagtgatctaggcattgctattcaaaatgtggtccatgggccagcagcattggcatcacctaggagcttgttagaattccagcatcttagaccccactccagacccactgagtcagaaccggccatttaacaggatccccaagggacttacgtgcctgtcaaaatgtgagaagcactggcccgttccccagcaggtcccatagtgcagtcaggacgaagaaccactgtccctgtcaatataggacgttgtatttattcttggagctctcacaccgctgctcagtggaaaagtgatagatttttctttactctgtaaaacacttccaccttgctttcatcaggtatgaaggagagctgtcatagagatttgttttgttgttgtttgtgtttgtttctgttttagactgagcctcactctgtcacccaggctggagtgcagttgtgcaatctcggctcactgcaacctccacctcccaggctcaagcgattgtcctgcctcagcctcctgagtagctgggattacaggcgtgcatcaccatgcccaggtaatttttgtatttttagtaaagatgggggtttcaccatgttggccaggctggtctcgaactcctgacctcaagtgatccacctgtctcagcctcccaaagtgctgggattacaggtgtgagccactgcgcctggcctttttttttttaattaataaaaaaattttaaagatgggctgcccaagctggtcttgaactcctaggctcaagtgatccccctgcctttggcctcccaaagtgttgggattacaggcctgagccactgtgcccagcaagaggttcgctttgagataacttgacaacagagtattattcactatttagtttttgcattaaacaattaataacaacaacaaaataccctttaaggcactgggagttttttagttttaattttatcattaaaattgacaactacaacaatatttttccttgcttacttttattccaaccttgctttgcaaccagaaaagtccaataaatttttttctttttttttttaaagtccaataactttgaacattttccagattagtacagacgaggggattgttctctgttttctttttttttgaaacggagtctcgctctgtcgcccaggctggctggagtacagtggaacgatctcggctcactgcaacctctgcctcccaagttcaagtgattctcctgcctcagcctcccgagtagctgggattacaggcgcctgccaccacgcccagctaatttttgtatttttagtagagaaggggtttcaccatgttagccgggatggtctcaatctcctgaccttgtgatccacccgcctcagtctcccaaagtgctgaggtgacaggtgtgagccaccacacctggtctgttctctgttttcattgttgccacagagcaggtctcaacaaggtggggggtggtcagttttgtccctagggcccatttggtgatgtctagagatatttttggttgtcataacttggctggggttggggcttactgttacccaatgggtaaccaggaatactaccaagcatcctacagcgcacagggcagccccacaacaaaagaattctgcggcccaaataggttcatagtgccctggctgagaaaccctgacacggagaaagagggcagaggtgaggttatgctaaaaagaattatattctagccgggtatggtagcccacgcctgtaatcccggcactttgggaggccgaggcaggcggatcacttaaggccaggagtttgagaccagcctggccaacatggtgaaacactgtgtctactaaaaatacaaaaaaattagtcaggcatggtggcgagcrcctgtaatcccggccactcgggaggctgaggcaggagagccgcttgaacccaggaggtggatgttgcagtgagctgagaccacaccacagcactccagccagagtggtgtctctggtgacagaggaagagactctggctcaaaaaataaaaataaagcgttctattctaagaattttttagaaggccaggggacttgctgggcgacttctcttccaccttgtgtctccaacagaaggggtctaagtctgttcttgagaactggatctgtgtcatctggagagcagagggacagatggatatgaagacccattttgtcatcctcagttaatcctcagggacattcartgatgaacccatcctaaagcttcagcattgctgagcttttttatatagcttcaatcatttgcttccaaggtcttgggtttttaagcccatgtgctattttttgtctccctcggggcccagaaggaggggctgtgagtcattgcccgtacaccagccttggcggtgctgccgcaatcggcgcaggctgtacctcaggctagtgctgtttttattcatagagatgctcagagttgccagttggtctgctgttgccagcagatccagcaccttagggacytttttttttttttttttttttttttttttgaggtagggtcttgctctgttacccaggctggagtgcagtggttcgatcatggcttactgcagccttgaccttctggggtcaatccatcctcccacctcagccttcccagtatctgggactataggcacatgccaccatgcctggcttctttttatgttttttgtacaggtggagttgcccaggctagtctcaaaacgcctggactcaagtgatctgtctgcctcggcctcctaaagtgctaggatgacaatcgtgagccaccacacccagctgggaactcttactttgaagaggttgggtaaacttgggggtgagggactggaacccagcttgcagaaggaagtttctctgccatctcactatgcatattgatgataacagtaatgataactgagaaaggatgaggtggctcacacctgtaatcccagctcttcgggaagatcatgtgagcctaggagttcaagaccagcctggtcaatacagtgaaaacccatttctacaaaaataaaataaataaataaataaaattagccaatgtggtggtgcgtgcctataatcccagttactcagaggctgaggtgggaggatcgcttgagcctgaaaggttgaggctgcagtgagctacaattgtgccactacactccagcctgggtgacagagcaagaccctgtctcaaaataataacwataataataataataataataataatgaaaatggaacattcaccatgtgctggccctattccagattccaggtgtggagagaccgggtagattagcgtcaggagcacagccgtagggccacactgctgcctcttcgtggtccagctgtacccctcactggcttcgtggtctggagcaaagctactctgtccctctgtgctgcagcttcctcatctgtgctgtgaggataaaatgagttttatacatgaaaatacttaagataatgctgagctgaaagtaaatgctacgataacgctggtctctagtgacagaaagccaatcagtagtggcaaaggggcgggagggagttaaccaaggggtggggaaacttgaaggagagatggtcagtatcttgattgtggtgctggtttcacaggtgtatacagtgtcaaaacttagcaaattgtgtaccttaaatatgcagtttattgtatgccaattatacctctgtttaaagctgtttaaaaatgaaaggctatagaagtggaagctgttatctcatcccagtgcaagccctggtatttagagatgggctggctgagctgaggagagcagttgcttatcttgttaaatagtggtttcagtaataggtcaggtttgggcttttttgttttttttttgtttgtttgtttttattagagacagcatgtcactctgttgctcaagctggagtgcagtgatgtgatcagggctcactgcagccttgatctcctgggcttaagtgatcctcccgcctcagcctcctgcgtagttgggactacaggcacgcatcaccctgtctggctcattctttttttttttttgagatagagtcttgctctattgcccaggctggagtgcagtggcgctatctcagctcactgcaagctccgcctcccgggttcacgccattctcctgcctcagcctcccgagtagctgggactacaggcgcccgccaccacgcctggctaatttttttgtatttttagtagagacagtgtttcaccatgttagccaggatggtctccatctcctgacctcatgatccgcctgtctcggcctcccaaagtgctgagattacaggcatgagccaccgcacccggcctcattctgttttttatagagacaaggtctcactctgttgtccaggctgatcttgaactggcctcaagcgatcctcctgctttggtctcccaaaatgctaggattacaggcgtgagccaccacaccaggcccccaggtcagggttaaactcagagcttctgactcccagtctgaaacttttttcttggcctcaaacaataggacagagcctgtcaggtgtgggttgaactctgctcctccttaggaaggaagtctcaagcttggcctaagctttgagaattctggggggcagagcgtgaggtctgaaaggggctgttgtggcaggcagggcggccacaacagcccctttgctctgttgtgtgggtgcagccgggagtcagccggaacgttgagcctggcagggagagtggacccgcgcagagctcagtctagatggctgggaggcttgtggggagaagacggttgagtcctgacagggccggaccccagggcaggtttggactgccattttggctctgatgaggaagggaggggtggggcctccggggaaatggggtctaggaggaggaggagctgtgagaggccagtggcagtgacccggtctctgttcttgaaaactgacagatactcctgtctatgtctggagctaatgggcaaagtcttagtgtcatagttgggtagccaggcatcccaggcctgaggtgtggagggttgtagatggcggacagggtggacaggtgaaggggatgctggtcctgattccctgtgccttagtggggctgagggcacagagggaagtagcgaaatctagctgtgaacttggtcactctcctgagcctgtttcttggttgttgttaaatggctttcttggttgttgttgttgttaaatggcaggaatgatgagatatgcatgttgcggggacttagtaggaattacgatgctgggaaagccaggatcctttgaaaagaaccagcgctgccctcttgtgatgttgtcattcacttactcatcaagtaattgtggagcacctaacaagtgccaggtgctgcaggaggtgaggaggtggtgcagtgaacaggacccagcagtccccacccaagtggaacgttgaggtcctgagttcagactccctgtccctggccactgttgaggttgccacatggactgagagggagaggcagggcggnaggaggccgtgcagctagcaccaggccacccttctgctcttctccccacagactgaaccggccgctgacmctctcggagaagattgtgtatggacacctggatgaccccgccagccaggaaattgagcgaggcaagtcgtacctgcggctgcggccggaccgtgtggccatgcaggatgcgacggcccagatggccatgctccagttcatcagcagcgggctgtccaaggtggctgtgccatccaccatccactgtgaccatctgattgaagcccaggttgggggcgagaaagacctgcgccgggccaaggtgagcagaaggtggctttgggggtgggcaagtgggcaagactgggcgagaggcctcaccctcacactggagcaaaccagggcattgcctccaaattctcacacctctttggattggtctgcttttaaaacttgattttacttgtttctctttctaaaaatagcacttgctcattatgttaaaaaatacagaggaagcctaaagaaagaaaaaatcatccttgaccttaccacactgcaggtcctttttctgtcctgttggaggatgatgtggatcctgccaggtgctctggaaggggccatgcaggcctccctgtctgcctgagcagtgaggggtgcatcttagcatagtttgccagcatcccatttgcacccactcccgctctcctctgaccctccaaggaccctctccgggaggtaggcgtgctagggtcactatttgtaaatttgaggcggcagtggcatcatacttgagttctgtaactacatgagggcacgattagggctcaatgctgatcctggctcccactctggtgctctgtcactgaggagcctcctttgggggccattcttctgtgagttttgcttaactacatgggggtggctgtatgccatgctgaaggcttttcccccacccttctatgaaatcgagttcctgctccttctcccaggctcggcttgtgggacctttgtgtcagcctgctcttggcaacagcgggcctctctctcccagctctgggcctccccactctccagcccctgcagtgggagtgggtccccctcacggggaggggcgttggcaggagctgaatgctggcagggctgcggcctgtgggcatgtgattgaaagtgctccagctcccagggtcagcatggctcaaagcctcccagccccatgggaaacactcggggcggcgctctcactcagaccctctcttccaccctggccccctggtggtatcctggctccacagtggctctttcccctcagctgaaaggacagtcctgcctgccggccggcggtttccacattagcaacaacactggtgggggtaataatgttacaggagctcccacagtgccgggaactgcacatggccgggaacgtgggtcctctgcagccctggggacagctgcccacaacagggctgctaccttctggggctggctttctgcttgctttatgggctcagagtgaatcttctggagatgagatgcacactcayagcattcagagctcattccctcatgcgttcaacaaattgaacattctttatgtgccaggcactgggctaggtactgaggttcagtgtgaacaagtcaggcaggggccctgccttcagggatctgcttgtgggtgtggacactaaacaatggccgaggtaggtaactgcagatctgggtatgtgttaggaagggaaagtgcgggacttggtcagtataaaaaagaggtctaatttagatgctgggggaaagagagagcttctttgaggatgtgacagataacctgaggactgaacatatgagttgcattgactggaggaagaacatgctagaaagaacagcatttgcaaagaccctgagccaggaagaaacttgatgcttttgtggaagtgagagggggcctgtactgctggagttctctgtgtttggaagagcgggtggtatgaggtgggcaggggcagccaggaacgcgagggctgtgggaacgctatggtcaccatcctcagagtcctagaacagtttaagcggagaaagaatatggtctttttttttttttttttttttgagacagagtcttgctctatcccccaggctggagtgcagtgacacacaatctcggctcactgcaatctcggctcactgcaacctccgcctcctgggttcaagcgattctcatgcctcagcctcccgagtagctgggattacaggcacccaccaccatacctggctaatttttgtatttttactagagacagggtttcaccacgttggccaggctggtttcaaactcctgacctcaggtgatccacccacctcggcctcccaaagtgctgggattataggtgtgagccaccacgcccggcctagaatgtggtcattattacgtgtatttgtaaagtgtccctctggctagggctcagaggcagtgacctgtctagggtcacagaaccagagatggatccaggctgagtccaggccgagactctggcaccagtctggggtcctcccacaccccttcctcacacttaacacagacgtgtagtcacatgygcccagacacgaccacagcctcctgtcctggataccaatttcataagtgaccgatttgtaaatgaaaaagctgatgtattaattattaattggaaagagactgctctggaaacccacgttctttgccattctcttacctgggggaacccagtgggccttcagagggcacacactggtctggagtttcagtgaaggggtgtgtggtttgagtgtatctcatcaagggtccgagggcactggctgaggtcccttctctgaagcatcgctctcccatgccggaggctggcaggtcccatttcctagttcctcctttgagactcagtagagtccactagaatcccaccgttttgttactggggtcagtctcactgaccccacacagggacctcccatgtcttccagataaaccctggcctcacatctgctgtgcagtgggcccttccctgtccctcaaggaagcttccttcagattataggcaggatggctacagcccgtgtcatcatttcgtttggctgaaacctccttttcagaacagtggtcccttcgacagccttccatttgggcccatcaaacacattaccaagaattcagcacttccgacagtcagacaccagtccagggggctctctcaggtgtcgtctaagcctgggatctccagcaagttatttcaaaaaaagcctctggggtttttgttttgttttgaggcagggtcttgccctgtcactcaggctggagtgtagtggtgcgatctcggctcattgcagccttgaactcctgggctcaagtgatcttcctgcctcggcctgcaagtagctgggaccrcaggtgcacagctaatttttatttattttattcttatttttattttttgagacagtctcgctctgtcttgtaggctggagtgcagtggcacgatctcggctcattgcatccttgtctcccaggttcaaccaattctygtgcctcagcctcccgagtaactggaattacaggtgtgcactaccatgcctggctaatttttgtatttttagtagagacagggtttcgccatgttggccaggctggtcttgaactcctgacctcaagtgatctgcctgcctcagcctcccaaagtgttgggattacaggcgtgagccactgcacccagccactgcgcctaggccagggcctgcctctgcactgctggcctcatctggggacttgagtgccacaggcactcttggcaattatttagaccagtcccttctccagataaggaaactgagacccagaccagggcagggacttgttccagacccaccaccctggccaggtgtcacagaactggggctccatctctgctcccctgtccttctctctgacactgctagtggagactgggccaacatccaagctctttggaattatttttagaaggtctctaagagagggcctgtctccagtgccagtatttcagagtcagaagggaggctgatggggtggggagggcttggtgagggtcacctggacacaaaccatgttgctaacgcccaattattgatttgtctcaataggacatcaaccaggaagtttataatttcctggcaactgcaggtgccaartatggcgtgggcttctggaagcctggatctggaatcattcaccaggtaaagctgggctcagtctgccgtcccaagggcccaagccagagaagtatgttccaggcctatggggggagggggtttgaggcccaggggggctgaggggaactggatgacatatccatcagctcttatgctcttcctcctttgttttgaaactgattttcattatgtcattatacgtgctcattttctgggtgagaagttaaaataatacctcctaaccacccaggtaaccagcattttaagtgcgacatgtttctttccacattgtcttctgggtgtgtactcaagcatctctattcccataaactctcatacagaacatggtattattttgttttttttcacaagtgtcaccccttgtggcatgcatcactgacatttgatgagcccatactgtgtctcaggtactaggctgagcacttgaaagatatttgccatgccctgtgaggtaggtgcttttactatccacaccctacagaggaggcagctgaggcacagagatgttaaccttcttgcccagggacacctagctggcttactgtggagccaggcctgtgggcaggagggctggtctggagcgagtgccccatgccaccgtgctgctctgccgcctccctcgcccccagagctctttctgcttctgcacgtggcgctcctcggatttctttttggctccttcatggtgttctgtagggtgaaggtaccataggtcatgtggccatgtcagccgggggctcctctgaggtgtcccaaggatggatcttcttttggtggacagttggacagttttgtctctggaagtgcaagtgtgaacgtgtatatcctggggaggtgggtgcttccctttcttccaagggcactgttagggaccactgacctagtttgtgtccatttacatccaccctgtatgtatgaaacctgcctcttcgcacctttgcaaggtggcccttccccccacctccatcccagacctcactgtcctggcctcctcaggatgtgctgagtcaggctgtaatctgacgccgcatgggctcccagcaccgccccgctctgaaaccagagccagcaggggatcactcctctgccctgcccaaccatcactcttgccaggaaggggctgcgtggaatggccgtttgcagcggcctgtggggactagaaagcccctctctgcagcagggttagggagtcaggtggacccagtcttggccttctgttacaaagggcactgcaatgcaggtgtctccctttctacctcagtacaaatgcccaggcctttatggcagctcctgggccaaagttyggagccgtgagtgatggcagctcacatctgccaccggctagctgctaagcatacagcagctcgtgtgtttstttctttaaaaagaaaatgcccaggggccatgggagtactttgcagctttactttcttcccgccttgatgtcacgtcttcagcagcctcagtccattaggtccaacccaaacctgaacccctttccctctgggaagtgccctggccccacttggcccgcagaccttcctccacatcacagctttctggttcctctgtggagcctccccggccctccccgtgcctggcacagtggcttccagtggatcctctgtgggatctcttcacattatgttcccagcatctgccaagtgctttctgcactggatcatgtgctctgtggggacagggactgtggcttatttattcctctctagctctgggtttgggaccaggtcagtacagagcaggtccttaatgtatgtgtgtgttgtgtggatggatggctgaatttccaggtgtagttctaggcattagtccttcttcccagccctcacccccatctgtccagccacacccacagaccggggagctcactgtcacggccagcgtcatcgtgacatcttctgcagtcctcatgtctgcctgacctctccccctgghtgtggaccacaagtgtctacaccgtgtggaccacaagtgtctacaccgtgtagaccaccccgaattctgtgtgcccagccttcgtggatccaacttttacaagcttgaggctctttagggatgcactagtcttaaatccttgtacgtggcagcattggccagttcttcgcagccaggtcttccctctgcatccccaagagatgagacctttggaccttagagtctgctaggcagatgcttgtcctgaggcagaggccctggggtttctgtaagatttctgggagcactggtgggtcctgagagttcacagagcctgtcayacctctcatgtgttcttccccacatccccgggtggggcactaactccatctgactgatgagcggcagaacctcaggtgaaggctcttgctgcaaaacaataaataaaaatgttgcttcccgcaggcactattctgtgcctcatggacaggatctcatccagtcatcagtgaaccaatgatgtgagcacgattgttagctatttcttgatagggaaactgagctccgagagaagtgacttgtccatggtcccacaacaactagtagatggtggggccagacctcagaccccccgatacaggacgcctggctcagggcttgccaagcagtgtcctgcagcttcagggggccagtgcctcagaggtgcctggtgcctgggccacacttgggtgttgagcctatacagcacccaaggtgttgagcacttgggtgttgaggtgttgctgcctttcttaccaaatgttttgggggaagtgctccccacggctgggaggagcgcctcagtgaagggagtactgtgaaatgggacaggtgatgaggcagggtggcatcgcgccttgagcaagtcacatgggttctcagagccacctccagatgctgaagtggacgaggcatcacctattctttgcagttgaggaaaagttcatagctttgtgtacccactggggcctcccaggacttcttcctcaggggccttgtggggctggagccagctcctggaagaaccaccaaccccgatgagaagccaggtggggatgctccacacccaggatgaggccgggcctgggcccatcacaggacagtttctctggttcttgtcacatcctggggtcatggtggtatgggtgtttggttactgtgctacaaatgaggaaactgaggcatggggcagcattcaaaggcccaagacatatagcaggaaatatcagagctattcaagagcccaggccacctgtctcccaaggctctggctcttcttggccaccctggagacggcctggattaaatggggctgctcctaccagttccatcctgggagagtggctggacgtggttgggaggccccgggtcagtggggccattttttggtattctcggctgagggcttctaaatataacatcttggattatttttcagattattctggaaaactatgcgtaccctggtgttcttctgattggcactgactcccacacccccaatggtggcggccttgggggcatctgcattggagttgggggtgcmgatgctgtggatgtcatggctgggatcccctgggagytgaagtgccccaaggtgagggtggggagggactcattctgggctggctgtggggtggtggttggtggggatgaacgggagacggtgggacccaggagggaaaagggaacaagttagactcgaatcttctgggagggaggtagagaccaataagcagcaatgtgaatggcagcagggccatcctgacttcgtggctggcacaggcacacacggcctctcacagccgcctcgccccctcctgtccaggtgattggcgtgaagctgacgggctctctctccggttggtcctcacccaaagatgtgatcctgaaggtggcaggcatcctcacggtgaaaggtggcacaggtgcaatcgtggaataccacgggcctggtgtagactccatctcctgcactggtgaggaaggcggccaggcgacgtggcccctaccctgtgctgggcctgatgggtctccagttgggagtagaagcggtgaatggccttcacttgagaatctgtctgttccatttggggacttgggatagacagaggtagaaggaaaattggagacagcattagagattgtstagtccacatcctcattaaacagatgaagagattgagatacctgtcgaggctgccggtgacttcctaactgtgtggccacacacggttaggagccaagtcagcttctgctgctgggcccaggccatagcactaggccaccttgggtgatctagacgaatccagagaggacagaggcagtggtgggaatgggcagagccagggcttcattcatgaagcagctgcaggcccacatcctcccttcgctgaagttcgagcctcactcacttcccttggattagagatcggtgcctgtccgcctccaagaccaggtaggagccagctgctccctgcctgtcactcctggtgacctggcctggatgcctggtcctcagaaatccagggagatttgtaacagtctagacttcccaggtgcctgcctgggctccctggcagccctgcagaactctggttcccctgcagtgatgggggctcactcctgccacgggactgctcagtcaggacgttggtaacaggcccatacctccgtcctagtggctcctgaggcaggtggcctggtagcagctgcagtacctgtgagccccaccagttctgtgacgctttgtggtccagacagtgtgtatcatttcagtttttgtttttgttcttgttttttgagacagagtctaactctgtcgcccaggctggaatgcagtggtgcaatctcggctcactacaacctccgcctcctgggttcaagcaattctccggtctcagcctcctgagtagctgggattacaggtgtgcaccatgatgcctggctaattttttttgtatttttttttagtagagatgggttttcaccatgttggccaggctggtctcaaactcctgacctcaggtgatccacccacctcggcctccatcactggaaaacttgagacacagaaaagtgtctccaccatggtatggctgaaggagggcaggccaccaggcagacagaccaagatccgaatgtcagcatctacctttatgtgctttatggcatgaccttgaatctctctgagccagttcctcccctgccaaaaagaatagcaactgggcagtgtctggtcaggtcagcctacagtacgtggtgcctgttcaatctcttgggcgacagtcaggccccaagctcgcagctcagtgtgtgggggctgaatcttcacctgagtcctcttcattctacccagcagccaccctgagctggggccctgagctctgatccccatggcctcccctcaccggcccaggtttttacccagggcctcaagggatgagtcggcccgctgtcaccacatctctytgagtgggaggagaagcaatgcagctccctggtgtgaagatgcaggtggccgcgtagcaggtgngtgggaccctggcccggccaccagccaatgcccggggctctgttgctccacaggcatggcgacaatctgcaacatgggtgcagaaattggggccaccacttccgtgttcccttacaaccacaggatgaagaagtacctgagcaagaccggccgggaaggtgagctggcaggggcaggcccgtgtgggtggaacagtcacatgcccgctcctccccaagacagagctatgcctttccctgtagggcaggggttcttaacccattgtctccagacaggcgtccgaggctctgagaaagccctgaagaggtgcaatatgtttctgagtagattgtctggagctctctccagcttctcaaagggcctggcatctgagttcaagatagccccacctcaggatgggcatttcattttccctggaaggtggctgaatgcccgcccttctcggcctggtccctgctgccccctacaggaaactccggaaatgacatggatcgcttctgttgataattcctgacctagcaggggaacatttggaaggagaaccactttcccagcctcccctgacaacttccctgaggctctagcctggcttctttggagctcagagggcattggcacctgtgaagggtggtgcgttgtgggagtgaacgaggagccagagaccaggggccatggggagagccgtaagcacgtggaatccttggaaggctcctccctttccttattgagtgactgcttcttcaaaacccagctcttcacttccaggacaccctccccggctctgaaccttagctggcgctcctcctctgtgtctccgtgtccctgacagctcctgcactagggtgtgagctctgtaagggcagagacagcagccttggtttcttcattggcctagtcagtgcccagggtgggcctggtgtttggcaggtgctcaggtgggtggtgagtgaactctcmagaacagtttatgtttcacgtgctccatccccgtcccttgttgatttcagacattgccaatctagctgatgaattcaaggatcacttggtgcctgaccctggctgccattatgaccaactaattgaaattaacctcagtgaggtgaggagacaattaantgggttcaagaagtttctgagagtagtggggagcagggcgggtcctgcctaaatactcactgagggccgggtggtggctcacagctgtaatcccagcactttgggaggccaaggcaggtgggtcagttgaggtcagcagttcaagaccagcctgtccaacatagtgaaaccccgtctctactaaaaaaaaaaaaaaaaatacaaaaattagctcggcatagtgccatgtgcctataatcccagctattcaggaggctgaggcaagakaatcgcttgaacccgggacgcagaggttgcagtcagccgagatcgcaccactgcactccagcctgggcgacagagcgacactgtctcaaaaacaaaacaagaaaaacctcagggtgactcgtgggcccctgggtccccagtgttcctgcaaactgcttcctgaagcagcctggagcagtgggtggggaggggggagacacagccacggggagagcagaggtagctctggctgctgaaccagaagtggatgtcagtttgccaccagctcakctttaggagaagccaaggtttcaccctgaagggtttttgttatctgagttcagagggcaaatcccagcagggttaggcaccctgagacgcacagatcagagcaggtgtttgcagagccagaggaagggcaggctagaggatcccgtctgcaggagttcacacctcggctctgccacttaagttgtgtggccttggtcacgcacttagcctctgtaggccccttgctccatcacgtgtggaacctacagcagtcgtgaggattgaatgaattcatgtaactaacactgacggaggtttactgcatgctgcgcacatagctgagtgcctcgcatttactgatgattatgatatgtaaagcgtctggccttaagtccatttttgtcatgattccaaaagcggccgggcatggtggctgacacctgtaatcccagcactttgggaggccgaggcgggcagatcatgaggtcaggagattgagaccatcctggctaatgtgatgaaaccccgtctctactaaaaaaatacaaaaaaattagccagacgtggtggcgggcgcctgtagtcccagctactcgggaggctgaggcagaagaatggtgtgaacccgagaggcggaggctgccgtgagccaagatcgtgccactgcactccagcctgggcagcagagcgagactccatctcaaaaaaaaaaaaaagattccaaaagcaacatcgaatgggagataatgaacttaggaagctgacagccttgatccattccatgcctctgctgtctcctagctatgtgacttcaagcacagcatgtcacttctgagcttcagttccttcatctgcagagctgagcccagccttgcagggctggagggagcccgggagcgggtgtgtgcagagccaactgctcagttcttccctgtgatgaggtttcagtcaagagaaagtcgttggcctctctgtggggacgtggtgaggcagtgaaagaggctgtccccgcttcaaggtttcttccctcctctctttcttctccttgcatgtttgtttcttcagctgaagccacacatcaatgggcccttcacccctgacctggctcaccctgtggcagaagtgggcaaggtggcagagaaggaaggatggcctctggacatccgagtgggtgagcaccttccaccccatctgtttagcaggtctcagggccagtggctctgcccagggctgtagacaatcacctatgcctactgtgtggcactttctaaggtgggcagtttctgaaatgggtttattattgaaaaattactttttcggccagaagtggtggctcatgcttgaaatcccagcatttcaggaggccaatgcaggtggattacttgagtctaggggttcaagaccakcctggrcaacatggaaaaaccccgtctcttaaaagaaaatgcaaaaattggccaggggcagtggctcacacctgtaatcccagcactttgggaggccgagatgggtggatcatgaggtcaggagatcgagaccatcctggctaacacggtgaaaccccatctctactaaaaatacaaaaaattagccaggggtggtggcaggcacctgtagccccagctacttgggaggctgaggcaggagaatcgcttgaacccaggaggcggaggttgcaatgaaccgagattgtgtcactgcactccagcctgggtgacagagcgaggctccgtctcagaaaaaaaaaaaaaaattggccaggtgtggaggcgcatgcctatagtcctagctactcaggaggctaaggtgggaggatcacttgagtcctggaggtcaaggctacagtgagccgagatggtaccactgcattccagcctgggcaacaaaggcagactcaaaactgcagactcaagcaacagagcctgcctccaaaaaaaaaaaaaaaaaaaaraargaargaaaagaaaaattactttttcttggcagaaaagaaaaatatgtttattgtagagaatattcacaatcaagaagaatttttaaaactcctaatctcaacccccagccaggagcaagctcttagagctcttggagaggtgtgctgtgtttctgtgtattgtgtgcatagattttcccgttttacattttatatcacccatgctgctttatgtgacttttcatgctttacacatgcagacgccctggcatgccagtcactggcatctgctgctgctgggtacagtgtggctgtgaagagcatggagcctggagccagatggcctgggcttgaatcctggctctgccacctaacagccactaacagctgagtgaccctgagcaaactacttcactgtctatgtgtgggttccccatctgtaaaacaggagtcatgatcgtactgacacctttgaaggtggtgttgggcctactgctgctatcaccaatgagaaaaataaataaaaaataaagttgtctggagaagtgacaatatgtgaaaagagatttctataccgtctggccgaaaataagggcaatataatgtgttcgcccttattcattgaagtaattttaagaaaaaaaatatttggtggtttaataattagaaagtaaattactaaattaataaaagaaactatcttggctggttatatgggcttttgccagtaatcccaacccttttttttttttttgagacagagtcttgctctgtcacccaggctggagtgcagtggcacaatctcggctcactgcagcctccgcctcccaggttcaagcagttctgcctcagcctcccgagtagctgggactacaggcgcccgccaccatgcctggctaatttttgtatttttagtagagatgggggtttcactgtgttagccaggctagtctggaactcctgacctcaagtgatctgcctgcctcggcctctcaaagttgtgggattacaggtgtgagccaccgcgcctggccagtcccaacactttgagaggctgaggcaggaggatcatttgatcccaggagttcaagagcagcctgggcaacatggtgagactttgtctctacaaaaacaatttattgaattagccaggtgtggtggtactcacctgtgggtcccagctactcaggaagttgaggcaggaggagttgcttgagccccaggagttagagactgcagtgagcaagcctcgactgtgcccttgcactccagcctgggcgacagagcaagaccccatctcaacaacaacaaaaagagactgtctagacagaaagtgcgatgttattcaggttttatagactttttaaaaagaactcttattgccctgattataaaacaatctttaaaacccagaaaatactagaaagtataaaagaagaaaattagcatctcctgtcagccccagcccatcaaggatggctgttcgtatgagccctctgacgtgcctacacgtgtacatgatattgctgtaaaaggggtcatagtcctaatgtgttcagcatcatggccratggctacagcatctttcttcaaatgacgccacgtcatgagttagcctgtcctttattgttggatatttcggttgcttgcaactggtctctgttaaaaaagtctctggcccagcccagatggtgaactcttttggccaagtctggataatttgaagtcaggtggagacctctgctcactgtctcctcctgacccttaaccccaccacccacaatgcaccaggtctaattggtagctgcaccaattcaagctatgaagatatggggcgctcagcagctgtggccaagcaggcactggcccatggcctcaagtgcaagtcccagttcaccatcactccaggttccgagcagatccgcgccaccattgagcgggacggctatgtgagtgcccatatccccctgcccatctcccccaccccatgctgagtaatgcctccaggcggcacaagcccagaggcctgttgggccggggctggggcaggtcccagtggctgccctggggttccagtacagcacttcgtcctgcagccaccacatcaccccttcccatcagactctcacccacccttgacattctgtcttcctctctccctggcaggcacagatcttgagggatctgggtggcattgtcctggccaatgcttgtggcccctgcattggccagtgggacaggtaagaggcgtatcttttgacaagacagccccttgtgcacagggtacrgagccccagaagttggagggggaattattggggtggagagaagagactccagccaaggtctctagctccagggactcttgcccattagaagcctctggcagacatgcctgggaagaggggctgggtgaggaagggccctgcagaggcactggggggcaacttggctgaagcctgggctggcaggaggaagccagcgcggcctcaccctgacggacacagcaggagccgtttgggaggaggcagtgccccaggtcaggaaactcaggccttgaccaaggccttgcctctggcttacgtgtggttgcaggctgggcccagtgatcctgaggttcccttctgctctgcgcgtggccccaggaggaggcaaccctggcagggcctcttcattttccctcggtaggagctaggctgggctgcgccacaggaacccagcttatctgtcctcgggacaggccakgtgacaaggccagatatccctaaccctgatccctctgacctggcaggaaggacatcaagaagkgggagaagaacacaatcgtcacctcctacaacaggaacttcacgggccgcaacgacgcaaaccccgagacccatgcctttgtcacgtccccagaggtgagactgcccagctgcgcacaagcctgggatggcctctgggggtccctggcgggtcagaggaggaggcagaaggagatggggactggggtcatccaagtggtagccaggagctacaggccttcccagcctcaggcgcatgcttggtgcttcctgcctggggctccctgggtcatgggattatgagatatttatacagtggtttgtgcttatgagcatggaatttggaatctcactcactgcctaggacacatcccagccctgcctctaactcgctgtatgagtgtggccaagtcacttaccttctctgtgtccccgtaatcctcgggattacctgggaaagtgcgtgggacacatgcagtttccaaccccaggtaggagttccacaaaagcgaggcctttgccattgttcccgtggccagagtgagccttgcccttggcggtattcagccctggccgtgactggcacatggccaggctctcttgacttggttgtttatctgcgtgttctacaaatatgtcttgctaaatgggtgaaggaatggctccttccatgtttttagtgtcctgcgcactgagcaggtttgcatcataccagcatttctgcgccagggcccccactccctccaggatagctgtgaggagagagaacagcactgccggcccggccctgcagggatgggagaggccgcactgcccttggcttcctgagtcctctgcaggcccaaggccccgtggtcccaaagatcgtcctgcagctctggcctctgaggaacacaggggtctgggaagaacatggaaatttcctgggttcctttctcagttttggcctaggcttttggtaggtgcaggagacaggagtggcaattggtgctgaccaacaaactggccacctccatttcagattgtcacagccctggccattgcgggaaccctcaagttcaacccagagaccgactacctgacgggcacggatggcaagaagttcaggctggaggctccggatgcagatgagcttcccaaaggggtgagcgcccacgccccctgcttgctggttgctgtgtggccacgtcacttccttctcaacctcacagcacctcctgtgcaggcagggagggcgctgctagtgagaaggaagcagctctrttccctgggaggggaggtggggcccgaggaaacttgccttctgagagtctgtccttgtgggaactgaggactcagcaccccacgcatccccattccctgctgcaggagtttgacccagggcaggacacctaccagcacccacccaaggacagcagcgggcagcatgtggacgtgagccccaccagccagcgcctgcagctcctggagccttttgacaagtgggatggcaaggacctggaggacctgcagatcctcatcaaggtcagcagcatggggacggcaggacagccccaccctgccagggccccccgtcccctgagcatcgggaagggccatgaacctggaggaagtgagcacagtcaagacgcaggtgggagatggaagggaggtttggctgcagagcagagagggtatcgcaacgcagtccagcgtcccccttctctgtggccccgaactgggcagagctagatctggccagcctccgtctggggccctcagccatccagcagcagctgatcagagccacctccagtgggtgtgggcaggtgagtacagctcaggctgggctgggacagtgtgtgtgattgcacagcaggctccacacctggcacgtccacacaggctctggaagccatggacaactcctgcccccacagttgggcacccgtggatatgggatggcttgtgtttggcaccgaccaaaaacaagcctttttggtgtggccagaggcctccaatctgtgtcagatatttatttatgctgcttattaaggggtctccaggcacccctgtgacagaagagactaatcagtcatcagccaggacccaggcatgtcctgggctcctgtgtccagcatgaggtctgtggctgatcttgcagctgaggcctgaagggtgagcgaacattgacctgtcccaactttgggcggcctctgccccataagggagactgagcagccagaggcctttgaggggatgaaggcctggcctgagcccatgtggccttagggtggaagcaccaggaccacagaacacgtgtctgaagacttgcctgcctctcacccctctgtcacccctcctgggccccggggcctgctgcctgcctctggagggcttgtcatccacccctccagggccatgccctgacctctgtcctctctacttaccacccaaggtcaaagggaagtgtaccactgaccacatctcagctgctggcccctggctcaagttccgtgggcacttggataacatctccaacaacctgctcattggtgccatcaacattgaaaacggcaaggccaactccgtgcgcaatgccgtcactcaggagtttggccccgtccctgacactgcccgctactacaaggtgggtcagagttgataggggcaatgccagtggtcactcctgaaggggcctgcaaggcaggtgcagggaggacattaggggagtggaaactgggaaggaggccgaccaagcccaaaggggactgctgtggaagggaggagaggcctgcagcccctccctgtggctgagaaggcatgaggcccaggtccggtggtacagccgggtccctgcaccaggaggagttagtgagagatatcttaggatatctggccctagacaaagacaaggaagggggccgactcaggaagtcagaggccaaaagctcagagagggggctacacggggcctcacagtgagcaggcagagagggtctgaggtgattggactttttctgctttgagaaacaaacagaaccagggctgaacccaagtcctggcccagccgggtgaaaggactctggcaccccctggtggctgggtggggcagagggtgctcccaggaagggggcgccttgagcttcacagatgcatcttgtgtggggcccggaggccgtccctgtctcacccaacctccctccacacacacctgcctctgccaagcaccaatgggtggcttctgtcttctttgccactgcaaacaaccacgtgcctctgtcccctcggggcctcgtttgggtctcattcacgcaggcttcacttgcccttaggcagcaggcgaggaagggcccctccagcccctttaccgggagcctcaggatgcccaggcgccaggtgggtgaggccaggcaggtagggccagacaggtgaggacggtgccctcctctgccttataaccttacccccgcttgcctgacagaaacatggcwtcaggtgggtggtgatcggagacgagaactacggcgagggctcgagccgggagcatgcagctctggagcctcgccaccttgggggccgggccatcatcaccaagagctttgccaggatccacggtgagctggagtctgtacccaggccatcctcatcccatccctagtgatcaaggtcactctccctgcccgtggctgagttgggcctggttctaggctgtgtccactgcagcccacaggccygtcagcctcttgccccttcttaggctcacacagtgcacatccgacgctcagcttcccggcttcccgcaggccctgcttccaggcttgtagatctgagccrctgaganctaggacatgtgccagggggttctttctgatcatgaatgtgcagcaggaaggcctcgcagacctcagcaccagcgcacacttgctaggggcacccctagtgaaagggagcagaccagggccccatagtcactgcccgggcattgtcccaggcagcaggattaggggcatctcccagagccccagatgggttcagaaaatgaagctctccaggctagtcaggcccccgatgaccgaatgccgcctgctttccagagaccaacctgaagaaacagggcctgytgcctctgaccttcgctgacccggctgactacaacaagattcaccctgtggacaagctgaccattcagggcctgaaggacttcacccctggcaaggttaggggcccgggtccccctgaggtggtggggtgaggggcagccaccttgtttcccctcctgcactggccccagggtagcttctcccaggaggcttcattccagctggaaaggcccccagttctccaggtggccccacagagaaagcaaagtggcttctcagagttgggggttggagtcaacccggggccctcacacctccccarcctccctttactcaccaggacctggcactcaggggacagcccacccactgcaggaccctctgggccccaggaatcccctgtaggtgccacctgggtctgacctgggccatcaggcacagactggcctaggatttggtttgcctgctgacctcttaggtccccaggcagtgccctgtctccctgacccccctgyggggccaagggcacacagtacccaccacttccacccacacccaccttctccttgcagcccctgaagtgcatcatcaagcaccccaacgggacccaggagaccatcctcctgaaccacaccttcaacgagacgcagattgagtggttccgckctggcagtgccctcaacagaatgaaggaactgcaacagtgagggcagtgcctccccgccccgccgctggcgtcaagttcagctccacgtgtgccatcagtggatcygatccgtccagccatggcttcctattccaagatggtgtgaccagacatgcttcctgctccccgcttagcccacggagtgactgtggttgtggtgggggggttcttaaaataactttttagcccccgtcttcctattttgagtttggttcagatcttaagcagctccatgcaactgtatttatttttgatgacaagactcccatctaaagtttttytcctgcctgatcatttcattggtggctgaaggattytagagaaccttttgttcttgcaaggaaaacaagaatccaaaaccagtgactgttctgtgagtgattggtgtctgtgccgtttgttgtcaagtccagggtccaggaagggtcttttcagtcaaggtcagtggaggcccaacagccacagccacagatggatccatcactgcagtgaaggaggagcagggcctagatggtggaggagcggggcaagctggtgggcactcctggccttgcctcactgtccagctcgagacactatctccttagcatcggcctcagctgctgttgtcttcacagccggccataccaccttcccgcaggctggtaggrtccactgtccagccccagggctagttgctggtccaccaggagagaaggcccaggcctggctcactgatggatccctgccagggataaagaacacgcacatttcactgacatgctggcttgaaccaacctggacaggaggtgaagggagcccagcaggcccagcacaggcaaagaagaggcggggcacacggcagccaagaggctctggagagatgtgggagccacagcagtgctcccaacgggcacgcagcacgcagggcgcagacccttctccagggactccaggccctgatagggtcagggacccttcctcacccttaggcctgccctccagggccacctaggttctaatcgtggcaggaaggctgagcaaacacaaggcccatgctccagacgcatccaacagggagcagccttgaaagccactcttccccggagccctcccttttatttcactgctgcaatgctgctcctacagggagccctaccttttttttgttgttttttttttttgagacagtctcgcactgtcacccgggctggagtggagtggcacgatcttggctcactgcaacctccacctcccgggttcacaccattctcctgcctcagcctcccaagtagctgggactacaggcgcccgccaccacacccggctaattttttgtatttttagtagagatggggtttcaccgtgttagccaggatggtctcaatctcctgacctcgtgatccgcccaccttggcctcccaaagtgctgggattacaggcgtgagccactgtgccccagcagccctacccttaatctcagggctttgatctctcccaagccccttccttgatttctttctccctcaaacccctccctaccccccaattttttaaagatagcatttcattgtgttgcccaagctgtaatgcagtggcacaaccttgaactcctgggcttaagggatactcccatctcagcctcccaagtagctgggaccacagggcacgccaccatgccctgctaattgttttttatagagacaacttctcacttttttagccaggctggtctcaaactcctggcctcacacgatcctcccactttggcctcccaaagtgctgggattatagatgtgagccactgcacttggcctcaaagccgctttatcagtggtcttgtccaccgtgagctctgtcccctttgcaagctgactcgcccaccccaccagcagccatgtacctttactgcctcacagccctggcctacagaaactcaggctctccagggagaagtgaccagccaagaccccccaaacaggatccctgacctgctgggggagatcccagagcagaagccccaggacacagcttccagccctgcactccggctctcccgcctcatgggggcttcagcaccatcagagccactcaccacaagcgtgtacggagcctccttctttggcagctcctcactggaagtggtggcatctgctgagctgggccctgtgggggacgtgtcaacaaagctctcgtccaccacccggaagcggatctcctcgccggtgtccatgtagaggtcgtgtgctccttcctccgtctcgtactcccacacccacacctgctccgcttcgtcgctgagggggtccagggtcaaggcagcaaccagatagtgggaggggcttccctcagcacccactccccgaccccgcaggaaaaaccaatctcagggtgagatcactgtggctgggaagtcacaggaaaagcaggtcccagccccatgcacaaggcctgggccaaacagagaggaacaagcgctcttggaggccaggacccaggaaggggaacatggggtccccagccaggcaccacggccagacgcacatggatctcagagcaccagagcaggaggggacgagacagggtccgagtcccacctctcaagacaagagcaacctgggcctcctgccacggagccccacacacccttttcatcaaagccttgtgacaggctgatgggcacccaaggacttgccgttttcaagaggacatagtgggatgggaggtcacctgcccacttggatgacaggtggtgagagaaccagccgggctgcgccaggttttctaacacatcctggagtcacatgcagacccagagccgtgctgccacccagccagggcagtcccccttggctctccatcgtccctggcagagcccacacaggggagccatgggttctctggtggcagtcccactgttgggtcctgcctctgtgccaggtcccgtgctgtgcaccgtgggtacagctgtgacatgtcagagtccttcccagtgaggagcctcagatttgtggatagccccacagaaacagacaaccccagtacagcaaggtgaggggtgggacagggacaacggaggcccaggaggaacacatcttagcccacgacccggcacacaggcaaggcctcacgtcccagggaccagtgcatgcctccagggcaagtgatctttaagatgattcctgcagggacaacctaagtgaagtgaaccggaagtgaatggtgtcccccaggacaccacagctctaatggtgtgcagtgtacaacccagacagccaagcctgatggccccgacaaagacaggcatgtgggcatcacatgactccctgcatgggaggcacagacaggctggtgcctctggagcaaaagcacaggcgaggggcaggcacagaggccagtgacatcaggttacaggccccaaaggccaccctaaggagtggggaccttcctttggagaggcctgagctccctgtgacaaaccactttaacccttggaggatacaacttggctggctgctgcagtgactctggggggatgagaatgtcatcgaagaagcctagagagactggaaggaaggaagcaggtgacggcctgagatgggggtcccagtggacgccaaacactgcggggtcttatgcttgacaggcaagccctgcctggggctgcccacgaggcggatgtcgctgtggaaacctaggccccttccccacctaatgcctctgcgtacaccacccacatagcggagcagccctgggcaaagcccggagcacctagtccccaaaacctctgcacacaacaggggccagtgggcgctaaagactcccagtcacttccgccagcttcagtgcccaccctgaagtcctgagtgacggcctcacagtgaaaccgcactgctgatggaggtcctcacacaacacataaaagggagggtgggcaagcttctctgacaccacggggaaggttcggcctcgacacctgagccctcccctgaccatgtgggtggacacagacctcctgcccccacagtgttcccaagtcttgtctgaggcgtcagggccactgttaccgtgcactccttctgggctgcagcctttgatcttcccaatgagaatctcatctaggaatggatgaaacaccacgcagcgaaaatggactggaaatgaagacagcccatcagtgatgctgaccggggccccagtgcgctcccatgtcaccctcaggtgccagcacacctgggggcctgtgtggctgctccatgccacatccccctgcaagcctagaccctccctttgtctcctgcaagttcacagcatggcccccacaggggggcagcagcagctgtcctgtaactgggcactcccaaaactgccaggttactcacacctgagcccagattctgagccatcagtggctccaaagtcaatttcaacctccctccaggctctccttcagctcctaaaaagggcagaagcaactggtaaagaacgcagggtttggaaactcccacctcctgctgagcagcaaagtcggccccaggcacagctctgacctggagaggaggctaaaaatgccctggtgttgtgaggcgcaggccagcagcccagcaaaaatgcctctgtgggttctcaggccatgctgcaggtggtccccactcacctgactgcaaggaaaacaccaggtggggtctgtgcccacatcgcacactctgaccccaggccctggcattagctgtatgtcaccttgtcactcaggcccttgctcgaagccccaaagtaggagtccaacgctgacctgagaatcagcacgcggctgccccctgctggttaccaacagagttcccaccgtgaggataaggcagtggctcagagccagggtgacccactcacagccacatagccatggggagacacctggtctttctgtacccaccagacagggccaccgggtcgaatcttgccttcctcagacaggtttaatcccaaacacaggcttccacgatgccgtcaaccatttagtcggccaacatgccccccaggacggcagggaccctggcatcagcagggcatgaggagaggcagccgatggacctctcaccctgggaagacacaaacgtgagccatcacagccaccatgaagatgactgggccttgtgctgacctcccagagagcagatgagggcggccaagggccacttacgcacagatggaaaaaccctgtcccccacatggcccaacattcagtttggtttaataaatcctcacagaggccgggcggggtggctcaagtctgtaatctcggcactttgggaggccgaggtgggcagatcacctgaggtcaggagtttgagaccagcctggccaacatgataaaacaccgtctctaccaaaatacaaaaattagccgggtgtggtaccaggtgcctatgatcccagccactcaggaggctgaggcaggagaatcacttgaaccaggaggtggaggttgcagtacgccaagatcatgccactgcgctccagcctgggcaacagagcaagactccgtctcaaaaaaaaaaaaaacttcacagagcctgcaccaggtttgtgccaggcccagtctgggcactgggctcacgggggtgggacagcacatgatcctgcgcccagggagccccaggctggaacaaccacatccaaaagcaaatgctgggcacccggagtcccccatggatggatgagtaaacaaaacatgctggagacacacaatggaatattatgcagccttacaaaggaaggaattctgacatgcactacagtgtggctcaacctcgggctgaaccttcacatggggccaagtgaaagcagccagacacaaaagccacacagtgtgcgactccattcatgtacagtgtccagaaccacatccatagagacagaaagcagttaagtggctgccagaggctgggtgaaggacaggattagcagtgactgctactgggcggggtttctttgtagggtgataaaaacgctgtggaatggccccgcgcacggtggctcaagtctgtaatcccagcactttgggaggtcgaggcgggcggatcacctgaggtcagcagttcaagaccatcctggccgacatagtgaaaccccgtctctactaaaaaaatacaaaaattagccaggcgtggtattgggtgcctataatcccagctacttgggaggctgaggcatgagaattgcttgaaaccaggaggcagaggttacagtgagctgagactgcgccattgcactccagcctgggcaacaagagtgaaactctgtcaaaaaaaaaaaaaaaaaaaaattgtggaattagatagtggtgatggcttagctgatgagggtgttgttcctggtgggagggggccctctcctgccctgctcatatctgcctacttaccataacccctggaggcctgtggtgccagtcactgtattcctccattcctatagttcctccaaactggaacttgcatctagaatttttaacagattcaactcctagcgtttagcaacagaactgcctcataatcggtgttgagttcttccaccaggaactatataatgcttgtttgtctctctttgggggaagctaaaaagttaatgatcattgatgagatctgtcttcataaggagttgcaaaatggtgataatgtaattaaaaaaaaaagatagtggtgatggttgcacaac

SEQ ID NO: 96082 - DNA, 25221 bp, Homo sapiens
tcctgagaagtgggctcgtctttccttccttttctctcaaagggatgtcgtgaggatcatgcaaaaaaaactggacactggcggacttcgagaaaagaataacgagattgcatcagacaggaggcatggcaggacctgggcacggctttctaaaatccaaagaaacaggccccagctgagctgaaatggaccccagacccatcgaaaccactgtgcttaaactatcccctcatctggggtcctctcaactccaactctgaggccaagcttccagggtttccatgaccctcctgggcctctactggcctcttatttgcatatagctgttgaatcttattgacctacaggcagaagctgaggcacaaatataactttaaagagtttacttgagcgagagtaaggataactgcccagaacaaacttctaagttgccgtggggtgtgctgcgttgggcctttcctacaggtttttataggcagaagggggcaaggatgacaaagttgtttggcaggaattctccttggtttatagaaataacattgattggtggggtgcggtggctcacatctgtaatcccagcactttgggaggccgaggtgggtggatcacctgagctcaggagttggagaccagcctggccaacatggtgaaaccccgtctctaaatacaaaaattagccaggcacggtggtgggtgcctgtaatcccagctactcgggaggctgaggcaggagaattgcttgatcccaggaggcagaggttgcagtgagccaagattgtgccattgcactccacctgggtgacaagagagaaactccatctcaaaaaaaaaaaaagaaataacattgattagtgattggctatacattgttgaactatagggtatgaactatagggtgtccagtgtacagcattttatggctacttggtgtcactctagagccacatagcaagtggcttcaagaggtaattcttgatccttttgtagttcatgagcgtgatgattgggtgttcacatgcatgtgtgagctgtgccaccctcgaaccttgttaccatgtaggcacattaccgatctgacatgaagaaaagaaaagaaaaaaaaagaaaaagagataattctttagctcaagggaggagtaagacttgacagctgttgcgtttcagtatgtctgggcctgattatttaaaggggctccaattcctcagataaaacattatttttctgtctcaatctgcagccttcagggccagatggggagctactctgtacacaagagtgtggcacaaacccagggtacagctgagaagagctaaccacagccattgaatgtgggtgcccccagcatcatgaacggcacttagtccaactgtccttactcatggaaaaccaaggcccagcgcagtgaggggaacttgcccaaggttacatggccaatgagacgcagagcttcgtctcccaaatccctcacactgtacccacttaccagcagggctcactgggggagggcagggacctcttgtctggccacacagctcagcccttcgaccacctggttcccagggaacctgcaaaacaattctcaagcccagtcagcttatcccaaagaatgagaactcctactccaccttcgaggcctaatgaaaccacagcctccaccgggaagccttccctgacccctgagaatccccccacccatccacccagccaggaacccctgagcagcttaaggggatgggtccccttgtcttgacctttactcttcagaccccagctccctgcctgagtccaggtcagagctacacatgccctcatggttcctagcttttcccttctagcacttcctggctttaactgaagtcacctaatctgggaggccttccatgatcaccatatcatctaaggtggccctgaccaccaaggtggcctgacctaaggtcacctgaccagtagacccccccatttctggtttgtttccttcatcccacgacgatgtcatatgtgtttacagcactgttcccagccccagaatgtctagggtggggctcagctaagttcccaggagaaccccaatacccagcaccgtgcagggctcagagaggccctcaggagggatctgttgaattaatggggatacatcagtggacaaatcgaagtctcccgccctcctggagcctacattcccacagggggaaacacactgtaggcaaacaaaataaatactaataaattaatgaaagaataattagtgaaataagagataacataaggaccggtaatgctaagggttatggagaaaaacaagccaggcccctggatggggagagacgccattccagtagggggggcccaggaagggggaagagatcacagatgtttgccagaggagtggcctcactgggggtcctgggcccagcactggggcacagggagggggtgggcagcccgtggggccatgacccctcccctcccccgcgtctggggaagggcgctccctcctctccaccagtaggggggccaggccaccgcacacccggcctcccgcccgccccascgtcttcctggattcttttgttggaggagaggcgggctgggggtgcgggaccgccgggccagtggccactgcggggagccccaacccggttgtcgccctaaacagaggtcacctcggtcagggtctccctggctgccgccttggtttccccgtcctcgcgtcggggctgttcgccgccacttccccgcggccacaccttccctggggccacctcctcccggagcccgccgggcccactctcacctcccgccgccgatcgcaccgaagcccaggagggcgatcccagctcgagatcccgcgcctccgcctgggctgcaacgtggccgcgggagccgggagaccccgcccgggaggctggagttaacgcccctccccgcccagtattcgccaggcccgggatctccgaggccgcctcgaggtctgccagggcgggaaactgaggcccgagagggcggtgaactgcccgagccacagcactggtcggtgcgggcggcctcgaacccagaggcccccctcggacggtccgcgggcctcggacccagcccaccgtccggaaaactctgtccatctcttcctctctggtccccctctccctgctcggcccactttcccggcagagccaaaccagggatgtctctgggtacctccctagggtgggctcctacacagcccgcgagggccagccaagctttgttggccacccaccgggccaccggggtcggctgatttctgcctctggaaattacccatttctgcttccctggcctgaaacccaccggcagcccccaggctctgcactagtgggtggaggaggaggcctgcggtgaaggtcgcaggaatgcacaaccaaacccaagagactggaacttctggaaggccctggaagccggaggtgtcctcaaacatctgcccatgaacctggctcccgcctcagagcctttgcccttgcagttcctgcagcctagaatggccttccttcccacccccaaccgcagctccactcctcaggacgcctctggacacagatttgagtctctgctcagtggtctcctctgggaccattgtaaagcaacctgccctgcagtctctgtcccatccctggggtgttatttccatcagagcactcactgctagagtaaactttcctatgctcatgcttttattttcttgtttattgcctgtctcccctactaaattttattcagttaatactgtacaccataataaatgtgttagaagataataagtggcatggaaaaacagaggagggtaagggagatgggaaattgtgggagtagggaggttgcaattgcaaatagagtggtcagggtaggcctcactgagaaagtaacattggacaaatacttgaaggaaatgagggagccagccatgccaattccaggcagagggaacagtcagcgcagtggccctcaggcctgttgtgcttgaggacctgcaagaaggccagtgaggctgggaggcctggggaggggcagacagtaggaggtgggggtagaaggggtgggatggggctctgtaaatctgggagggctgttactctagacagggctgtgaggagggacctgagcgatttcaaggcatactctggcttctgtggtgagaatcaatgtcagtggaggctggagaccagtgaggagcctgctgccactatccaggcaagatgtcacaaacgcggcaagagcggggagggagaggcagccagaattagaatggctgttgaaggtagagaacacaggatttgctgaggagttggatgtggggagtgagggaaagagcaggcaggactgcacagttttggcttgagcacctaggagagttgtcattatctgagatgtggaaagtggccggtgcttggtctgggttatgtttgagacacccagtggccatctgagtgaaggtgctgttggggctcagaaagcgatgcctaaaaatatggcacttgggcatgctgagtactttgaaccaaaggacactggaagagcctcagaagcaaagtatctctctgaccttctcctgccccccttctttctcccgtttttctcctgcaaggcaggccatagaaactaaaaatcctcctccctaaggtgagttatagcaactacaaatattggctgggcacagtggctcatgcctgtaatcccagcactttgggaggctgaggtgggcggatcacgaggtcaagagatcaagaccatcctggccaacatggtgaaaccccatctctactaaaaatacaaaaattagctgggcatggtggcgtgcgcctgtagtcccaactacttgggaggctgaggcaggagaatcgcttgaacctgggcggcggaggttgcagtgagcagagatcgcgccactgcactccagcctggtgacagagggagactctgtctcaaaagaaaaaaaaaaagaaaaaaaagtaactacaaatattactggaaacatcccccacctttctgtgtcgggcctggccataaaggaattctctgatctaccttgcctgatactaggtcataagactctcattccagaaggggtcctgccctcctcccagcaggagggaatgccacacagagagaacaagaagaatccgaatctgaacagacattgctgggtttccacactcagctattaacattaaatcattcccttttgtctaatcgcgtttaacacagttgtccattccttattcctttttttttttttctgttgcccgggctggagtacagtgacacaatcacagctcactgcaacctcgacctcctggactcaagcaatcctcccacctcagcctcccgagtagctgggaccacaggcacctgcctggctttttaattttttgtagagacagggtctcactatgttgcccagactgtcgttaaatgtctggcctcaagcgatccccctgcctcagccttccaaagtgctgggattacaggcatgagccaccagacccggccagggctgtccattcttcatcaaaccgagacataaaaataaagatttccctgagtatttgtgtcttcattcctgaaggctctcaagtcacataaaacattgagtaaatcaatctattatgcttttctcttgctaacctatattttatttgtaggagtgtccgctgtgacctttgggatgagtaagggaaaatatcacacctttctgcccctacaatgcccagaacaaagcatttggcacttagcagtttctcaataaatacttgatgaatgaatgaagaaggaagtagcccagtctgtgcgagtagtccctgagcgtcaggcggggaaggagagccggctgcctttgcgggagctgtgaccgcctgctttggtgcctcccacgcaccctccttgtagagacgattaatcccagacttccattttcctagcagctcactaggcgggccttgcttcagagcagtctctcatttcctctgcacaaagccctcaaccgtcctctgcacggccgcttactgagcgcccacggtgagcctggcacgatccttgccctcttggtccccacagaggtggaaggacaggcctcgcggggtccgggccacgaaggacagccccgagtccgttctgccaatgccwgcctcgctagcacgcagggcgggagcccartggggaagggcttagggaggctgggaggccggacccatatgggcrgggcacagcgttgctaggggggattctgataggttgcgcgaagggttgccttcgtgaggccccgccctcactggaacgcttcggacttatcaggttaccggattcgagtcagaagcggcggcaggtctgaacgcttcggtagsataagtgcggtgggagggggctctgcggttttggggagcccagggcgggaacccggacccggctggaagtccggagcctggccgcagccccgcccctccgctctttcttggtgaccttaagccagtggctgcctttttctgagcccgggcggggccgaaggcggcccgtaggccctcgggactcccagcactgcagagggtgtgaggtctgacatccaagacacgttgtttcgtatttctgaaggaagaactsaagctccgggaagtgatggctggggatggggcgggcaacttggggaccgagtgtacgatccacgcctaaggttgagggcggccgagctagccaggcagccgtgaccccagtgcttttcagacgtttcttagcttccagagcccaacacatacagctgatacacgcagaccagatctggtcaggtcctcggaagctgagtccagagcgatgctgctgaagacaggtacctacaccggctggggtggcttggaagggtaggggtgagtgctacaaggagtgctttggcccttcttccctaatgtgggtatgtggagagacaggttcctctctcttttacttagagctgggcaggaagggaggagatgcttccccatacgggaatcatttctccttcaaaggggcccttcctttctcacttcctctccctcaagcacagaggccctaactgatggatatcagcatgtgcggagaaccgcctgtacagtccctacagtaactccatattacagataaggaaactgaggcccgagggggaaaggtctcacttaggtgagctgattgggtgccyatcctggctggcttacttcttaascstctctgaggcctcttgagggtctgtggtagagagcaaagagctctggactggggctcaggagacctggagtctggccaatggtcccgacttaacgatttttcaactttactgtggtgtgaaagcgaygcacattcagtagaaaccacagtacgtatacaacctgtgtttcagtattcagtaaattgcatgaaatattcaacaatttattataaaataggctttgtgttagatgattttggccagctgtaggctaatgtgcgttgtcgcactttttttttttttttttttgagacggagtctcactctgtcacccaggctggagtggagtagagtggcgygatctcggctcactgcaacctccatctcccaggttcaagcaagtctcctgctcagcctcctaagtagctgggattacaggcactcaccacctcaccccggtatttttttgtagttttagtagagacagggtttcaccatattgcccaagctggtcttgaacccctgacttacggtgatccgcccacctcggcctcccaaagtgctggaattacaggagtgagccaccgtgcctggcctgtccacatttttaaggtaggctaggctcagctatgatgtktgccaggttaggtgtattaagtacatttttgacatratattttcttttttattattttgggatggggtctcgcactgtcacagcccaggctagagttcagtggcacgatctcagctcactgcagcctccgcctctggggttcaagtgatcctcttgcctcagcctcccgagtacagcgcatgccaccacgcctggctaagtttttgaatttttagtagagacaaggtttcaccatgttggcctgacctcaagtgatccactcgcctcggccttccagagcgttgggattacaggcatgagccactgcatctggctgatgtgatattttcaacttacactgggcttatgagaacgtagttccgtggtaggcctaggagcatctgtactgttaagttctatatatgggatgggaggagctgatgggggttataggaaggttaggacataaggtgttagttttgctaattccaggtgttagttttgctaattccagcaatgctgtggtgacggccagacctcaagccactgcctggcccaggcaccatcctcccacttactgctttgcaagagccagccattgcaggaagagccaattctaccctaaacccaggagtccagtttcccttatatataggcaggcagcctctgtagggctgagcaacatacagatggggtgggatgagggctggagctgtgggggcaactgatagtcaccatcccctcctcccttgcccsstagtgctcttgctgggacatgtggcccaggtgctgatgctggacaatgggctcctgcagacaccacccatgggctggctggcctgggaacgcttccgctgcaacattaactgtgatgaggacccaaagaactgcataaggtgagtaaggtccacactcacctgatgagccttgcccagggccctgcagattcgggggcaggaagtggagagtccactagaaaagagggcaaggtcagagttctccatcccagagactgcagccagaagtcactcggactgtctgacacctagccccatgacctgtctggagcctctgcagggactctcaggccccaacctggtcacgaggcagggaccttacatggacccagcccctgagataactcttagaaggtcaggccaggccccctgtacttcccctgacccagtcctgccttttagcctggggccagccactcctttcaagccagcttgcttatggctcatcgcacaatctctggtggtcatttacactgatacctggcttagggctcagcaaggtcatggtttttayagcccagattcaatcagagctgaggcagggtgtgggtgagggccgggctgggtccctgagctaccccatccctctgcccctcactagtgaacagctcttcatggagatggctgaccggatggcacaggatggatggcgggacatgggctacacatacctmaacattgatgactgctggatcggyggtcgcgatgccagtggccgcctgatgccrgatcccaagcgcttccctcatggcattcctttcctggctgactacgtgagccgcaccccagccctgcccttgssctcagggctagaccactcctttcaccctacctcgcttagggctcacttacrtgattgagatctcacagtctagtgggggaaacagacaaatgaacaccgacttttggcctattctgttgagtgagagccagaaagggcatctcacacagcctggtattctaggaaggttccctggaggaggcatttcttgagctgagcccagagagatggcattggaggcagagaggatggcaggagcaaaggcctaggggcaagaaacagccgctgggaggtgtgtgttgggggagaggtgggccatcatgggcagaggccgggccagcatgctgggaccatctcctttggtccgtgggagccactggaggtttaatgggacrgggtcagatatgccttgaggaggctccttgagggtcctgcttgagcccactgtgtcctcaaacccccacaggttcactccctgggcctgaagttgggtrtctacgcggacatgggcaacttcacctgcatgggttacccaggcaccacactggacaaggtggtccaggatgctcagaccttcgccgagtggaaggtagacatgctcaagctggatggctgcttctccacccccgaggagcgggcccagggtgagttacgcagctggctggggcacgtaggcaaacggggagggtggccatggagacccacccagcgcccacctggctgagcttcccaattccccctacccaggggttagggggattgtggctcccaggctccywaaatatgagtggcagcatagcccaccctggaagcatttgaggctctgggtatgtggggaggcacctactgtttggagcttgtttcttcacatctgttgggaaaaggtctgggctaaggccccagactgcctcctgcacttcctcaggactgaaacaggttgggctttctctagggtaccccaagatggctgctgccctgaatgccacaggccgccccatcgccttctcctgcagctggccagcctatkaaggcggcctccccccaagggtaagccattctsccccctgcctgatggcgcttcccacacccaggcctccttacctcctgagtgccaggcttcagggacggggccttccagagccagggctgctctcaccacaggtgcccatatggtgatttgtaggtgtctagagacctacattaagtagccgcaaagagcaggtgggctcagccagcccagagaggtgtgtgtgttggagggagtggcgggccttagagaagaggcccttgtgaagtgggctgaaggagttggcatcagaggcaggagagccatctgtgctggcacacagtgcccaggattccaggaggtgcccattaggcgaggagacccagaaggctggggaggccaggcaggtggggccaagcctcagaggagcctgtgggctcatgagggctcccttagcatgtttgacaccaaaaagggtgggctcaggcctctggagctgagaagaaagcagacagcagtttctcactgagagaacatgggggtgggtgggtgtcagggagggttgtttgtgggtgcaccagcctgggcccacaccctgggtttgacccaagctggcatgagaaggcagggtaggctcctggcaccagcatgcacagaagggagaccccggtagccccagagcagggccaccctctgaggccctcctcatcctgagcaagccggtggggcctgttctcttccctcttccccactctctgtctctcctgctgagcctcctcaactcctgtgtgggtccctgggctgcagcgtgtgattctggtgctggactctgccttyccctcgacatccaggtgaactacagtctgctggcggacatctgcaacctctggcgtaactatgatgacatccaggactcctggtggagcgtgctctccatcctgaattggttcgtggagcaccaggacatactgcagccagtggccggccctgggcactggaatgaccctgacatggtaccaggatggagggggatgtccctaggcccaccatctgtgacgaccctgctccccactgccctgtgctttcttccttcttggaggctcactgccgggttctaggtcagcgcttctgaaatgtgtccctgaactggttgctttagacttgacttagaagctggtttccagggccccatcccccacgttttgcatcacaatgttcaggggaagaacactgttaaccatctccccaggcaattctgatgtttctgaaagctcaagaacttgggtctgtagtgaccctggaataagatgttattgctctgcaggttgaagatcacgaccttgctattcctagtgcctggactgctctcccccgtgtgcctctgatccttttgtcaatttcctgcctcatcctccacagggacaactggccctcacagtcctgcttctagcccttccattctatctcggtcattgccctgtgacattttgttgttgttgcaatttatagctttatagttatmtgttagtcaacaagcatttactacctgattgatcctatgatgattataagaattacaagtgctaagccaggtggagggagcaacctggaggagcaggaactggcctgctgtggagtcccagctctagctctgccactttacctcgggcaagtaacttaatttgttctgtgcctcagttttgtcaattggaaaataagaatagtagctaccttatagggttgagggttaaaataactctgaaatgcttggcacagtgatgggcacacagtgcttaaattgttgtcactaagcctgtaattgtgtcctgactatggattgcttgccctggggtcaggagtcccccttggtccattcagctgtggctagggcaagtgggtgtggccagtggtaggtacagggactttgtccssttctgtttcttaccactgtcaccttgggacatttattgacttracctagtttataagctttttracaacargagcccatttgatcatctgaacaacctgtgatgtagccagggcatattaccacccccatcacccccatggggtttttgttttttattgatttatttattttttgagacagagtcttgctctgtcgcccaggctggagtgcaatggcgcgatctcggcttactgcaacctccacctcccaggttcaagcgattctcctgcctcaaccgcccgagtagctgggattacaggcgcctgctatgacacccagctaattttttttttttttttttttagtagagatggggtttcaccatgttggccagactggtctcaaactcctgacctcatgatctgcccgcctcagcctcccaaagtgctgggattacaggtgtgagccaccacgcccagcctatttatttatttatttagagactgagttttgctcttgttgcccaggctggagtgcaatggcatgatcttggctcaccgcaacctccgcctcccaggttcaagcgattctcctgtctcagcctcccaagtagctgggattacaggcatgcgccaccacgcctggctaattttgtatttttggtagagatggggtttctccgtgttggtcaggctggtttcgaactcctgacctcaggtgatctgccctcctcagcctcccaaagtgctgggattacaggcgtgarccaccgcgcctggccttttgttttttgagtcagagtctcactctgttgcccaggctggagtgcagtggtgcaatctcggctcactgcaacctccacattctggttcaagttattctcgtgcttgaacaagtagctggaattacaggtgtttaccaccacgcctgggtaatttttatattttcagtagaaatgaggttttgctatgttggccaggatggtctctaactcctgggctcaagtgattcacctgcctctgtagcaggaccagccgcagataaaactcctcagacaccagattaaagaaggaagaggtttttattcggctgggagtgtcggcagactcgtgtcttaagagccgagctccctgaaaaagaaattcttggcctttttaaaggcttacaactttaaggggtccatgtgaaagggtcgtgatacatcacgcaagcgtgggaaacrtgactggaggctacatgcatcagctaacagaacaaaaagttttacaatgcttttttcatacagtatctggaatttgcagataacacaagtagtttaggtcaggggttgatgttattattattacttttttttttaactcctagggccaggtggtggtgccatggttgtctggctatttatcttacttttgtttatttccaactttttgctttttctctcctcctgtcttgtgaactaggcaaggttgggagaggagggcagcaggagtagtagtggtctccttccttacctcagcctcccaaagtgctggcatttacaagcatgagccgccgcacctggccatctgcccacccccctaccgccgactcctgttcttgatggaaaataaaaagctgaagctcagatggaaggtgacttaactcccccaaggccacagggctagggratggtgtttgctgaaccaggcctcctccacatacagccatctttccctaatccctaattgctcttcctcrgctacaagtttggggatggtccctgtgtctacctccttgaggagatgagagctgactactcctcttctctgcccccagctgctcattgggaactttggtctcagcttagagcaatcccgggcccagatggccctgtggacggtgctggcagcccccctcttgatgtccacagacctgcgtaccatctccgcccagaacatggacattctgcagaatccactcatgatcaaaatcaaccaggatcccttaggcatccagggacgcaggattcacaaggtactagggtgtggagggaaggaaggggagggctgaggaactgggttctcctgagagaaaggctgccagcctccctgggggcaacacctggcgaggtacaggagtcgcccagtccccaaccagggctaccccttctggttgcttatggttgaggactctgatgggagctgctccaactgtcctcctcttgctgggtgagagcagggctgagcaggacagctcaagggagtcggggatgagaggtgtcagccacataagtgcacatagcaagggtgaggcacagagcttctatacacccgtgatggcctgcagagagcttggacttccctccagagcaggaggagctggtytgtttgtttttgagacagggtctcactctgtcacccaggctggagtgcagtggcacaatttcgactcactgcaatctctacctgccaggttcaagcaattctcgtgcctcagcctcctgagtagctggcactacaggcgcctgccaccacacccagctaatttttgtatttttagtagagacaccatgttggccaggcttgtctcgaactcctggcctcaggtgatccacccgtatcagcctcccaaagtgctgggattacaggcatgagccaccgcactcggccaggagaagctgttatagccaaggaatactacgactactggtggctgctatttattgagtacctaccatgtgctgggagttttagataatttttctcagcaaggtagttatcttgccattttacaaatgagaaaaatgaaacttcgagagtctgagtaactttatcccaaggctacacagttggtacaaacaagactggacttcagtgtcacctcaaagcctttttttttttttttttttttgagatggagtctcactctgtagcccaggctggagtgcagtggcwccatctcagctcactgcaacctctggctcccaggttcaagcgattttcctgcctcagcctcccaggtagctgggattacaggtgtgcgccaccacacccggctaattttttttgtatttttttcagtagagacagggtttcaccatgttggccaggctactctcaaaactcctgacgtcagctgatccactggcctcggcctcacaaagtaatgggattacaggcatgagccactgtgcctgtctgcctttgctctttaccaaatcctggattctggtaaaaagaaacctacagaactatggaaggcacctatagaactggtgatgcccagaggaagtaacaattccctgccagaggggctgatggtggagctgggcctggaaaaccttctggaggatgggagttcacatccagctccactctccaccctcctggaacagagttcactgttcccactggacagcaccctccaggccagcactggcagctgtttggggccagcactcatacgctgtactgttgttgcgcttccctgtttctgcgtttatccctcccgttgtcctatgagcttctggggcagggcctcatgcagcacttgtctcagtgtgctagcataggggccgggctcagagtaggtgttgatgagtatctgctgagtcagggaaggtgggcagatagggttagataagctggggtgctggaggcccgtgssatcctccctaaacctgtgtgacatggagctgtgaactgggggacccagaactcagggagggccagggaggcaatggtaggtcctgtctgagcaagggaccccagccagtagccaccttctgtgcccaggaaaaatctctcatcraagtgtacatgcggcctctgtccaacaaggctagcgccttagtcttcttcagctgcaggaccgatatgccttatcgctaccactcctcccttggccagctgaacttcaccgggtctgtgatatatraggtgagcacccggctgcctgcagccacccgcctgggcttcagatttctgtgggasggtattatggggggtggttgttcacatatggcctcccctgagccgtgggcttagggcctctggcaggtgcccatggggagctgcaggcactgagagctgcagccagtgccgtgctctgcaccagtattttcaacctatgcaaacagaactactgcatataaatatgaatcccattagcctctacggctgtactcctcccaagggtcagcccttgctggcacgttcctcacagttttccatgggctggggctttctccactgcccgtgcttgggcacctgctggatttgctggtggagaagtgatggggattcagggctcccacttctgtagggcatactggaagcccagcacagacaggccaaagtccaggcagaaggcttctacatcctctagcrggggsggtctctgtgcmgccactctcatggtggcattggtgatgtccctccccactgcaggcccaggacgtctactcaggtgacatcatcagtggcctccgagatgaaaccaacttcacagtgatcatcaacccttcaggggtagtgatgtggtacctgtatcccatcaagaacctggagatgtcccagcagtgaggagctgggacmtgtgacaggctgtggtggcaccactgagcctagaccatggagccttggcatgcccagggcaagtggggaggttctctgctccccaggcctgctcggtgactgaccccatcatacccaaagtgcaatctcayggccaggttctatgcccygtccaagcgtaaaccctcttggaaacttcttttggggcaattttcctgtggccttcctggcctctacttccatgtgcgcagccccacagacgttgctgagcaactcgccagcctcctgagctccatgcccatcaggactctagcctctgaccttgctgttgactctgaaatcaggatttggaagttttcgaattaggagtagagagatctgacctcttgccaggaatgcccatggatcatgtgattggcttttctacccatagagggccttgcagcctgataccacctgggagtgagggtcacaaaggagaccttggctccctcaggtcaccaataaacctgttctttaatcaagtagttgtaatatggacctggggtacctttagttagggactctggtggcactacacggggtgctggattcaaatctcacctctatggatgatgtctggcatcgtctggcccctccttttccaaagtgaccagaagattgtacttcctagagatgccagacttgcctcacacccaggagctgcccctgctgtgcctggtatgctggcagtggtgatggtgacaacacaatgaggccaagtagcaatgctcccaggtcctgcagcttgtgctctgcccagcagtgcccctggcccagcacctcagcctgctcttctctctggtggctccaccccaacccctacttcttttcctttatttctctcccaacctggctgcaaaggaggttcatattccccagatgtgtccacaaacctgtccaggagttgtgtcttaaaattgatttcctgtccctcttcctaaggacaggggtaacagtcaaagtgaaggaatgatgggttcttgcctgtcttgctttggtccgtatttcccaagccctcctcttttagccaaggctacagggcacttgtcttccctggtggctctcccctttggagagagctagtggcagagcaacctagctaggtcctccttgggctttgaatgcaggagcacccagtgccccaggccttgcactgtgctgcccaaggagtattttctgggtggatctcccatactcctcagggttctgaggtccttgtatttagggtatggtgtaaaaacttacatatgcacattttgttacatcatttaagatgattgaagctttactggttaagtayagggtcaccagagaaagttcctttccccagttgatgtcttgaggctgttgagaaacttaggacagaagcctacctcatcccaggcctgcccctccgtgcatagctctgcctttgggtcttgttcatagtgctgttcaggcaaaatggaatagtctcaggwgggaacaccttctcttgctagctccaggaaggctttgtgggaaatgagttgagaccatggacttgggagttgggggccagagttgagcctggacttgaccaattaattcccttacctttcagcccaagatagctacatgtctttacttgctgtataagttttccttttgtcctgggggtgcctgattgatcctatctcttcayccttcattcyttcaacaaacatgccatctatctcccaggacatttattcccttctattcaaggccagttaggaatgcaattattttttttttcagttaaatacagacttgtttggacgcaaggtaccctttctctttttaaaaactttttatcatgaaaactttcaaatacaaaaataaaatggtagagtgaacctccatgtacccagcatccagctccagtaaccatcaatgtgtaccattatttcatctctcttcctgcacatgctcttctgatgtgtgagctagagtatctgaaaggaaatttcagaaaaccctaaaaaccactatgtctctaacagataagggctttaaaaatacatatatgagccgggcgcggtgactcatgcctgtaatcccagcactttgggaggctgaggtaggcggatcacaaggtcaggagattgagaccatcctggctaacacggtgaaaccccatctctattaaaaatacaaaaaattagccgggcatggtggtgggcgcctgtagtcccagccactcgggaggctgaggcaggagaacagcgtgatcctgggaggcggaggttgcagtgagccgagatggcaccaccatactccagcctgggtgacagagccagactccatctcaaaaaaaaaaaaaaaaaaaaaaaaaaaaaaaaaaatatatatatatatatatatatatatatatacatacacacacacatatatgtgtatatatatatatatgaccttaatacaattttcctatctaaaaaaacataattttaaaataatctaataaccaatctatgttcagtttttgccagttgtctcaaaaatctctatagtttgtctaaatcaagatccagtaaaatagtccagtacgaactactgaaagtttgctcccttcataaaagcattgaaaaacctgccacatactatcaaaatcaactttcacagaactctggaaattagccaaaagcttgcggcaacccagaaaacttcaactgaaaaaaaaaaaagttgaattctagtagaaacagcaagctatgtggtattttaccttattaccagattttaaatcagctattttaaacatgttcaaagagccaaaggaagccgggtctaaagaaataaaggaaagaataagaatgatgcccaaacagaataacaaagaagagataaaactgtagtggggaagaaagcacaaattctgaagttggaaagtacaatagttgaaatgagaattcactgaagaggtttaataatagtagatttgacagaaaaagaatcagcaaacttgaagacagatctgttgaaattaacctctctgagaaaaagaaagaaacaagaatgaagaacaatgagcaaaacttctaaaacctttgggataccaccaaatgtacccatatacacataaaaaaagagaaaggggcagaatattggaagaaagaatggttgaaaatgtctcacatttgatggaaaatattaatctacctatccaagaagctcagtgaactccaagtaggttaaactcaaagagctccatacctagacatatcataatcaaaccctcaaaagacagaattttgaaagaggcaagataaaagcaactcatcacacaagggagtctcaataagatttacaactgacttctcatcagaaaccatggaaacaagaaggcaatgggtacatttaaaaataactaagtataattggattgtttgtcacaaaggataaatgcttgaggcactagataccccattttccatgatgtgattattacaggaatgcaatgcctgtatcaaaacatctcatgtactccataaatatatacacctactatgcagccacaaaaattaaaaatgaaaaaaaaggcagtgggttgacatattcaaagtgttgaaagaaaaagactatgaaaaaatttgttatttggccaaactatctttcaaaaatgaaggcaacatgaaaacattcccagataaacaaaaacagagttcatctctagccaccctgccctacataaaatactaaaggacatccttcaggccaaaatggaaggaaactagtaacttgaatccacatggagaaataaagagcaccagtaaatggaactacataagtaaatataaatgattttggtttgtaactcattttttgtccccatctgatttaaaaggtaacttaaatgcagtaattataaactaagatgggtagactatgtataaagatgtcatttgtaacaataacagcataaaggaggaggggaacagctatataagagcaaaatttttgtatacaagtggcatgaattagtattaatcagaatgagatagttcagaataagatgttaatggtaatccctatggcaaccacaaaaaaactttaaaaatctagtaaatatatgatagagataaaatggtacaaaataaaatgtctaacacaaaaaaggcagtaatggaagaaatgtggaacaaaagagacttaagacataacacacaaatagtaaaatgacaaatgtataaaccttatcaataattacatgtaaatggattaaacatagatcgacagaatgcatttaaaagatacacacccaagtgcacacacaatccaaaaatgtgctttgtttaagagacactttagactcaaagacataagttggaagtaaaaggacagaaaaagatacaccaagcaaatggtagcaaaagtactagggttggggggagggtctatgttaatatcagaaaaagactttaagacaaaaattgttactagatccaaaagattttataaaattgagaagatcaatccaccaaaaaagatataattttacacattagcatacctaacgagtccaaatatataaagcaaaaccagacacaattgaatacagaaatagataattcaacaataaatgttaccaattatattaccaatactaattataaaccaattagacctaacagacatctacagaacattccacccaatagcagcagaatatacattcttctcagtacaaatgaaacattctctaggacagaccatatgttaggccataaaataagtatcactaaattgtaaaagactgaaattgccaggcacggtggctcacacctgtaatcccagcactttgggaggccaagtcgggcagatcacctgaggtcgggagttccagatcagcctgaccaacatggtgaaaccccatctctactaaaaatacaaaaattagccaggcttggtggcaggcgcctgtaatcccagctactctggaggctgaggcggaaaatcgcttgaaccctgaggcggaggttgtagtgagccaagatcgcgccactgcactccagcctgggcgacagagcgagactcagtctcaaaaaaaaattagctgggcatggtggtgggtgcctgttgatgcaggagaatcatttgaactcaggaggcagaggttgcagtgagctgagatcacaccattgcactccagcctgggtgacagagcaaaactccatctcaagaaaaaaaagaaaagaaagaaaaagaggacacacactttcaatttcagtatctaccaaaaagctacagtaataaaaacagtgtggtactggtataacaatagacatacagttgagagtccagaaataaacccatacatctatagctaattgattttttttcttttttagacaccaggtctcactctgttgcccaggctggcgtgtactagtgtgacatagctcagtgcaggcttaaacccctgggttcaggcgaacctcccaccttggcctcccaaagcactggaatcagaggcatgaaccactgcatccagccagttaattgattttttttttttttttacaaaggtactaagacccttcaattagaaaatagtattttaaataaatggcactgggacaactagatatccacatgtaaaaaaaaatgaatgtaactcaaaatggttaaaagacctaaatgtaagactgaaaactataaaactcttagaataaaacataagtataaatcttagtgactttagattatgccacagtttcttagataggacactaaaatcagaaacaggctgggtacggtgggtcatgcttataatcccagcactttgggaggccaaggcaggtggatcacctgaggtcaggagtttgagaccagcctggccaataaggtgaaaccctatctctactaaaaatacaaaaaaaaaaaaaaattacctgggcatggtgccatgcgcctgtaatcccagctgctcaggaggctaaagcaggagaattgcttgaacctgagaggtggaggtttcagtgatcgtgccactgcactctagcctgggtgacagtgtgagactctgtctcaaaaaaaaaattttttttttaaatcagaagcaatcaaaaaaaatagataagttggacttgatcaaaattcaaaacttttctgtgtcaaagtatactatccagaaaattaaaagaggccccgcacagtcgcatacacttgtaatcccagcacactgggaggctgggatgggaggatcacttgaggccaggagttcaagagcctgagcaacatagtaagaccttgtctcatttttttttaaataaaaaataaacaaagttaaaagacaactcgcaggatgggatgcagcatttgtaaatcatatactccaactagggtctagtatccagatatatacaacttaataaaaagacaaatgacttaattaaaaatagacaaagaatttgaatagacatatctccaaagagttatacaaatggctaataagctcatgaaaagatgcccaacattggccaggtgtggtggctcatgcctgtaattccagcactttgggaggccgaggcaggtggatcatgaggtcaggagttcgagaccagcctggccaacatagtaaaaccctgtctctactaaaaatacaaaaattagccaggcatggtggcatgcacctgtagtcccagctacttatgaggctgaggcaggagaactgcttgaacctgggaggtggaggttgtggtgagctgagatcgcgccactgcactccagcctgggtgagagtgactctggtcttaaaaaaaaaagaaaaagaaaaagaaaaagaggaaaaaaaaagatgcccatgttacattgttagtcatcagtcactgtagaaacctgcctggcagttcctcaaaatgttaaacagagttaccatatgatccagcaattcactcttaggtaaatgcctaagagaaatttaaaaatatgcctacacaaagacttgtatgtgaatgttcatagcattattcataatagccaaaaagtataaacaactcaaacgtctatcaactgatgaatggataaacaaaatgtgttatatccatgcaatccacacagtatatccatagtgacacatgccacaacacggttgaaccttgaaaactttatgctaagtgaaagccagacacaaaagtacatgcattgtattattccatttataagaaatgtctggaataggcaaacctacagagacaaaaagtagataaatggttgccaagggatggagggaagaggaaatgagaagtgattgctaatggttatggggtttctttttaggtaatgaagatgttctggaattacagtacttacggttgcctatctttctgtacaaataacacatggcttttgcctcctgactggagcctttcaggtatacagagagcctacaattagctgctgttcaaggatccaggtgagagacagggaggctgggacaggggtgatcgcagtgaagatgaagaaggactggccagatctccaggactcagtgaccattgggaggggctgccaaggcaatatgcacaggccaaagacacattggaaaaatagacaaaagtgttagaaattgttgaaaagtacctattttgccactcttatttccagcaacagtctagaatttctggactccaaggaaaaaatacaagtgggttccaggcctggcacagtggctcatgcctctaatcccagcactctgggaggccaaggtgggtggatcgcctgaggtcaggagttcgagaccagcctggccaacatagtgaaaccctgtctctactaaaaatacaaaaaattagctgggcatggtggtacacacctgtagtcccacctactcgagaggctggggcacaagaatcgctggaaccaggtggaggttgcagtgagccaggatcacaccactgtactccagcctgggtgacagagccagactccatctcaaaaaaaagaggaaaaaaaaatacaagttggttcctgtttaaagagcttcaagaagttctcagaaactattcctcaagacagtccctggagaggctgtatgtgaaggcctacaaagacagacctttacctctacaaagaccctttacctctccaggttggaacaaagccatctgcactgacttggggtgtgtaaaataataaattgagatgattttccttactaaaaagactgaccggtttatagaatgagaataagatggtaatttagttgtatatcctaatacctagatttaaatccttgctccacttacagctgtgcaatcttgagcaccctacttaatctctctgtgcttctacttcctctataatgg

SEQ ID NO: 96083 - DNA, 17264 bp, Homo sapiens
gagaggaaaaagaggtttaattgattcagttctgcaggctgtgcaagcatggctccagcatctgctcctggtgagggcctcaggaagcttcaaatcccagcagaaggaaaagggagagcagggatgtcacatggtgacagcaggaacaagagagcaaagcgggagatgccacacacctttaacaaccagattacagatgaactcactcatcaccaaggggatggtgctaagccgttcatgagggatctgcctccatgatccattcaccttccaccaggcttcaactccaacactggggatgacattttgacgagatttggaagggacaaatatccaaaccgtatcaccatattttgtgttttgtttaggtttgtttttttgtcacccaggctggagtacagtggtaggatcatagtttatggtagcctcgaactcctggcttcaagcaatcctcctacctcagcccctcgagtagctgggactatagacacgtaccaccatgcttggctattttaaacaaatttttgtagagatgctatcgggcaaaattcacccctgatatttcacgtaggttcttttctattttccctaagtgtcggccggtctgagaaataaagggacagagtacaaaagagataaattttaaagctgggtgtccgggggagacgtcacatgtcagcaggttccgtgatgccccctgagccataaaaccagcaagtttttattatcgatttcaaaagggaagagagtgtacgaatagggtgtgggtcacagagatcacatgcttcacaaggtaataagatatcacaaggtaaatgaaggcagggcgagttcacaggaccacaggaccggggcgaaattaaaattgctaatgaagttttgggcatgcattgtcactgataacatcttatcaggagacagggtttgagagcagacaaccggtctgaccaaaatttattaggtgggaatttcctcatcctaataagcctgggagcgctacaggagactggggcttatttcatccctacagctgtgactgtaaaatacagccaccccccaagtggccatttcagaggcctaccctcagggacgcattctctttctcaggggcgttccttgctgagaaaaagaattcagcgatatttctcccatttgcttttgaaagaagagaaatatggctctgttccgcccggctcactggcagtcaagagtttaaggttatctctcttgttccctgaacgttgctgttatcctgttcttttttcaaggtgcccagatttcatattattcaaacacacatgctctacaaacaatttgtgcagttaatgcaatcatcacagggtcctgaggcgacatacatcctcctcagcttacgaagatgacgggattaagagattaaagacaggaataggaaatcacaaggctattgattggggaagtgataagtgtccatgaaatcttcacaatttatgttcagagactgcagtaaagacaggtgtaagaaattataaaagtattaatttggggaactaacaaatgtccgtgaaatcttcacaatttatgttcttctgccacggcttcagccggtccctccgttcggggttcctgacttccctcaacagatgcagtctcactatgttgcccaagctgttctcaaactcctggcctcaagcaatcctgacattataggaatgagccaccatgcctgggtgacagaccaccttctgtttatccacttatcaacagatagccatttgggtgtttttagtttttggctatggtgaataatgctgctatgaacatttgcatacaagtctttgtgtggaaaaaaatttcttcagggtaaatacctaggattggaattgctggatcatatagtaagtccacgtttaacttttttttttttttttaaatacggtctcattattttgcctagtctggtctcaaactcctaagctcaagcaatgcttctgcctcggcctcttacaagtgagtaccaccactcctggccatatttaactgtttaagaaactgccagactgttttcccaaatggctacaccattttacattcccaccagcaaagtatagaaagttctaatttctctatatccttgccaacactatcttttgtctttttttttttttttttgagatggagtcttgctctgtcacccaagctggagtgaaatggcatgatctgggctcactgcaacctccacctcccgggtcaagcaattctcctgcctcagcctccctagtagctgggattacaggcatgcactaccatgcccagctaattttcctatttttagtagagaggaggttttaccacgttggccaggctggtctcaaactcctgaacccaagtgatctactggccttggcctctcaaaatgctgggattacaggtgtgagccaccgtgactggctgtgtctgcctttttcactctagccattctactgggtgagaaatggtatctcacgagggttttgatttttatttccctaatggctcatgatgttgaatgtcttttcatgtacttattggtcacccgtatatcctctttggagaaatggttattcaaatactttacccattaaaataaaaatttcatctttaagagcagtttcgagttcacagcaaaactgaacagaaaatacagggttcccccaccccacacacactcatagcctccccccaccaacaacatcaggcaccagaggatatatttgttataagcaatgaagctacattgacacaccagtatcacccatatcccatagtttacattaggtttcattcttggtgttgtacatcctgtagggtttgacaaatgtgtaataacatgtatccaccattataacatccagagtaatttcactaccctaaatattctctgtgcaccacctctgtgcatttctccccactcccagcccctgccatcttttttattgtctccatagttttgccttttccaggatgtaatatagttggaatcatacagtatgtagctctttcagattgtcttctttcacttactaatatgcatttaaggtttctccatgccttttcatggcttaatagctcatttctttctagtgctgaatatagtccattgtctggatataccaaggtttatttatccatttacctgctaaaggacatcttggttgctttcaagttttggcaattacaaataaagctgctgctggccgggagcggtggctcacgcctgtagtcccagaactttgggaggccaaggcgggcagatcacgaggtcaggagatcgagaccatcctggctaacatggtgaaaccccgtctctacttaaaatacaaaaaattagctgggcttcgtggcaggcgcctgtagtcccagctacttggaggctgaggcaggagaatggcgtgaacccaggaggcagagcttccagtgagccgagatcgcgccactgcactccaccctgggtgacagagcgagactccatctcaaaaacaaaaacaaaaacaaaagctgctgtaaacatccatgtgcaggtttctgtgtggacataagttttcagctcatttgggtaaacactaaggaatgcaatggctggatcttctgatgggagtatgtttagttttgtcagaaagccaaactgtcttccaaagctgctgtaccattttgcgttcctaccagtaaggagagttcctgttgcttcacatcctcaccagcatttggtgttgtctcccttgcccatttctaaacttggctatttgtcttttcattactgagttgtaagaattttatgtatcctagatacaagtcccttatggaacatgtgatttgcaaaaattttctcccagtttgtgggttgtttagaggtcttttttttcttttccttttgagacagggtctcactctgtcgcccagactggagtccagcggcgcaatcttggctcaccgcaacctccacctcgcgggctcaagcgatcctcctgcctcagcctcccgagtagctgagattacaggtgcccaccaccatgccggctaatttttgtatttttagtagagacgggggtttcaccatgttggccaggctggtctcgaactcctgacatcaggtgatacacctgccttggcctcccaaagtgttgggattacaggagtgagccactgcgccccattttttttttgaatgttgaacacaatgaatttatcatgatagtgggtacttctgaaggaggcaggggtatacacaaggttagaatcatacaggtagatatcatggtataggtgctgcgagagtcagaaaactgactctggcaccagctgcctgggcttcaaccccaatgctgtaaagtaacttagtctctttgtgcctcagttttctcatctataaaatgagtatatcagccgggggcagtggctcacacctgtaatcccagcactttgggaggctgaggtgggtggatcacctgaagtcaggagtttgagaccagcctggccaacatagcaaaaccccgtctctactaaaatacaagcattagccatgcatggtggtgcgcacctgtaatcccagcgattcggaaagctgaggcaggagaatggcttgaacatgagaggcggaggttgcagtgagccgagattgcaccattgcagtccagcctaggtgagtctcactctgtctcaaaaaaaaaaaaaaaaaagggtatatcaacacaatctcactggtgtgttgtgaagcctagccaagttaatgtacctagagaactagagaacagtggctactaaggacatctaaggacactttatacaaaccttaactgtgttacaacttcttaagtcagtactgaggttcaaaagcttccattttattattatgctttataatttatatatgttacgtgctttcttttgtatagctcacttgaatatatatatacattttagaagataataaggaagaaaaaaagtatatctggttttttaacccttcgaaatgggaaagtttggagtagatgctcagccccggcccctggcccttccccaatactcacaggctcctgtcaactacaccttcagaaaaagacggagcctcttaggcagcagtcaggcaggtgggggcgatctgtcaggtgacctagactctgggccatctcagtttcctcacctgtaaaatggggatgctgaggtacctacctgacctatgagagcggagaacactgagatatcttgcccatggcctgccctgtggttagctgtcgttttttccttgacacttgtaggctcctcttcatgtttacataacctcagtgggaaaacgccagcgaagagagacactcagaatggacgatctaaagttccttccagcttccaaattctgggctggttttcagagatccagggctcgggatgcgaatgtccctgtctacgatggggctgccgttacagccttcctcccggggctctggagacgcgccagctctttgacacctctcctgcgctaaggaagagttggtttacagaaaagtaagtatatcctggccctgcagaaagccgccaggcggcaggacaagccccaccgcagcccaggcgccattatctgcctcagcagttacctcggggtcccgccacgaggaggttcttcaaggcctgcgcgcccacggacactaccaaggagcgcggcgggcagccggatagcaggacgctgagggaaaccccgcagtcgctcggcgtccccggcgccagctcacgacccagcgacctcctgcggcccgagcgtcccctggcggcaacgccggctcgttagagcgagcgacagatggtgtagtccaaaggccaagcggcgtttctgtagatgagcatgcgcagcacccaccgttcgctcagccagagagaggcttcccagccaatccgagagcctcagagtcatcctcccgcccacccagcatacaggcggggcgttcctccttagccaatgggaaaagacattcgcccgcggtccgcacgcgctgcttgcaaaggggtggggttgtggagtggatgctttggcaagatggcggggagcggcgtccgccaagytacttctaccgccagcaccttcgtgaagcccattttcagtcgggacatgaacgaggccaagcggagggtgcgcgagctctaccgcgcctggtatcgggaggtgccgaacactggtgagaggtagcggcttacgtggggacccggaggccgccgctcaaggtcgtagccggcccggccggggtttctcatgggcccagctgaggtcaccaacttgggcagaggcgactgcgggtgcttcaggggaagagggtcacccgagcctaccatgggccggacctggcggcggcgcggtggtcagaccggccgtgcctagcattcstacgtgctatcggagctttggtctcttttgtccttcgcaattggcgggaggacgatgactgtcagtgacacactcactttgtgggtgaggcagcggaggcaccgagaggtgaagtgatgtgcccagggcccaggccgagccactgttgtacccagaacccaaagtctagagttgcagagtgtaattatagatgcccgttggatttttttgtttgtgacagagtctcgctgtgtcgctcaggctggagtgcagtggtgcgatctcggctcactgcaagctccgcctcccggattcacgtcattctcctgcctcagcctcagcctyccgaatagctgggattacaggcgcccgccaccacgccggccatttttttttgtatttttagtagagacgggatttcaccgtgttagccagaatggtctcgatctcctgacctcgtgatccgcccgtctcggcctcccaaagtgcgagaaagaggtgtttttgagtgagctggagcacggtgccactcctcagggctgtcgagtccctgcttgtgtgtgtgaaaaggcggtagaatgtggtggttaggagcacggacttttcttcaggcgctgccctcaactagctgtgtgaccttgggccagttatttcatctattcctcagtttcttcatctttaaaatgggaataataattccttcttcagaaggttactgtattaagttaaaatatctagagtgcttagaacaggrcttgatgcatatttaactcattaaatattagctgctgccgttgtttttgttgttatttttgttatttatagggctttccttagcagcagcttccaagcagaacccggttctttgacatatgagaactgtgtctgctccacagagtccctgtcttcaagctgacttttggaaaaattgctactgaccagaacttaaacccacgcgatactagagaaggagaaacttgagtgatctgctggttcagggactgcaaattcagatgccttcaggggcaggcagataaaagatgtgtgtggggagtgactgtagcagtgtgtgtgtgtgtgtgtgtgtgtgtgtttcggggtggtgcattcaaattcagcagtttgaaaacataatgtttgcctggcagaatacttctaggagtacccagaaccctctctggttgcaggaggaaggtgctgggggaaggaggaccacattcaaaaagggtggcttgtgaagggtaaatcagtggccaagtagaagacagaacccaggtatcctgactctgaggatccagctctttctaaaccgacccctcccaagaccttccctcaaattctgttttgggaagaaagtcccaaagtcagaagggtcttgagaggaggaaaagaaggcagagggctacaggagcctagaaagcaagggaagaggagagaaaagaaggggtcaaggagtatgcatccctatggggaagatcagtgatctgtagctggccagttactcaaacctgtgccacacgggttttatggtatccatcatcaggactccagctgaggaatcaaatcaaggaaggggaataagtaatagtgttgagaacttagaacagcctgagcattaataaaaaacaaaagtaaaattttaagtatttaatgaaaaaaacagtaatgataactcacttttttttttttttttttttttgagacagagtctcgctcttgtctcccaggctggagggcaatggcgcgatcttggctcactgcaacctccacctcccgggttcaagtgatttccccatgcctcagcctcccgagtagctgggattatagttgcgtgccaccacacctggctaacttttgtatttttagtagaaacggggtttcaccatgttggccaggctgtcttgaactcctgacctcaggtgatccacctgccttggcctcccaaagtgctgggattacaggcgtgagccaccgcgcccagctaataaaataataattattttttttgagacggagtctcgctctgtcgcccaggccggactgcggactgcagtggcgcaatctcggctcactgcaagctccgcttcccgggttcacgccattctcctgcctcagcctcctgagtagctgggactacaggcgcccgccaccgcgcccggctaattttttgtatttttagtagagacggggtttcaccttgttagccaggatggtctcgatctcctgacctcatgatccacccgcctcggcctcccaaagtgctgggattacaggcgtgagccaccgcgcccagcctttttttttttttttttttgagacacagtctcactctgtcacccaggctggaatgcagtggcccatctcagctcactgcaccctccacctcccgggttcaagtgattctcctgcctcagtctcccgagtagctgggattacaggcacccaccaccatgcccggctcatgtttgtatttttagtggagacggggtttcaccatgttggccaggctggtcttgaactcctgacctcaggtgatccacctgccttggcctcccaaagtgctgggattacaggcgtgagccaccgcgcccagctaataaaataattattattttttttgagacggagtctcgctctgtcacccaggctggagtgcagtggtgcgacctcggctcactgcaaggtccacctcccgggttcacaccattctcctgcctcagcctcccgagtagctggaattacaggcacccaccaccacacccggctaattttttgtatttttagtagagacggggtttcactgtgttagccagggtagtctcgatctcctgacctcatgatccgcccacctcggcctcccaaagtgctgggattacaggcgtgagccaccgcgcccagcccataaaataattttttaaaaaatacactcaggcacaagaaagttaacttacacgggatcatatagctaacaaaagctgggatttgaacccaggttgttcaaactcttgaacaatgctttactgcctcttcaaattcagtggtctttttccccaaacaaataataagttccttgagagcaaataccatgaatcacatgtctcatcctcaagcacctagcctagggtcaggctaattttttggtgaagaaatgaatgggcgacctgtatgtgttcaatgagtatcatttgactctaggttttatttaaccatacaatttctaccctgagtcatgtttttctctctagtgcaccaattccagctggacatcactgtgaaaatgggacgggataaagtccgagaaatgtttatgaagaatgcccatgtcacagaccccagggtggttgatcttctggtcattaaggtaactgaccctccctgmccaatttaaaagatcagccaacttgtccactacttcttagtctttccaaatgaacattttgtctccaagtttagaaagcagctactggttcggcagtgattattgctgtgtttcagagaaatacttgaacttggaggttatcatctggttaaatagataagattcatcragggaacatccactgggacttgcattttataaccataaaaaaagatatagggaggaaagtttgaactcttcttgaacctcatccctagaagttaccacttcatctgaatgccagtttacagctggaagaggcagttagggtggttatgagtcctgtataaatggactcaaatcctggggctgattctgtccccctggccagtcacgttagcatcaatgggagcttcagcatagaccagtcagtaacagaagaaatgataagcagaaacataagttaagccagtcaggttaggtagtcatgggataggagcctgttaacctgtatgtttctcctcttggtaccagttaaccacagagttaaagaatctgaaaagtstcagaaatgatttaccctgaccacctcattgtccagacatagaaactttgcccagacagagtagttacttgcccaaggtcattcaacaagtccatgctgagcagagaatagaatcctggccttcagtgtcatatgccttcaacttgacaactttgactgatgacctctctcctcactgttcagggaaagatcgaactggaagaaacaattaaagtatggaagcagcggacacatgttatgcggttcttccatgaaacagaagcgccaaggccaaaggatttcctatccaagttctatgttggccacgatccatgaagtcattcagtggaaagatgcacgttgatactattttagagcacaaataaactcactatacaatggtcactttgtgatagaattccattgatgraccaattttctgcagcctctttttgcctgagcaagtgggaccttggtatacacatcacctgttctttcccttttcttgaaatgtggtgtttgctgtaaattggattgaattatttttctcagagccttgcatgtcagtaaacaggaaggaaggaggccatctgttcaaaaattgtgacattgggcatgaggctggacgacttgttaatgtagttgtttctatagcccctatgattagacacttyagtgtcagggcacagattatctaaaattagccagctcttcctgtcagggatcagggcagcactaacaggcgcaaaagtagagctgtcaagatgggctagttttccttgggttctgaagaaaatggatgtgcaaaggcttggctccgctacttgtaacaagctccagcccttaaaatgaaattaacttcctactcaggcaccctgcttaggtgcacagctgttcaatatacacagagaacagaaatattcctactgtctttggaaaccctggtgtacctctcagtggcagaataaacatcaacacaggttcaagaactgatctctgtttggatggtggtcttctcttgtgcttcccagggcaatccaaatgatggagaaggggtttggaatctataggtatgatcactgaggactcccatactttttttttttttttaaatagagatggcgtctctccattgcccaggctggtctttttttcttttcttttttttgagatggagtctcgctgttgttgcccaggctggagtgcactggtgtgatcttggctcactgcaccttccacctcctggttcaagtaattctccctgcctcagcctcccaagtagctgggattacaggcatggaccaccacatccagctagttttatatttttagaaaagacggagtttcaccatgttggccaggctggtctcaaactcttgacctcaagtaatccacccgccgtggcctcccaaagtgctggcgtgagccaccgcgcccaggccagtcttgaactcctgggctcaagtgatcctcctgcctccgcctcccaaagtgttgggactacaggcatcagccattgtgcatggccccaaaccttatggcaccaaggatccctttataatcttttcacgtaaggaacctgagggaaaaactcaaggtgtttttgtgttctctcactcaataacaataaacacataagacttctgtgatcaaacgttatgagggtttctccccacactaagcaagcagtcagttctgcagcagacaccagctgcctgtcctccaattctcttcgaacactatctacctggagatagcaacagattccacaggtttggggctcagtcccacaagactgctcccacccccattagacaacattcacaagtccaagcctccagaacttctgagcttcaagttcccatgaccccttctttttttttttttttttttgagatggagtctcactctgtcgcccaggctggagtgcagtggtgccatctcggctcactgcaagctctgcctcgcgggttcacgccattcttctcctgcctcagcctcccgagtagctgggactacaggtgcccgccaccacacccggctaatttcttctattttttaatagagacagagtttcactgtgttagccaggatggtctcgctctcctgaccttgtgatctgcccgccttggcctcccaaagtgctggggttacaggtgtgagccaccgcacctggctgaccccttctttttaatttgctggagcagcttgcagaactcagaggaacacttaggtccgtttactggtttattataaaggatatcacaaaagatacagctgaagagatgcatagggtgaggtatagaaggggcgtggagcttccaagttctctccaggcgtgccactttgcaaagccaagtgttctgttctccgaaagctctctaaacctgtcttcttgggccttttatggagacctcattggatagggatgattgaagcatggacaacactggagaaatgggattggacaaaagaggcataatctaatacagatggagtggggaagtccaacaaggcctgtctacatttcttcctctcaggtatggggcagaatcccttctgaaatgggggtctcatgacctaaaatcagacaaggtaggtcagaggattctttttatggccaactggaagacgggcaaaggaagattatacttttagtttctatggcctgccttggggagaaaaagcagcaggtgaaaggaggtcaggagaagatctgagaaacagcctgctgttttctgaggcccgaagtgcccaacattataacaaaagcctaaaacaagggttttgggagttataagccaggaaatagatgaaaacctatctatatcctcatatcacagaacccgagttttgaatcattctagttatatttaagtagtatgctaacaagcagagctgtcatgactggcactgaacacagaatggcatgaggctttagttagcccatgaagctttcttaagggaaaatgcacagtttctgttgggcttttgtaaacaatgaaaatagttcccagggcccccagaatagttcaccaggctccactgcagcctggatagcctgggcctatgtttctcccataaataaaggacagcagagacaactgcaccaactagaacctagggatactgagaaactgcagccatcactcagtcacgcacggctgatatttattatgtttattcataatttgattgcttgtttgtgcagtgcttagtggacagcacatctcagggagcctcccagagcctggggtggaatacggtcatggaccatacaggaagcttcaccagactgggaggctgagggccttccccgagcctttctgctgatagggaaggcagagaaactgagagcatcaccatttcttcagttagtgctttctcctttctgtaattcctgtaagaaaggaaagcagcagtgaactgggcaacagcgtagtcttccatccgcagactgaaagaattccacaaagtgcttctatcaaacatggcaggagaaaggcagctttgagcacgtttggttgttcatgcgcacgttaactgggcattcaccacaggccaggcactgggggccgcaatgtataaaaaacgtcccctgccagcaagaagctcagagtctagtaaaattttgctttgtgtgtgtttagccacataataccgagtatttgaagagaggtactggttgcttagaggaaggagccgtcaactttcaaatgaaaggaggaacgaagacttcaaagacactgtagaatgggtggaattaagacccagagctctgggaaggagccttccatgtgggaggaacaatgagccaatgtttgggggtgggtatgagtgtgaaaactcaagaaatggtgaatactgggaatcggtgtgtggctggaaatatggaagatgagactggaataagaggtgtgaccagattatggcaagccttgaatgccaggctaaggaacaggagtgtcctcatctcttgacagaatgccatgcagcacatattagagcacatgaagttggctgggcgcagtggctcacgcctgtaatcacagcactttgggaggccaaggtgggtggatcacctgaggtcgggagtttgagactagcctggctaacatggagaaaccccgtctctactaaaaatacaaaattagccaggcacagtggcgcatgtctgtaatcccagctacccggtaggctgaggcaggagaatcgcttgaacctggaaggcagaggttgcagtgagtcgagatcatgccattgcactccagcctgggcaacaagagcgaaactccgtctcaaaaaacaaacaaacgaaaacattagccaccaagtgggccaattcattaatgcttctgcccccagtgtccaaatgctgctaccaggccagactgcatcacagacagatgctccaccctgcttcctgctccatctagggtaaagcaagtcttacctgttagtcatcatcatcatcatcctctggaacaaaaatgtcatgttcctcaagtagagcagcaaagttcttgctaatgagtgtcccgacatagagaaaggggatcacaatggagaacacacggagaaggccgaaggacatctgcagagggtcagagtggcagctgtgagctccagagcccactctggcaggaccaaagaagacctggccctctcacagacataccctcagacccatcataagcaacttgattttaaagtccttggaaaaattcagggcaagaaaagtaattagaaaaggagaaggccaggcagggtggctcacacctttaatcccagcactttgggaggctgaggtgggtggaccacctgaggtcaggagcttgagaccagcctggccaacatggtgaaatcccgtctctactaaaaatacaaaaaattgacccagcatggtggtgcgcacctgtaatcccagctactcgggaggctgaggcaggataattgcttgaatccaggaggcagaagttgcagtgagccaagattgcaccattccactccagcctgggagacagagtgaggctctgtctaaaaaaaagacaaaaggccgggcgcagtggctcacacctgtaatcccagcactttgggaggctgaggcgggcggatcacgaggtcagaagttcgaaatcagcctggctaacatagtgaaaccccgtctctactaaaaatacaaaaaattagccgggtgtggtggtacatgcctgtagtcccagctactcagaaggctgaggcagaagaatcacttgaacccgggaggcggaggctgcagtgagccaagattgtgccactgtactccagcctgggtgacagagtgagactccgtctcaaaaaaaaaaaaaaggagataaggtgactgttatggccatcaaaatggacgaaaagtccactggaaagaaaagtctaaggcaccctagacatctaaagttaggacacagcctgctaattactttaaatccctacaggcaatcgggtgcaccagtactaggagggccagactacggtgagctctgcctgaacacgaaatacacgaaaaccgatgacagaaagatgtacagtgaagggatattctacacagttcactaagtaacaggttccctgatgcctgagaaatttgatttaaaaattttagaaacagatgtatttgaaagtgggcatgtatttacactcaaagactttagatggattgggagaatgtcagtaaaatctcagcaacatttctctcgtattcctagaattaaaaaaatttttttttcaactgttttgataaggcaggtctttcccaacatggacctacagtcaattgtgtgagttagcataggctagactagctttaagagaatttgtttttttaactcccacaccacacagccctgcagtcgtaaagcaaactttcgcttgatataagggactgtttccgttttccctagaaaaactcaagcatgtgatagcgttcagtgttggaaaaagacaggacctggtggggacggtaccaggaagaaacccggatgctgcgtcctcagcgctggccttggatacgagcttcaccgctctagcccgattcttcatttgaaaacccgtgattgtaataattccctgcacatctatcaggactgtaaatcacatgaattaaatattaggtgacaactaataaaaagatgaggcccgtcccacgtaccctttatttacagagtcctttcaaaattcatatttcatcccataaactaggagacaggcagggcagagattacaggactgctctaagctagaagcacacggcctagtcttctgactccagaggagcagagcaccgcacctctcaggacaagctaatgtaaaaggccaacttcctcagcgtttgccccccatcttctgtctacctaccattttctacacacctgtcaaaattagcaactcattagcgtattcttggtccgccttccagtctacggtaatcgttatgattggccttggctcctatcaatcagcgccgccctcacgcactccccacaatgattggcctcagccccttcgccccgtctccaggaggacactcactttcaccggtttgggcaaaatggcgccgctgcgggtaacgatgactgacctcgacggtaccaggctccggcctgagmcgctccatgcggcggagacatcgccatctttcctcaagctaggcccgctccggagagccccggacctgacgggtgccaatactagccagcgagccgctccggacgccatgcccccagctccgcccctcacccgggcacccgcaccccaccgcccagccctcgtgccgccctcgggaagaaagccgcccgaagcctcgcgagagtttgaggagtacacgagaagcccagccctcccactcgcgcagtgccggcggctcctggggcggcgggagggaggtgtttgtcactggccggcatggtggcgtcacgagagtggcggcgcagccccggctccctcagtccgcgtcctgctgg

SEQ ID NO: 96084 - DNA, 16339 bp, Homo sapiens
  misc_feature (1)...(16339): n = A,T,C or G
agaccaggacctgccagaatgttggaggaccccaatacctgtagggagagggggtagcgtgggcgctcccaggaggtgtgactgcgccctgccatggggtcggagagggtgctctggagcttctcgggcacaggactagttgacagagtccagctgtgtgccaggcagtgtgtgtcccctgtgtgcttgggggtcccagcatcctagagtccagtccccactctcaccctgcatctcctgcccaggggatgatgctcttcaccaacctgtcatcggtgctgaaggatgaggccgtctgggagaagcccttccgcttccaccccgaacacttcctggatgcccagggccactttgtgaagctggaggccttcctgcctttctcagcaggtgcctgtggggagcccggctccctgtccccttccgtggagtcttgcaggggtatcacccgggagccaggctcactgacgcccctcccctccccacaggccgccgtgcatgcctcggggagcccctggcccgcatagagctcttcctcttcttcacctccctgctgcagcacttcagcttctcggtgcccaccggacagccccggcccagccactctcgtgtcgtcggctttctggtgacgccatccccctatgagctttgtgctgtgccccgctagagttgctcctcagctgggaccctgttgtacaataaattagtctagtggctcccacttggtttctgtatccagtctgggcccctgccaaggtcctggttgtgttgggtcgtcagtcacctgcctgatgtcagtgctcacccctcacccctcacccctcacctcattcattcatttttttttttttttttttgagatggagcctactctgtcacccaggctggagtgcagtggtgcaatctcagctcactgcaacctccgcctccagagttcaagcgattctcgtgcctcagcttcctgagtagctgggattacaggcaccgggtaccacccccggctcatttttgtctttttagtagtgatgggtttcgccatgttggccagtctggtttcaaactcctgacttcacgtgaccaccagcctcagcctcccaaagtgctgggattacaggcgtgagccaccgagaccagcctcacctcattcactcttacctggacgcctgactttacttgagatacaggcatagtgattctcagcaggaaacagcctgcccccacgtcacgcccagagacccatcactggctgcctggcttggtgacaaagtccatgcgtaagtcttggctggggtggatatgaataggcatatgccaagaatcaacccattccctggctagggtgggagactgtgttgtgctcccccagaccaccctcaggttcagtgatttctagaaggtctcacagccctagaaaagctgttattctccctgttaacagtttattacagagaagggtacagattaaagtcagcaaagatgaaaggcacagggaccagagtccagaatgaccaggccaaggctgcagctctcttttctggtggactcctacaggcagtgcttaattctcccccaacagtaagtgaggcagcagagagccctgccagccacggaagctcacctgggccttggtgtccatggtttttgttgggagttggtcatcctaggcttgagcccccgcagcatggctgacctcagttactcagtctccagcccctcctgaagtcagatggatacaggcctgacggccccaccctcgatcacattgttggcataaactgtgttgtacggtccaaggccctagctatgtacaaagacactatttcaggcaggacattccaaggccttagcagatatctcccagcctcctgtcaagagtcagtttggactcttggtccagtggcttgcattgtgcaaggaatgacttccccactttttactacacaggccacccctcttggctctaacagcaaaatgatattagtttgagcatctgtgtgtgtgtgtgtgtgtgtgtgtgtgtgtgtgttttcttgagacagggtcttgctctgtcaccgaggctggagtgcagtgatgccatcagggctcactgcagccttgacttcctgggttcaagcaatcctcccatctcagcctccctagtagctgggactgcaggcacatgccaccatgctttgctaatttttgtattttttgtagagacggagtttcaccatgttggccaggctgctttcgaactccctatctcaggtcatctgactgcctcagccccccagagtgctgggattacaggtgtaagctactgtgcccagccaaatttccttcctaatttcttcattgaaccactggccattccggaccatattgtttaattttcacgtgtatgtatagtttccagaattcctcttgttgttgatttccacttttattctgttgtggtcagagaagatgcttgatattattttaacatttgtaatgttttaagacttgctttgtgacctaacatatggtgtatccttgagaatgatccatgtgctgaggagaagaatgtgtattctgcagactttagacgaagtgttctgtaagtatctagtaggtccatttcttttgtagtgcagattaagtctaatgttttcttattgggtttccatctgggacacccgtccaatgctgaatgtggggtgttgacgtctttagctgttattgcgttaacgtctctcttgggctccaataacatttgctttacgtgctccagtgttgtgtgcatatgtatttacaattgttatattctgttgctggatgaccttctttgtctcctcttacagtttttttggttgttgttgtttgtttgttttgttttggagacggagtctcgctctgtcacccaggctggagtgcagtggcgcgatcttggctcactgcaagcttcgcctcccaggttgacgccattctcctgcctcagcctcctgagtagctgggactacaggcgcccgccaccacgcctggctaattttttgtatttttagtagagacggggtttcaccatgttagccaggatagtctcaatctcctgacctcgtgatccgcccgtcttggcctcccaaagtgctgggattacaggcgtgagccaccacacccggcctcctcttacagtttttgttttaaaatctgttctgtctaagtattgctactcctgctcttttttgttttccattggcatggagtatctttttccatccctttattttcagtccatgtgtatctttacaggtgaagtgtgtttcttctagacaaaagagcattgagctttgctttttcatccattcagccactctgtgtctttgtattggagagtttagtccatttacattcaatgttattattgctaagcagggacttactcctgctattttgttatttcttttctcactgttttgtggtcttctcttttttttttttttttttttttttttttttccttgtcttccttttaatgaaggtgattttctctggtggtatgatttaatttcttgcttttttgtgtgtgtgtatccattgtgtgttttttcttcttttctttttgagacacagtctcacttattgtgtgctttttgatttgaggttgccgtgaggcttgcaaatattatcttataactcattattttaaacggatgacaacactgattgcgtaaacaaacataaagcaaaaggaagactaataaaaactctacactttaagttcatcttagtgctttttaactttttgttgtttctctttttttgtttttgagataaagtcttgctctgttgcccaggctagagtgcagtggcacgatctcagctcactgtaacctccacttcccaggttcaaccgattctcctgcctcagcctcctgggtagcaggcgcccaccaccatgcccagctaaattttttgtatttttagtagagatggggtttcaccatgttggccaggcttgtctcgaactcctgccctcaggtgatccacccacctcagccttacaaagtgctgggattacctgcgtgagccaccgggtccggcctctttatgtcttactgtactgtctgtcttgaaaagtacttattatttttgattggttcatcatttagtctaattaaaataagagtagtttacacaccacaattacagtattataatactctgtttttctgtgtgcttactattaccagtgagttttgtacctttagatgatttcttcttgctcattaatatccttttttttttcagattgaaaaactccctttagcatttcttgtgggatataggtctggtgttgatgaaatctcgcagcttttgtttgtctgggaaggtctttatttctccttcctgttggaaggatatttttgccagatacgttattctaggctaaaagttttttttccttcagcactttaaatatgtcatgccactcccccctggcctgtaaggtttccactggaaaggtggctgccccatgtcatgtattggagctctactgcatgttatttgtttcttttctcttgctgcttttaggatcctttctttatccttgacctttcggagtttaattatcagatgccttgaggtcgtcttctttgggttaaatctgcttggtgttctataaacttcttgtacaaaaaatcagccaggcatggtggtgggcacctgtaatcccagctacttgggaggctgaggcaggagaatcgcttgaaccctggaggtggaggttgcagtgagccgagatcgcatcattgcactcccacctgggcgacagagcaaaactccgtctcaaaaaaaaaattatttgggctcggtggtgcctgtagtcccagctacttgggaggcaggaggtccacttgatgttgagattgcagtgagccatgatcctgccactgcactccggcccgggcaacagagtgagaccctgtctaaagaaaaaataaaaataaaaaagcaacatatcctaaataaaggatcctccataatgtttccaccagatttctaatcagaaacatggaggccaggaagcagtggagaatgacgaccctcaggcagccctggaggatgctgtcacaggctggggcaagggccttcaggctaccaactgggagctctgggaacagccctgttgcaaacaggaagtcatggcccggccagagcccagaatgtgggctgagctgggatccatgtgacagctttgaggctcaccgggagcagcctctggacaggagaggtcccatccaggaaacctcgggcatggctgggaagtggggtacttggtgccgggtctgtatgtgtgtgtgactggtgtgtgtgagagagaatgtgtgccctgagtgtcagtgtgagtctgtgtatgtgtgaatattgtctttgtgtgggtgattttctgcatgtgtaatcgtgtccctgcaagtgtgaacaagtggacaagtgtctgggagtggacaagagatctgtgcaccatcaggtgtgtgcatagcgtctgtgcatgtcaagagtgcaaggtgaagtgaagggaccaggcccatgatgccactcatcatcaggagctctaaggccccaggtaagtgccagtgacagataagggtgctgaaggtcactctggagtgggcaggtgggggtagggaaagggcaaggtcatgttctggaggaggggttgtgactacattagggtgtatgagcctagctgggaggtggatggccgggtccactgagaccctggttatcccagaagcctgtgtgggcttggggagcttggagtggggagagggggtgacttctccgaccaggcctttctaccaccctaccctgggtaagggcctggagcaggaagcagcggcaaggacctctggagcagcccatacctgccctggcctgactctgccactggcagcacagtcaacacagcaggttcactcacagcagagggcgaaggccatcatcagctccctttataagggaagggtcacgcgctcggtgtgcygagagtgtcctgcctggtcctctgtgcctggtggggtgggggtgccaggtgtgtccagaggagcccagttggtagtgaggcagccatggggctagaagcactggtgcccctggccatgatagtggccatcttcctgctcctggtggacctgatgcaccggcaccaacgctgggmtgcacgctacccgccaggtcccctgccactgcccgggctgggcaaccttgctgcatgtggacttccagaacacaccatactgcttcgaccaggtgagggaggaggtcctggagggcggcagaggtcctgaggatgccccaccaccagcaaacatggrtggtgggtkaaaccacaggctggaycagaagccaggctgagaaggggaagcaggtttgggggacktcctggrgaaggrcatttatacatggcatgaaggactggattttccaaaggccaaggaagagtagggcaagggcctggaggtggagctggacttggcagtgggcatgcaagcccattgggcaacatatgttatggagtacaaagtcccttctgctgacaccagaaggaaaggccttgggaatggaagatgagttagtcctgagtgccgtttaaatcacgaaatcgaggatgaagggggtgcagtgacccggttcaaaccttttgcactgtgggtcctcgggcctcactgctcaccggcatggaccatcatctgggaatgggatgctaactggggcctctcggcaattttggtgactcttgcaaggtcatacctgggtgacgcatccaaactgagttcctccatcacagaaggtgtgacccccaccccygccccasgatcaggaggctgggtctcctccttccacctgctcactcctggtagccccgggggtcgtccaaggttcaaataggactaggacctgtagtctggggngatcctggcttgacaagaggccctgaccctccctctgcagttgcggcgccgcttcggggacgtgttcagcctgcagctggcctggacgccggtggtcgtgctcaatgggctggcggccgtgcgcgaggcgmtggtgacccgcggcgaggacacggccgaccgcccgcctgcgcccatctaccaggtcctgggcttcgggccgcgttcccaaggcaagcggcggtgggggacagagaccgcgtttccgtgggmcccgggtggacagtgaccgtagcccaagcagcgccgacagggcgtggggtcctggacgtgaaacagagataaaggccagcgagtgggctgaggacagtgggccaggaaaccacctgcacgggggaggtgcgagtctgtgggctgggagggggcggggctactgcccagacccgccagaagcccggtgggcgaggctgatgcgtcgaagtggcggtggcggggaccgcgcctatgctgcgggctcagtgtgggcgggacgggcgggrtcttccttgagtggaaaggtggtcagggtgggcagagacgaggtggggccaaaccccgccccaggcaggggagcaatgtgggtgagcaaagagtgggccctgtgcccagctggaccgggctagggactgcgggagaccttgtggagcgccagggttggagtgggtggcggagggtggggccaaggccttcatggcaacgcccacgtgyccgtcccgcccmcaggggtgwtcctgkcgcgctatgggcccgcgtggcgcgagcagaggcgcttctccgtgtccaccttgcgcaacttgggcctgggcaagaagtcgctggagcagtgggtgaccgaggaggccgcctgcctttgtgccgccttcgccgaccaakccggtgggtgatgggcagaagggcacanagcgggaactgggaaggcgggggacggrgaaggcnaccccttacccgcatctcccacccccaggacgcccctttcgccccaacggyctcttggacaaagccgtgagcaacgtgatcgcctccctcacctgcgggcgccgcttcgagtacgacgaccctcgcttcctcaggctgctggacctagctcaggagggayygaaggaggagtcgggcttyctgcgcgaggtgcggagcaagggtctytgcagggcgagctccygagaggtgccggggctggactggggcctccgaagggcaggatttgcrtagatgggtttgggaaaggacattccaggagaccccactgtaagaagggcctggaggaggaggggacatctcagacatggtcgtgggagaggtgtgcccgggtcagggggcaccaggagaggccaaggactctgtacccccgtccacgttgkagatttcgattttaggtytctcctctgggcaaggagagagagggtggaggctggcacttggggagggacttggtgaggtcagtggtaaggacaggcaggccctgggtcttcctggagatggctggggcctgagactggtccagrtgaacgcagagcacaggarggattgagmcccsgttctgtctggtgtaggtgctgaatgctgtccccgtcctccygcacatcccagcgctggctggcaaggtcctacgcttccaaaaggctttcctgacccagctggatgagctgctaactgagcacaggatgacctgggacccagcccagccaccccgagacctgactgaggccttcctggcaragaaggagaaggtgagagtggctgccacggtggggggcaagggtggtgggttgarcgtcccaggaggaatgaggggaggctgggcaaaaggttggaccagtgcatcacccggcgagccgcatctgggctgacaggtgcagaattggagrtcatttgggggctaccccrttctrtcccctgagtatsctctcggccctgctcaggccaaggggarccctgagagcagcttcaatgatgagaacstgygcatagtggtggstracctgttcyytgccgggatggtgaccacctygaccacgctggcctggggcctcctgctcatgatcctacaycyggatgtgcagcgtgagcccagctggggcccaaggcagggactgagggaggaagggtacagctgggggcccctgggcttagctgggacacccggggcttccagcacaggcgtggccaggctcctgtaagcctaacttcctccaacacaggasgaaggagagtgtcccctgggtgctgacccattgtggggacgcatgtctgtccagtccgtgtccaacaggagatcgacgacgtgatagggcaggtgcggcgaccagagatgggtgaccaggctcrcatgccctrcaccactgccgtgattcaygaggtgcagcrctttggggacatcrtccccctgrgtgtgacccatatgacatcccrtgayatcgaagtacagggcttccgcatccctaaggtaggcctggcgccctcctcaccccagctcagcancagcccctggtgntagccccagcatggctactgccaggtgggcccactctaggaaccctggccacctagtcctcaatgccaccacactgactgtccccncttggntggggggtccagagtataggcagggctggcctgtccatccagagccccmgtctagtggggaagacaaatcaggacctgccagaatgttggaggacccagcgcctgcagggagagggggcagtgtgggtgcctctgagaggtgtgactgcgccctgctgtggggtcggagagggtactgtggagcttctcgggcgcaggactagttgacagagtccagctgtgtgccaggcagtgtgtgtcccccgtgtgtttggtggcaggggtcccagcatcctagagtccagtccccactctcaccctgcatctcctgcccagggaacgacactcatcaccaacctgtcatcggtgctgaaggatgaggccgtctggragaagcccttccgcttccaccccgaacacttcctggatgcccagggccactttgtgaagccggaggccttcctgcctttctcagcaggtgcctgtggggagcccggctccctgtccccttccgtggagtcttgcaggggtatcacccrggagccargctcactgacgcccctccmctccccrcaggccgccgtgcatgcctcggggagcccctggcccgcatrgagctcttcctcttcttcacctccctgctgcagcacttcagcttctcsgtgsccrcyggacagccccggcccagccactctsgtgtcktyagctttctggtgascccatccccctaygagctttgtgctgtgccccgctagaatggggtacctagtccccagcctgytccctagccagaggctctaatgtacaataaagcaatgtggtagttccaacttgggtcccctgctcacgccctcgttgggatcatcctcctcagggcaaccccacccctgcctcattcctgcttaccccaccgcctggccgcatttgagacgggtacgttgaggctgagcagatgtcagttacccttgcccataatcccatgtcccccactgacccaactctgactgcccagattggtgacaaggactacattgtcctggcatgtggggaaggggccagaatgggctgactagaggtgtcagtcagccctggatgtggtggagagggcaggactcagcctggaggcccatatttcaggcctaactcagcccaccccacatcagggacagcagtcctgccagcaccatcacaacagtcacctcccttcatatatgacaccccaaaatggaagacaaatcatgtcagggagctatatgccagggctacctcccagggctcagtcggcaggtgccagaacrttccctgggaaggccccakgraarcccaggacygagccaccgccctcagcctgtcaccttgtgtccaaaattggtgggttcttggtctcactgacttcaagaatgaagccgtggaccctcacggtgagtgttacagttcttaaagatggtgtgttcagagtttgttccttctgatgttaagacgtgttcagagtttcttccttctggtgggtgcgtggtcttgctggcttcaggagtgaagctgcagaccttcacagtgagtgttacggctcttaaggctgcacgtacggagttgttcattcttcctggtgggtttgtggtctcactggcctcaggagtgaaactgcagtccttccagtgttacaactcataaaggcagtgtggacccaatgagggagcagcagcagcaagacttactgcaaacagcaaaagaatgatggcaaccaggttgccgctgctacttcaggcagcctgcttttattcccttatctgacccccacccacatcctgctgattggcccattttacagacagtggattggtccacttacagagagctgattggtgcatttacaatccctgagctagacacagagtactgattggtatatttacaaaccttgagctagacacagagtgctgaatggtgtatttacaatcccttagctagacataaaggttgtcccagtccccactagattagctagatagagtagacagagagcactgattggtgcgtttacaaaccttgagttagacacagggtgctgactggtgtgtttacaaaccttgagctagacacagagtgctgattggtgtatttacaatcttttagctagaaataaaggttccccaagtccccaccagattagctagatagagtgctaattggtgcatgcacgaacccggagctagacacagagtgctgattggtgcatatacaatcctctggctagacataaaagttctccaagtccccacctgactcaggagcccagccagcttcgcctagtggatcctatgccagggccacaggcagagctgcctgctagtcccacaccgggcacctgtactcctcagcccttgggcagtggacgggaccaggtgccgtggagcagtgggaggcacccatccgggaggctygggcctcgcagggagcccaccgtagggaggcttgggcatggcaggctgcaagtcctgagccctgccccgcggggaggtgactgaggcctggcgacaattcaagtgtggtgagcgccggcaggccagcagtactgggggacccggtgccccctctgcagctgctggcccaggtgctaagcccctcactgcctggggccagaggcaccagccggccgctccgagtgcagggcccgctgagcccctgcccacccagaactggtgctggcccgcgagcaacccaggttcccgcacacgcctctccctccatacctccccgcaagcagacggagccggctccagcctccaccagtccagagaggggctcccacagtgcagcgctgggctgaagggctcctcaagtgtggtcagagcagaagctgaggccgaggaggcgctgagagcgagcgaggaccaccagcacgttgacacctctcaacctcaccacaggactggccacctctctgggccctcagggatgctgctgtctggacccctgaccagtgacgagttcgcactcagggccaggctggcgctggaggaggacacttgtttggctccaaccctaggtaccatcctcccagtagggatcaggcagggcccacaggcctgccctagggacaggagtcaaccttggacccataaggcactggggcgggcagagaaggaggaggtggcatgggcagctgagagccagagaccctgaccctagtccttgctctgccattaccccgtgtgaccccgggcccacccttccccacccttccccacccttccccacccttccccaccccgggcttctgtttccttctgccaacgagaaggctgcttcacctgccccgagtcctgtcttcctgctctgccttctggggctgtggcccttgctggcctggagccccaaccaagggcagggactgctgtcctccacrtctgtcctcaccgacataatgggctgggctgggcacacaggcagtgcccaagagtttctaatgagcatatgattacctgagtcctgggcagaccttcttagggaacagcctgggacagagaaccacagacactctgaggagccacctgaggcctcttttgccagaggaccctacagcctccctggcagcagttccgccagcatttctgtaaatgccctcatgccagggtgcggcccggctgtcagcacgagagggacgttggtctgtcccctggcaccgagtcagtcagaagggtggccagggcccccttgggcccctccagagacaatccactgtggtcacacggctcggtggcaggaagtgctgttcctgcagctgtggggacagggagtgtggatgaagccaggctgggtttgtctgaagacggaggccccgaaaggtggcagcctggcctatagcagcagcaactcttggatttattggaaagattttcttcacggttctgagtcttgggggtgttagaggctcagaaccagtccagccagagctctgtcatgggcacgtagacccggtcccagggcctttgctctttgctgtcctcagaggcctctgcaaagtagaaacaggcagccttgtgagtcccctcctgggagcaaccaaccctccctctgagatgccccggggccaggtcagctgtggtgaaaggtagggatgcagccagctcaggggagtggcccagagttcctgcccacccaaggaggctcccaggaaggtcaaggcacctgactcctgggctgcttccctcccctcccctccccaggtcaggaaggtgggaaagggctggggtgtctgtgaccctggcagtcactgagaagcagggtggaagcagccccctgcagcacgctgggtcagtggtcttaccagatggatacgcagcaacttccttttgaacctttttattttcctggcaggaagaagagggatccagcagtgagatcaggcaggttctgtgttgcacagacagggaaacaggctctgtccacacaaagtcggtggggccaggatgaggcccagtctgttcacacatggctgctgcctctcagctctgcacagacgtcctcgctcccctgggatggcagcttggcctgctggtcttggggttgagccagcctccagcactgcctccctgccctgctgcctcccactctgcagtgctccatggctgctcagttggacccacgctggagacgttcagtcgaagccccgggctgtccttacctcccagtctggggtacctgccacctcctgctcagcaggaatggggctaggtgcttcctcccctggggacttcacctgctctccctcctgggataagacggcagcctcctccttgggggcagcagcattcagtcctccaggtctcctgggggtcgtgacctgcaggaggaataagagggcagactgggcagaaaggccttcagagcacctcatcctcctgttctcacactggggtgtcacagtcctgggaagttcttccttttcagttgagctgtggtaaccttgtgagtttcctggagggggcctgccactacccttgggactccctgccgtgtgtctgggtctaactgagctctgaaaggagagagccccagccctgggccttccaggggaagccttacctcagaggttggcttcttcctactcttgactttgcgtctctgcagagggaggtgggaggggtgacacaaccctgacacccacactatgagtgatgagtagtcctgccccgactggcccatcctttccaggtgcagtcccccttactgtgtctgccaagggtgccagcacagccgccccactccaggggaagaggagtgccagcccttacccacctgagtgggcacagtgtagcatttattcattagcccccacactggcctgaccatctcccctgtgggctgcatgacaaggagagagaacaggctgaggtgagagctactgtcaacacctaaacctaaaaaatctataattgggctgggcagggtggctcacgcctgtaatcccagcactttgggaggccgagatgggtggatcacctgaggtcagatgttcgagaccagcctggccaacatggtgaaaccccgtctctactaaaaatacaaaaaattagctgggcgtggtggtgggtgcctgtaatcccagctactcaggaggctgaggcaggagaattgcttgaacctgggaggcagaggttgcagtgagccgagatcacaccattgcactccagtctgggtgataagtatgaaacgccatctccaaaacaaaagaaaagcctaattccccaagaactgtcagtctttcacctgtctgctagctcccagggagaccccacttgccagggctgtctacatttgtcctgagatctcttctggtgagaacagcactttcctcaggaaagtttgttgaaagtcatcagatccatgattgaaaatcgaagctgcctgtggtgatggataacagctggggttaaaaagcagcagctggggcatgagcggtccacagtgagtttttgttgtttttgtttttttgggtgggggatggggtcttgctaggtctcaaactcctggcctcaagtcatcctcccattacagccttctgagtcactgacactacaggtgtgagccaccatgtccagcttgtagtggttttgaacagctcttgccccttcttgggaatctaggtgccctgcacgtgggtaaggctgtctgcagctgtgcccatattcaggaaggccggcaaggccctgagccctcacacgtgactgacctgaggtgctgtgcagacagcaggtgacggctaagggaaagttgagcactgcctagccgagcactgaagccacgcccggcacacagagagagacccactcggcaaagacttcgcttccaggcacctaaggaactctctgaccagtcattagctgaccactgccgtaactgaagagcggcttcagtggccacagctcgcagggaatggagacattaatgcttagtcagaattagttcagaaaagtcacccagcaaagaaacagctccaacaggcaacaacaacaacacatccttggcagggaagagaatctgacttccggagttgccacattatcgcccgtgaaatgtccaggttttaacaaattatgagacatggaaaggaaaccgaaaggacgacccagacacgggaaaagtcaccaatgggaccagcccgatgctgcaattgctagacaaagacgttcagtcagctcatttaaatatgttcaaagacctaaaacatgctgcatctgaggctgcaccggctggaacctgctgatctcggaagctaagcatggtcaggcctggctagtacttcaaagggagaaaccacgtgtagg

SEQ ID NO: 96085 - DNA, 16379 bp, Homo sapiens
aggaggctcccaggaaggtcaaggcacctgactcctgggctgcttccctcccctcccctccccaggtcaggaaggtgggaaagggctggggtgtctgtgaccctggcagtcactgagaagcagggtggaagcagccccctgcagcacgctgggtcagtggtcttaccagatggatacgcagcaacttccttttgaacctttttattttcctggcaggaagaagagggatccagcagtgagatcaggcaggttctgtgttgcacagacagggaaacaggctctgtccacacaaagtcggtggggccaggatgaggcccagtctgttcacacatggctgctgcctctcagctctgcacagacgtcctcgctcccctgggatggcagcttggcctgctggtcttggggttgagccagcctccagcactgcctccctgccctgctgcctcccactctgcagtgctccatggctgctcagttggacccacgctggagacgttcagtcgaagccccgggctgtccttacctcccagtctggggtacctgccacctcctgctcagcaggaatggggctaggtgcttcctcccctggggacttcacctgctctccctcctgggataagacggcagcctcctccttgggggcagcagcattcagtcctccaggtctcctgggggtcgtgacctgcaggaggaataagagggcagactgggcagaaaggccttcagagcacctcatcctcctgttctcacactggggtgtcacagtcctgggaagttcttccttttcagttgagctgtggtaaccttgtgagtttcctggagggggcctgccactacccttgggactccctgccgtgtgtctgggtctaactgagctctgaaaggagagagccccagccctgggccttccaggggaagccttacctcagaggttggcttcttcctactcttgactttgcgtctctgcagagggaggtgggaggggtgacacaaccctgacacccacactatgagtgatgagtagtcctgccccgactggcccatcctttccaggtgcagtcccccttactgtgtctgccaagggtgccagcacagccgccccactccaggggaagaggagtgccagcccttacccacctgagtgggcacagtgtagcatttattcattagcccccacactggcctgaccatctcccctgtgggctgcatgacaaggagagagaacaggctgaggtgagagctactgtcaacacctaaacctaaaaaatctataattgggctgggcagggtggctcacgcctgtaatcccagcactttgggaggccgagatgggtggatcacctgaggtcagatgttcgagaccagcctggccaacatggtgaaaccccgtctctactaaaaatacaaaaaattagctgggcgtggtggtgggtgcctgtaatcccagctactcaggaggctgaggcaggagaattgcttgaacctgggaggcagaggttgcagtgagccgagatcacaccattgcactccagtctgggtgataagtatgaaacgccatctccaaaacaaaagaaaagcctaattccccaagaactgtcagtctttcacctgtctgctagctcccagggagaccccacttgccagggctgtctacatttgtcctgagatctcttctggtgagaacagcactttcctcaggaaagtttgttgaaagtcatcagatccatgattgaaaatcgaagctgcctgtggtgatggataacagctggggttaaaaagcagcagctggggcatgagcggtccacagtgagtttttgttgtttttgtttttttgggtgggggatggggtcttgctaggtctcaaactcctggcctcaagtcatcctcccattacagccttctgagtcactgacactacaggtgtgagccaccatgtccagcttgtagtggttttgaacagctcttgccccttcttgggaatctaggtgccctgcacgtgggtaaggctgtctgcagctgtgcccatattcaggaaggccggcaaggccctgagccctcacacgtgactgacctgaggtgctgtgcagacagcaggtgacggctaagggaaagttgagcactgcctagccgagcactgaagccacgcccggcacacagagagagacccactcggcaaagacttcgcttccaggcacctaaggaactctctgaccagtcattagctgaccactgccgtaactgaagagcggcttcagtggccacagctcgcagggaatggagacattaatgcttagtcagaattagttcagaaaagtcacccagcaaagaaacagctccaacaggcaacaacaacaacacatccttggcagggaagagaatctgacttccggagttgccacattatcgcccgtgaaatgtccaggttttaacaaattatgagacatggaaaggaaaccgaaaggacgacccagacacgggaaaagtcaccaatgggaccagcccgatgctgcaattgctagacaaagacgttcagtcagctcatttaaatatgttcaaagacctaaaacatgctgcatctgaggctgcaccggctggaacctgctgatctcggaagctaagcatggtcaggcctggctagtacttcaaagggagaaaccacgtgtaggcctggtgcagtggctcacacctataatcctagcactctgggaagctgaggcccgtggattgcttgagcccaggagtttgagagcagcttgggaaatgtggtgagacccccatctctacaaaaaaatttaaaaaattagctggctgcctatggtcccagcctctcaggatgctgaggtaggaggatcacttcagcccaggaagttgaggctgcagtgagccatgactgcatcactgcactccagcttgggcgacagagagaccctctcccaagaaaaagaaaagaaccatgtcaaaagaactaacgaaagtgtgggaacaatgtctcaccaattagagaatatcaataatgggatgaaccttataaaaaggggctgggcatggtggctcatgcctataatcccagcactttgggaggctgaggcgggcatatcatgaggtcaagagattgagaccagcctggccaacatggtgaaaccccgtctctacttaaaatacaaaaattagccgggcgtggtggcacgtgcctgtaatcccagctactcgggaggctgaggcaggagaatcgcttgaacccgagaggcagagattgcagtgagccgagattgcaccactgcactacagcctgggtgacagagcgatactccaaaaaacaaaacaaaacaaaaaacaaaaaaaaagtttaaaaaggaaccaaataaaaattctggagttgtagggtaaaataaatgaaaattcatcccaggggcccaagagcagattggaacaattggaagaaagagcctgtgactatggagagaggccacctgaggtagtaccctctgaggaacaggaacaagcatgaagagcaatgcacagagatccagagacctggagacgccgtcaagctttccgacatacacgcaatgggagtcccaggaaagaagacagggagaaaggagtaaaggaatagttgaagaattaatggctgaaaaacctcccaaatctgatgaaaaatattaatctgtacatccaaaaagctcatcaaactccaagtagggtaaactcaaagagatcttcagccatacgcatcatcataatcactgtcaaaagacagatttttctttttttagaattttaaatgtaccttttaatttgctcctggggcaaagagccaggactggtactagagcagtgtctgggatgagaagaatttaataaaatgggattaggtccaatggttgggttaggggaggcaacctgctcgggaggatcagcctcaacctatccatgcagcagggcctccacctgtccctctccgtagtcccacacctggaacccagagccatctgcctcttcccagatcatggccgacagcactccaccrgactgcggctggagcaggcacaggattcacttattgagggctgtggcctggcacagatcatagcctatacccagggacagttgtgtcacttctgccaccaccacatccgccttctgcagccacatcaagtaccactcatggatgagcccgtcacccccagcggacttatcaaccccgcgtccagctccacagccgccacgtgctcggtgagcactggctccaagcatggcagctgccatacaatccacctgtagagggcccggtcctcctgtcctcagtggatgatcccgtagaagtccagagctcggcagctgccctcccacaaaagacaggattttgaaagcagcaagagagaagagacgtatcaggtagtcacagtggctcaggcctgtaatcccagcactttgggaggcccaggtgggaggatcgcttcaccccaggaattcaagaccagcctggacaacttggaagaacccggtctctacaaaaaatacaaaattagctgggattgggtgcggtggctcatgcctataatcccagcactttgggagcctgaggtgggtggatcacctgaagtcaggagttcaagactagcctggccaacatggtgaaaccctatctctactgaaaatacaaaaagctagacgtggtggcacacacctgtaatcccagctacttaggaggctgaggcaggagaattgcttgaagcctagaggtgaaggttgtagtgagccgagattgcatcattgcacaatggaggggagccaccagcctgggcaacaagaggaaatctccgtctccaaaaaaaaaaaaaaaaaaaaaagaattaggctgggtggtgcctgtagtcccagctacttgggaggcagggggtccacttgatgtcgagactgcagtgagccatgatcctgccactgcactccggcctgggcaacagagtgagaccctgtctaaagaaaaaaaaaataaagcaacatatcctgaacaaaggatcctccataacgttcccaccagatttctaatcagaaacatggaggccagaaagcagtggaggaggacraccctcaggcagcccgggaggatgttgtcacaggctgggscaagggccttccggctaccaactgggagctctgggaacagccctgttgcaaacaagaagccatagcccggccagagcccaggaatgtgggctgggctgggagcagcctctggacaggagtggtcccatccaggaaacctccggcatggctgggaagtggggtacttggtgccgggtctgtatgtgtgtgtgactggtgtgtgtgagagagaatgtgtgccctaagtgtcagtgtgagtctgtgtatgtgtgaatattgtctttgtgtgggtgattttctgcgtgtgtaatcgtgtccctgcaagtgtgaacaagtggacaagtgtctgggagtggacaagagatctgtgcaccatcaggtgtgtgcatagcgtctgtgcatgtcaagagtgcaaggtgaagtgaagggaccaggcccatgatgccactcatcatcaggagctctaaggccccaggtaagtgccagtgacagataagggtgctgaaggtcactctggagtgggcaggtgggggtagggaaagggcaaggccatgttctggaggaggggttgtgactacattagggtgtatgagcctagctgggaggtggatggccgggtccactgaaaccctggttatcccagaaggctttgcaggcttcaggagcttggagtggggagagggggtgacttctccgaccaggcccctccaccggcctaccctgggtaagggcctggagcaggaagcaggggcaagaacctctggagcagcccatacccgccctggcctgactctgccactggcagcacagtcaacacagcaggttcactcacagcagagggcaaaggccatcatcagctccctttataagggaagggtcacgcgctcggtgtgctgagagtgtcctgcctggtcctctgtgcctggtggggtgggggtgccaggtgtgtccagaggagcccatttggtagtgaggcaggtatggggctagaagcactggtgcccctggccrtgatagtggccatcttcctgctcctggtggacctgatgcaccggcrccaacgctgggctgcacgctacycaccaggccccctgccactgcccrggctgggcaacctgctgcatgtggacttccagaacacaccatactgcttcgaccaggtgagggaggaggtcctggagggcggcagaggtsctgaggmtscccyaccagaagcaaacatggatggtgggtgaaaccacaggctggaycagaagccaggctgagaaggggaagcaggtttgggggacktcctggagaaggrcatttatacatggcatgaaggactggattttccaaaggccaaggaagagtagggcaagggcctggaggtggagctggacttggcagtgggcatgcaagcccattgggcaacatatgttatggagtacaaagtcccttctgctgacaccagaaggaaaggccttgggaatggaagatgagttagtcctgagtgccgtttaaatcacgaaatcgaggatgaagggggtgcagtgacccggttcaaaccttttgcactgtgggtcctcgggcctcactgctcaccggcatggaccatcatctgggaatgggatgctaactggggcctctcggyaattttggtgactcttgcaaggtcatacctgggtgacgcatccaaactgagttcctccatcacagaaggtgtgacccccaccccygccccasgatcaggaggctgggtctcctccttccacctgctcactcctggtagccccgggggtcgtccaaggttcaaataggactaggacctgtagtctggggkgatcctggcttgacaagaggccctgaccctccctctgcagttgcggcgccgcttcggggacgtgttcagcctgcagctggcctggacgccggtggtcgtgctcaatgggctggcggccgtgcgcgaggcgmtggtgacccacggcgaggacacsgccgaccgcccgcctgtgcccatcayccagatcctgggtttygggccgcgttcccaaggcaagcagcggtggggacagagacagatttccgtgggacccgggtgggtgatgaccgtagtccgagctgggcagagagggcgcggggtcgtggacatgaaacaggccagcgagtrgggacagcgggccaagaaaccacctgcactagggaggtgtgagcatggggacgagggcggggcttgtgacgagtgggcggggccactgccgagacctggcaggagcccaatgggtgaggctggcgcatttcccagctggaatccggtgtcgaagtggggggcggggaccgcacctgtgctgtaagctcagtgtgggtggcgcggggcccgcggggtcttccctgagtgcaaaggcggtcagggtgggcagagacgaggtggggcaaagccctgccccagccaagggagcaaggtggatgcacaaagagtgggccctgtgaccagctggacagagccagggactgcgggagaccagggggagcatagggttggagtgggtggtggatggtggsgctaatgccttcatggccacgcgcacgtgcccgtcccacccccaggggtgttyctggcgcgctatgggcccgcgtggcgcgagcagaggcgcttctccrtstccaccttgcgcaacttgggcctgggcaagaagtcgctggagcagtgggtgaccraggaggccgcctgcctttgtgccgccttcgccaaccactccggtgggtgatgggcagaagggcacaaagcgggractgggaaggcgggggacggggaaggcgaccccttacccgcatctcccacccccargacgcccctttcgccccaacggtctcttggacaaagccgtgagcaacgtgatcgcctccctcacctgcgggcgccgcttcgagtacgacgaccctcgcttcctcaggctgctggacctagctcaggagggactgaaggaggagtcgggctttctgcgcgaggtgcggagcgagagaccgaggagtctctgcagggcgagctcccgagaggtgccggggctggactggggcctcggaagagcaggatttgcatagatgggtttgggaaaggacattccaggagaccccactgtaagaagggcctggaggaggaggggacatctcagacatggtcgtgggagaggtgtgcccgggtcagggggcaccaggagaggccaaggactctgtacctcctktccacgtcagagatttcgattttaggtytctcctctgggcaaggagagagggtggaggctggcacttggggagggacttggtgaggtcagtggtaaggacaggcaggccctgggtctwcctggagatggctggggcctgagacttgtccagrtgaacgcagagcacaggagggattgagaccccgttctgtctggtgtaggtgctgaatgctgtccccgtcctcctgcayatcccagcgctggctggcaaggtcctacgcttccaaaaggctttcctgacccagctggatgagctgctaactgagcacaggatgacctgggacccagcccagccmccccgagacctgactgaggccttcctggcagagatggagaaggtgagagtggctgccacggtggggggcaagggtggtgggttgagcgtcccaggaggaatgaggggaggctgggcaaaaggttggaccagtgcatcacccggcgagccgcatctgggctgacaggtgcagaattggaggtcatttgggggctaccccgttctgtcccgagtatgctctcggccctgctcaggccaaggggaaccctgagagcagcttcaatgatgagaacctgygcatagtggtggstracctgttctctgccgggatggtgaccacctygaccacgctggcctggggcctcctgctcatgatcctacatccggatgtgcagcgtgagcccatctgggaaacagtgcaggggccgagggaggaagggtacaggcgggggcccatgaactttgctgggacacccggggctccaagcacaggcttgaccaggatcctgtaagcctgacctcctccaacataggaggcaagaaggagtgtcagggccggaccccctgggtgctgacccattgtggggacgcatgtctgtccaggccgtgtccaacaggagatcgacgacgtgatagggcaggtgcggcgaccagagatgggtgaccaggctcacatgccctacaccactgccgtgattcatgaggtgcagcrctttggggacatcgtccccctgggtgtgacccatatgacatcccgtgacatcgaagtacagggcttccgcatccctaaggtaggcctggcgccctcctcaccccagctcagcaccagcmcctggtgatagccccagcatggctactgccaggtgggcccactctaggaaccctggccacctagtcctcaatgccaccacactgactgtccccacttgggtggggggtccagagtataggcagggctggcctgtccatccagagcccccgtctagtggggagacaaaccaggacctgccagaatgttggaggacccarcgcctgcagggagagggggcagtgtgggtgcctctgagaggtgtgactgcgccctgctgtggggtcggagagggtactgtggagcttctcgggcgcaggactagttgacagagtccagctgtgtgccaggcagtgtgtgtcccccgtgtgtttggtggcaggggtcccagcatcctagagtccagtccccactctcaccctgcatctcctgcccagggaacgacactcatcaccaacctgtcatcggtgctgaaggatgaggccgtctgggagaagcccttccgcttccaccccgaacacttcctggatgcccagggccactttgtgaagccggaggccttcctgcctttctcagcaggtgcctgtggggagcccggctccctgtccccttccgtggagtcttgcaggggtatcacccaggagccaggctcactgacgcccctcccctccccacaggccgccgtgcatgcctcggggagcccctggcccgcatggagctcttcctcttcttcacctccctgctgcagcacttcagcttctcggtgcccrctggacagccccggcccagccaccatsgtgtcktygctttcctggtgascccatccccctatgagctttgtgctgtgccccgctagaatggggtacctagtccccagcctgctccctagccagaggctctaatgtacaataaagcaatgtggtagttccaactcgggtcccctgctcacgccctcgttgggatcatcctcctcagggcaaccccacccctgcctcattcctgcttaccccaccgcctggccgcatttgagacaggggtacgttgaggctgagcagatgtcagttacccttgcccataatcccatgtcccccactgacccaactctgactgcccagattggtgacaaggactacattgtcctggcatgtggggaaggggccagaatgggctgactagaggtgtcagtcagccctggatgtggtggagagggcaggactcagcctggaggcccatatttcaggcctaactcagcccaccccacatcagggacagcagtcctgccagcaccatcacaacagtcacctcccttcatatatgacaccccaaaacggaagacaaatcatggcgtcarggagctatatgccagggctacctacctcccagggctcagtcggcaggtgccagaacrttccctgggaaggccccatggaagcccaggactgagccaccaccctcagcctcgtcacctcaccacaggactggctacctctctgggccctcagggatgctgctgtacagacccctgaccagtgacgagttcgcactcagggccaggctggcgctggaggaggacacttgtttggctccaaccctaggtaccatcctcccagtagggatcaggcagggcccacaggcctgccctagggacaggagtcaaccttggacccataaggcactggggcgggcagagaaggaggaggtggcatgggcagctgagagccagagaccctgaccctagtccttgctctgccattaccccgtgtgaccccgggcccacccttccccacccttccccaccccgggcttctgtttccttctgccaacgagaaggctgcttcacctgccccgagtcctgtcttcctgctctgccttctggggctgtggcccttgctggcctggagccccaaccaagggcagggactgctgtcctccacgtctgtcctcaccgacataatgggctgggctgggcacacaggcagtgcccaagagtttctaatgagcatatgattacctgagtcctgggcagaccttcttagggaacagcctgggacagagaaccacagacactctgaggagccacctgaggcctcttttgccagaggaccctacagcctccctggcagcagttccgccagcatttctgtaaatgccctcatgccagggtgcggcccggctgtcagcacgagagggacgttggtctgtcccctggcaccgagtcagtcagaagggtggccagggcccccttgggcccctccagagacaatccactgtggtcacacggctcggtggcaggaagtgctgttcctgcagctgtggggacagggagtgtggatgaagccaggctgggtttgtctgaagacggaggccccgaaaggtggcagcctggcctatagcagcagcaactcttggatttattggaaagattttcttcacggttctgagtcttgggggtgttagaggctcagaaccagtccagccagagctctgtcatgggcacgtagacccggtcccagggcctttgctctttgctgtcctcagaggcctctgcaaagtagaaacaggcagccttgtgagtcccctcctgggagcaaccaaccctccctctgagatgccccggggccaggtcagctgtggtgaaaggtagggatgcagccagctcaggggagtggcccagagttcctgcccacccaaggaggctcccaggaaggtcaaggcacctgactcctgggctgcttccctcccctcccctccccaggtcaggaaggtgggaaagggctggggtgtctgtgaccctggcagtcactgagaagcagggtggaagcagccccctgcagcacgctgggtcagtggtcttaccagatggatacgcagcaacttccttttgaacctttttattttcctggcaggaagaagagggatccagcagtgagatcaggcaggttctgtgttgcacagacagggaaacaggctctgtccacacaaagtcggtggggccaggatgaggcccagtctgttcacacatggctgctgcctctcagctctgcacagacgtcctcgctcccctgggatggcagcttggcctgctggtcttggggttgagccagcctccagcactgcctccctgccctgctgcctcccactctgcagtgctccatggctgctcagttggacccacgctggagacgttcagtcgaagccccgggctgtccttacctcccagtctggggtacctgccacctcctgctcagcaggaatggggctaggtgcttcctcccctggggacttcacctgctctccctcctgggataagacggcagcctcctccttgggggcagcagcattcagtcctccaggtctcctgggggtcgtgacctgcaggaggaataagagggcagactgggcagaaaggccttcagagcacctcatcctcctgttctcacactggggtgtcacagtcctgggaagttcttccttttcagttgagctgtggtaaccttgtgagtttcctggagggggcctgccactacccttgggactccctgccgtgtgtctgggtctaactgagctctgaaaggagagagccccagccctgggccttccaggggaagccttacctcagaggttggcttcttcctactcttgactttgcgtctctgcagagggaggtgggaggggtgacacaaccctgacacccacactatgagtgatgagtagtcctgccccgactggcccatcctttccaggtgcagtcccccttactgtgtctgccaagggtgccagcacagccgccccactccaggggaagaggagtgccagcccttacccacctgagtgggcacagtgtagcatttattcattagcccccacactggcctgaccatctcccctgtgggctgcatgacaaggagagagaacaggctgaggtgagagctactgtcaacacctaaacctaaaaaatctataattgggctgggcagggtggctcacgcctgtaatcccagcactttgggaggccgagatgggtggatcacctgaggtcagatgttcgagaccagcctggccaacatggtgaaaccccgtctctactaaaaatacaaaaaattagctgggcgtggtggtgggtgcctgtaatcccagctactcaggaggctgaggcaggagaattgcttgaacctgggaggcagaggctgcagtgagccgagatcgcatcattgcactccagcctggtcaacaagagtgaaactgtcttaaaaaaaaaatctataattgatatctttagaaagataaaactttgcattcatgaaataagaataggagggtctaaaataaaaatgttcaaacacccaccaccactaattcttgacaaaaatatagtctgggtgccttagctcatgcctgtaatcccagcattttgggaggctaaggcaggaggattgtttgagcctaggaattcaacaccagcctgggccacctaaggagaccccatctctacaaaaaattaaaatactggctgggtgtggtggcacacacctgtagttccagctgcttgggaggctgaggtgggaggatcacttgagtccaggaacaaagctgcagtgaactgtgatcgtgccactgcactccagcctgggcaacagagaaagaccttgccttaaaaataaaaaatataataataggaatgcaaaatctaatcaaagtatagaagctaaacttgaaaaaaatattttccagaaagaacagagaagaggtcaggagctccaacagctaaattgttgtttagatgtttctgaaacaggcagcagagacaacagactaggaggcaaggaaagatgtctaataaatacgtttcttttttgtcaagacaagttctcacagaggaagaacatgagtttccagtagagaaggaaacaccaagtgttcatgacaatgaatgaaggggacccagccccaattttgttgtcaagaaatttcacaacactgaggacagagtggaaccyaaaaacttccagagagaaaaaagtctgagcttcaggaattcaatattcatcagacttctcaacaccaacctttgaagctataagataatgaagaccttcaaaatctgagagaaaatatttccaatctagaattctatacctagccaaatgctatgcaagtatgaattgaggtcttttcggatacataaatgtctcaagactacccctcaggaagcaaccggaggttgtacttcactaaaataaaggagaaatagaaaagaagataacatgggacccagcacaacaggcagggagagcccctgagcataagggtgaatggggagctcaggaggacagctgggcagcagacctccagggtgccccatccagatggaatcagggagatggagggctcctgaggtatgtctccatgaaaatgatcatatggagaaatgacstgatctgtctaaatgtactgcaaagagatttctatttttggcagaaaatttggatgaattaattatataatagatgcacaaaaaactaaagaaagagaagaagaaaaactaaaatcatgactcaactgggactactgtctacattttttgttttgagaaagagtcttgctctgttgcccagactggagtgcagtgatcacgtttcattgcagcctccacaacctgtgctcaagtaagtgactctcttacctcagcctccttagtagctgggatcacagggcaccaccacactcagctaatttttttttttaaatagacagtgtctcccaatgttgtccaggctggtctcgaagtcctggactcaagcgatcctcccatgttgacctctcaagtagttgggattacagtcatgagccactgtgcctgacctagctaatttttttctgatttatttatttattttttgtacagagtctcactatgttgaccaggctggcctggaacttctgagctcaagtgatcctcctgccttcgcctcccaaagtgcagagattataggtgtaaactatcacgcctggcctgtttacatagtttaataatgtaaatcttcaataccgatctaataaaaattgaaatatgccttttagaatggctttcaaagataacaaatgctggagaggatgtagaacaactggaacctctcggttattgctggtgagacagccgctttgaaaaagtttgagtttcttacaaaattaaacttacacttacacttaccatatgacccaaaaattccactgcttgctctttactcaagtataaggaaaatctatgtacacacaaaacttgtacgtgaatatttattaatagtcattttatgccccaaactagaaatagtccaaatgttctggaacatccatacaacggaccaccactcaataaaaggaacaaactacggatacacgtgactagatgaatctcaaatgctttgtgctaagtaaaataaaccagactgaaaaggctaccatacgtttccatttatatgacaatcttgcaaagtcaaaaccacaggaacaggaaactgttcactgattgccagggtgtgggagtaggaggaagggctgactacaggtgactatggaggatttttttttttctgagacggagtctctgtcgcccaggctggagtgtactggcacgatctcggctcactgcaacatccacctcctgggtttaaggtatttttagtagagacggggtttcactatgttggccaggctggtctcaaactcctgacctcaggtgatccacccgcttcggcctcccaaagtgctgggattataggcgtgagccaccgaggccagccacttttttttttttttaaagacagagtcttgctgtgtcactcaggctggagtgcagtggcgtgatcccagctcactgcagccttaacatcctgcactcaagtgatccttctacctcagcttcctgagt

SEQ ID NO: 96086 - DNA, 17118 bp, Homo sapiens
  misc_feature (1)...(17118): n = A,T,C or G
cccttttgattctgttttaaaattatctcgttaaagatctccaaatttgttccgatgacaagtgaaatttaaatgtgagattgaactgaacaaaccctcatctcatgaaggacggggtgtgtgtgtggcgttgatctttakcctgtctcacaccagttcagaaaacactagacccaggattgaaaaagcaaaccacagcagaaccatccttttgtcattaatttgtctcaaagtgggaaggttttgggggagggggaaatacagggatggtccatgttttcaagagtaggggaatgatgtttaaacacaaaaataaattttttttcatttccagaaacactatttatttatggttttttttttttaattttttctttttgggggtgaaattggcagatgcctgaggtcatagctgtgtcctgggtcactgtggctggtgaggacctcaaggaccccatcaagtgtacacagcagcagcaaaatcaagggatgaccctcctctggggccccctgtcctcagcacattccaggcagctgtgccctgacccacagggacccgtggggatgggaggaggtccaggcctgtgttgccagagctggcagtgtgagctgtaggcagggacggggagggactgtcgctgtgatcagagtgggttaagctgaccaggaacacccatttaacccctttttctttttgctttcatttttataaaggaaaagaggacctgtcagataggcagccccatgctacgtgattctttatgttgtgttgttttgttttgtaaattgtataatttttaaatatctgagttttaaaaaaagaaaaaagtacaaaaaaatcttgttatggccttaagaaggggttagtgcatctttcaggggtcactctgccatggggataaaatagctgtttcacaaacagttttatttaaaaaaacaaaaaacaaaaaaaatcaaaaaatcaaaaaaataataaacttcattttaaccttgtttcctcttctgtttactttaaagtgaatgcgtctcttccttctcccattctaacccccaaagggtagctctggttctccagaggaggccatgatcagaacctgtctgtcccattcctggcctctcgatggccacgcagccgggaagcaaacaaaatatagggttcttctgccactcctctgggcaggtggagtgtggccagtgtatggggacagtcagatttactcaagttgatatgaagacatatttccaatcaacattaagggttataaaaaaataatggaatgttaatggacttttttagagaatggaaatactggaaggaatattgtgaagcagaaataagcaattataaatgagttctgtgttcatcaatttggggcagcagaaatggcagattaattgtattttaatggctacatcaagcagtccatttctcatttcactccgccaggatggaggtgtgggtgggtgcgccgtgccggccgtaggaccaagcttaggcaactgaacaggacctgcacagaaatgatggcttttttgagctagttgttgtctcattctggtcttgacttggcattaatacagttaaaatgaaatggatagacttcaggtgtcaagggctaaaccacaaaacttgaaaaatatgtatcttgaggaaaatattttcctgacagcaaatgtttgtcattttgtcttttattcttttgtccccttttgatttgcctgagtggagcacttgtgattgttctaggtctttccttaaattggcttcagtaatgaccttcactggggagtggcagtgatacacgcatgcctcctgactccagtttctggcttctgcagttctcctcaactgctcaagtgccttttagttcctttagtgtttgtcttaattgatttttttaaagtagttttatgttcacagaaggattaagctgacggtacagacagttcccatataaccccttccccccgtatgcatacctttccctctatcaacatcccaaccagagttggcatactgttttcacccaaagtccatagtttatactaggggccactcccggtggtgtacattttatggcctttgacaaatgtataaagacctggatctggcagggcgtggtggctctcgcctataatcccagcattttgggaggctcaggtgggtgtatcgcttgagttcgagaacagcctgggcaacatggcgaaaccccatctctacataaaaatacaaaaattagccaggcatgatggtgcatgcctgtagtctcagctacttgggaggctgagatgggaggatcacttgagcccaggaggtcgaggctacagtgagtcgtgatcgcgccaccacacttcagcctgggtgacagcaaaatcctgtctcaaaaagacgaggacgcaccatgatccagagtagtttcactgctccagggatcctccgtgtcccactgttcattcctccttagccccagtccctcaccgctgagccttttactgtctgcaaagttttgccttttccaaagtatcatatagttgagattagatagtaggtagccttttttagattggcttcattcacttagtaatgtgcatttaaggttcacccgtgtcttttcatgacttgatagcttgtttctttttagtgataaataattccattgtctggctgtaccacagtttatccattcaactgctgaagaacatcttggttgctttcaagttttgacaattacaaatgaagctgctgtaaacatccctttgcaggtttttgtgtggacataaggcctcaactcctttgggtaagtacaggaagcacgattggtggattgtatggtaagagtatgtctagttttgtaagaaattgccaaactgtctggatcacctgaggtcaggagtttgagaccagcctggccaacatggtgaaaccctgtctctactaaaaatacaaaaatcagccaggcatggtggctcacgcctgcagtcccagctaaacgggaggctgaggtgggaggattgcttgaacgcaggaggcaaaggttccagtgagctgagatcatcgtgccactgcactcctagcctgggtgacagagtgagtgagactctgtctcaaaaaaaaaaaaaaaaaaaaaactgagaaaaggaaaagaaattgccaaactttcttccaaagtgtctgtaccattttgtactcccaccagcaatgaatgagttcctgatgctccacatccttgccagcatttggtgttgtcagtgttctggatttaagccattctaataggtgtgtatatagccatttatttttttaatactcataaagtttttaaattgtggttaaaaaaatgtaccatcataacagtcacagtacagtttagtgggaaatgtgttcagattgttgtgcaaccaatctccagaatttttcattttataaaacggaagctttacccattaaactgcccccctgcaggctggccctgcccctggagctttccatttctgtttctagggtacaagcagccctcgatacccacaggctccgcatccacaaattcaaccacacatcaaagataacttgagaaagtataacaactaaaaatacaaataagagcagtacagtatagcaactatttatgtagcatttacactgtattaggcattacaaataatctagagatgatttaaagtatacaggagcatttgcataggtatactatgccattttacataaggaacctgagcatccttgggttttggtatttaccgggggtcctggcaccaatcccctccaggatacccagacacaactattccactgcccataaccccgtccccttgcagctgtggaaacgcagaggtgctgctctgagggcagacagaccccaccactcagcactcttgagtcggacccagcagaaacccatcccatgggaggagctgggaattggagggtctctcccagtagcattgctatgcctggcagggggaagggcaagaacaagcaaaatgctccaacttgactacccttcccagtgcagtccctccctggctctgcactagctggcattgcagcatcctaactagtttctagaattctcacgatgttttggtctcctatagctttaacattgagctctctaggagaacgagagcccgcagtttcctagtctaccacttgctgacatattttcacaccatctcacttggcaacgtccatagggcctgccagggcacagtgcactttttaccatgacacagcagtaccactgttcagggaaggcaggttggatctgtttcctaaaaataataaatcccagaaacatctatactgaccattaatagaatgtaatgtccaaacagtatagaatagtagctcagcatacacattggatgtggactcctaacaccgctgtgtgacttgaaccttgttatgtgatctctgagcctcagtctctgtgccttggggaccataaaaccacctccttagggggctgtgggaggattaatgagctagagcacacagtctgaccagcagtttctggcacataagtgcccgatcaatggaagccacaggtgcacaatgattggaaaaggccacaggcattgttattaaatgttttcctcatgctgccatatcttgaattacaggcctctggctggtaaggagggcactcgggaggacactgcccacattgcaggcatgcctgtccctgcccttcacacccccatcatgattcatgatgactgcttggggagggcctgacacctcaaaaggccaagagtgcatacaggtaatgtataaagggccaccatgtaacaagcacccagaccatcctgctgtccctgcaccttgattctctcacagtcccaaatagaacagtgctgccatgtaggacaggaacattcattcagctgaggccagtttgggagaccacaagccagatctgagaagtccccagataggcatgggtcttgctctctctgtcagttgagtagcttcaaaacttctgttgggccaggtggctcatgcctctatttccaacactttgggaggccaaggcaggaggatcacttgaagccaggagttccagaccagcgtgggcaacatagtgaggacccatctcaacaaaaaaattagccgagcgtaatgatgtgcacctgtagttccagctactcgggacgctaaaataggatctcttgattgagcacaggagtttgagtgagctatgatcacagctctgcactccagcctgggcaacagagcaagatcttgtctctaaaaaatatatatatatttttaaattttaaataaactgttctccctgccttttgttccccagatccagtcttcatccagacctgaaaagacccaggctccagctgctggcctcctgctgcccctcaggccacctgcacaggaaattccaggggtgggttggtcccactgccagtgccgtggcctacagtgctaggcagcccctcagtcagctagacaaagttctccatgaatccttcccagaaagtcctgttccagcctgggacaacgtccccatggaccctcatggcactgctggcttgtcatgtcagctatgttaccttcctactccccgtggtcatcattacgttggggcattgactcacagccttaccaccatgctcccagtacacagcccagcacccagtacaatccatacctccaacttgggtggagctcccatgccaggccacctctcgcccaccaccctaatctgggtaggcaactagagcgagcaggggcaaggacctctgcagcagcccatacccgccctggcctgaccctgcacccactggcagcacagtcaacacagcaggttggctcacagcagaaggcaaaggccatcatcagctccctttataagggaacggtcaygcactsggtgtgctgagagtgtcctgcctggtcctctgtgcctggtggggtggrggtgccaggtgtgtccagaggagcccaatgggcagtgaggcagccatggggctggatgcactggtgcccctggcagtgacagtggccatcttcctgctcctggtggacctgatgcagcagcaccaacgctggactgcacgctacccrccaggccccctgccactgcccgggctgggcaacttgctgcatgtggacttccagaacatatacaccttcaaccaggtgagggaggaggtcctgaggatcccccaccaccagcaaacatgggtggtgggtggagccacagtctggacaagaagccaggctgagaaggggaagcagatttgagggacttcctgggggagggcatttatgcatggcatgaaagatgggattttccaaaggccaaggaagagtagggcaagggcctggaggtggagctggacttggcagtgggcgtgcaagcccattgggcagcatatgttaggagcacaaagtcccctctgctgacaccagaaggaaaggccttgggaatggaagacgagtcagggtcctgtgtgccgtttaaatcaggaaatcaggctgtgcgtggtggctcacgcctataatcccagcacttaaggaagccaaggtgggcggatcacctgaggtcaggggttccagatgagtctggccaacatggcaaaaaccggtctctactaaacatacaaaaaatgagctgggcacagtggtgcacgcctgcaatcccagctacttgggaggctgaggcaggagaattgcttgaacytaggaggcagaggttgtagtgagtggagattgtgccattgccttgcaacctcggtgacacagccagacaatgtctaaataaacgaataagaaatcaggccgggcgcggtggctcacgcctgtaatcccggccctttgggaggctaaggcgggcggatcatgaggttaggagatcgagaccatcctggctaacacaatgaaacccgtctctactaaagatacaaaccaattagccaggcgaggtggtgggcacctgtagtcccagctacttgggaggctgaggcaggagaatggcatgaacccatgaggcagagcttgaagtgagctgagaacacaccattacactccagtytgggcgacagagcgagactctgtctcaaaaaaaaaaaaaaaaaaaaaaaaaaaaaaaaatcaacggctgggcgcggtggctcacacctgtaatcccagcatcttgggagaccaaggtggggggatcacaaggtcaggagttcgagaccagcctggccaacatggtgaaaccctgcctctactaaaaatacaaaaattagcggggcacggtggtgggcacctgtaatcccagctacatgggaggctgaggcaggtgaattgcttgaacccgggaggtggaggttgcagtgagccaagatcgcgccattgcgctccagcctgggtgacagagccagacatggtctaaataaatgagtaagttagaaatcaaggatgaagggatatagtggacccggttcaaaccttttgcactgtgggtcctcgggcctcactgctcaccggcatggaccatcatctgggaatgggatgctaactggggcctctcggcaattttggtgactcttgcaaggtcatacctgggtgacgcatccaaactgagttcctccatcacagaaggtgtgaccccatccccgccccaggatcgggaggctgggtctcctccttccacctgctcactcctggtagccccgagggtcgtctaaggttcaaataggactaggacctgcagtctggggggamcctggcctgatggaggccctgacccaacggaggccctgaccctccctctacagctgcggcaccgctttggggacgtgttcagcctgcagctggcctggaygccggtggtcgtgctcaatgggctggcggccgtgcgtgaggctctggtgacctgcggcgargacaccgccgaccgcccgcctgcgcccatctaccaggtcctgggcatcgggccgcgytcccaaggcaagcggcggtgggggacagagactgcgtttccgtgggtcctgggtgggcggtgaccgtagcccaagctgggctgagwgggcgnggggttgtgggccagtgagtgggttggggacagcgagccaggaaaccacttccaytggggaggtgcgagtctgtgggcgggaggaagaggggcttgtgagtgggcggggcaactgccgagacccaccaggaaccgggtgggcggagctggcgcctttcccagctggaagcgggtgtctagaagccgggatggactctgctgtgggctcagtatgggcggggcgggacgggcgggatcttccctgagtggaaaggcagtcagggtcggaagagccaaggtggggccaagacccaagcaaggtgagtgagcaaagagcaggccctgtgcccagctggacagggccagggactgcgggagaccaggaaaagcacagggttggagtgggcggcggagggcggggccaaggcctccatgaccacgyccatgtgtccgtcccgcccccaggggtgtttctggcacactacggacacgcgtggcgcgagcagaggcgcttctccgtgtccaccttgcgcaacttgggcctgggcaagaagtccctggagcggtgggtgaccgaggaggccgcctgcctctgtgccgccttcgccgaccaagccagtgggtgatgggcagaggggcacaaagcgggaactgggaaggtggaggactgggaaggcgacccctgacccgcatctcccgcccccaggacgcccctttcaccccaacggcctcctgaacaaagcggcgagcaacgtgatcgcctccctcacctgcgggygccgcttcgagtacgacgaccctcgcttcmtcagkctactggacctagctcagaagggattgaaggaggarctgggctttctgbgagagatgtggagcgagggaccgcagggtctctgcagggcgagctcctgagaggtgccgggactgcagccggacctccaaggagcagggtttgcatagagtggtttgggaaaggacattccagaagagctcactgctagaggaagggccttgaggaggaggagacatctcagawacggtcgtgggagaggtgtgcccgggtcagggggcaccaagaaaggccaaggaccctgtgcctcctgtccacattggagattttgatttttaggtttctcctctggcagcccagggcaaggagagagggtggaggctggcacttggggagggacttggggaggtsagtggtggggacaggnaggccctgggtcttccctggaggcagctggggcctgagactggtccaggtgaacgcagagcacaggagggattgagaccccgttctgtgtcagctgtagatgctgaatgttgtccccctcctcctgcgcatcccagggctggctggcaaggtcctacgctcccaaaaggctttcctgacccagctggatgagctgctgaccgagcacagaatgatctgggacccagcctagccaccccgagacctgactgaggccttcctggcagagaaggagaaggtgagagtggctgacacggtagggaccaggggtggtgggttgagcgtccgggaggaatgaggcaggcaaaaggtgggtccattggatcacttggcaagtggcacctgggctgacaggtgcagaatgtggaggtcatttgggggctttcccgttctgtcccctgagtaccctctcagccctgctcaggccaaggggaaccctgagagcagcttcaatgatgagaacctgcgcatggtggtggctgacctgttctttgccgggatggtgaccacctcgatcacgctggcctggggcctcctgctcatgatcctacgcccggatgtgcagcgtgagcccagctggggcccagtgcagggggcaagggaggaagggtacaggtgggggcccctgagcttagctgggacacccrggactccaagcacaggcttggccaggttcctgtaagcctaacctcctccaacacaggaggcaggagagtgtcagggctggtcccctgggtgctgacccattgtggggacgcgtgtctgtccaggccgtgtccaacagatcgacaacgtgatagggcaggtgtggtgaccagagatgggtgaccaggctcrcatgccctrcaccactgccgtgattcaygaggtgcagcgctttggggacatcgtccccctgggtgtgacccatatgacatcccgtgacatcgaagtacagggcttccgcatccctaaggtaggcctggcaccctcctcaccccagctcagcaccagcccctggtgatagccccagcatggccactgccaggtgggcccagtctaggaaccctggccacccagtcctcaatgccaccacatcgactgtcccagcctgggtgtggggtgcagagtataggcagggctggcctgtccatccagagccccagtctagtggggaaggcagaccaggacctgccagaatgttggaggaccccaatacctgtagggagagggggtagcgtgggcgctcccaggaggtgtgactgcgccctgcyrtggggtcggagagggtgctctggagcttctcgggcacaggactagttgacagagtccagctgtgtgccaggcagtgtgtgtcccctgtgtgcttgggggtcccagcatcctagagtccagtccccactctcaccctgcatctcctgcccaggggatgatgctcttcaccaacctgtcatcggtgctgaaggatgaggccgtctggragaagcccttccgcttccaccccgaacacttcctggatgcccagggccactttgtgaagcyggaggccttcctgcctttctcagcaggtgcctgtggggagcccggctccctgtccccttccgtggagtcttgcaggggtatcacccgggagccaggctcactgacgcccctcccctccccacaggccgccgtgcatgcctcggggagcccctggcccgcatrgagctcttcctcttcttcacctccctgctgcagcacttcagcttctcggtgcccaccggacagccccggcccagccactctcgtgtcgtcggctttctggtgacgccatccccctatgagctttrwgctgtgccccgctagagttgctcctcagctgggaccctgttgtacaataaattagtctagtggctcccacttggtttctgtatccagtctgggcccctgccaaggtcctggttgtgttgggtcgtcagtcacctgcctgatgtcagtgctcacccctcacccctcacccctcacctcattcattcatttttttttttttttttttgagatggagcctactctgtcacccaggctggagtgcagtggtgcaatctcagctcactgcaacctccgcctccagagttcaagcgattctcgtgcctcagcttcctgagtagctgggattacaggcaccgggtaccacccccggctcatttttgtctttttagtagtgatgggtttcgccatgttggccagtctggtttcaaactcctgacttcacgtgaccaccagcctcagcctcccaaagtgctgggattacaggcgtgagccaccgagaccagcctcacctcattcactcttacctggacgcctgactttacttgagatacaggcatagtgattctcagcaggaaacagcctgcccccacgtcacgcccagagacccatcactggctgcctggcttggtgacaaagtccatgcgtaagtcttggctggggtggatatgaataggcatatgccaagaatcaacccattccctggctagggtgggagactgtgttgtgctcccccagaccaccctcaggttcagtgatttctagaaggtctcacagccctagaaaagctgttattctccctgttaacagtttattacagagaagggtacagattaaagtcagcaaagatgaaaggcacagggaccagagtccagaatgaccaggccaaggctgcagctctcttttctggtggactcctacaggcagtgcttaattctcccccaacagtaagtgaggcagcagagagccctgccagccacggaagctcacctgggccttggtgtccatggtttttgttgggagttggtcatcctaggcttgagcccccgcagcatggctgacctcagttactcagtctccagcccctcctgaagtcagatggatacaggcctgacggccccaccctcgatcacattgttggcataaactgtgttgtacggtccaaggccctagctatgtacaaagacactatttcaggcaggacattccaaggccttagcagatatctcccagcctcctgtcaagagtcagtttggactcttggtccagtggcttgcattgtgcaaggaatgacttccccactttttactacacaggccacccctcttggctctaacagcaaaatgatattagtttgagcatctgtgtgtgtgtgtgtgtgtgtgtgtgtgtgtgtkttttcttgagacagggtcttgctctgtcaccgaggctggagtgcagtgatgccatcagggctcactgcagccttgacttcctgggttcaagcaatcctcccatctcagcctccctagtagctgggactgcaggcacatgccaccatgctttgctaatttttgtattttttgtagagacggagtttcaccatgttggccaggctgctttcgaactccctatctcaggtcatctgactgcctcagccccccagagtgctgggattacaggtgtaagctactgtgcccagccaaatttccttcctaatttcttcattgaaccactggccattccggaccatattgtttaattttcacgtgtatgtatagtttccagaattcctcttgttgttgatttccacttttattctgttgtggtcagagaagatgcttgatattattttaacatttgtaatgttttaagacttgctttgtgacctaacatatggtgtatccttgagaatgatccatgtgctgaggagaagaatgtgtattctgcagactttagacgaagtgttctgtaagtatctagtaggtccatttcttttgtagtgcagattaagtctaatgttttcttattgggtttccatctgggacacccgtccaatgctgaatgtggggtgttgacgtctttagctgttattgcgttaacgtctctcttgggctccaataacatttgctttacgtgctccagtgttgtgtgcatatgtatttacaattgttatattctgttgctggatgaccttctttgtctcctcttacagtttttttggttgttgttgtttgtttgttttgttttggagacggagtctcgctctgtcacccaggctggagtgcagtggcgcgatcttggctcactgcaagcttcgcctcccaggttgacgccattctcctgcctcagcctcctgagtagctgggactacaggcgcccgccaccacgcctggctaattttttgtatttttagtagagacggggtttcaccatgttagccaggatagtctcaatctcctgacctcgtgatccgcccgtcttggcctcccaaagtgctgggattacaggcgtgagccaccacacccggcctcctcttacagtttttgttttaaaatctgttctgtctaagtattgctactcctgctcttttttgttttccattggcatggagtatctttttccatccctttattttcagtccatgtgtatctttacaggtgaagtgtgtttcttctagacaaaagagcattgagctttgctttttcatccattcagccactctgtgtctttgtattggagagtttagtccatttacattcaatgttattattgctaagcagggacttactcctgctattttgttatttcttttctcactgttttgtggtcttctcttttttttttttttttttttttttttttttccttgtcttccttttaatgaaggtgattttctctggtggtatgatttaatttcttgcttttttgtgtgtgtgtatccattgtgtgttttttcttcttttctttttgagacacagtctcacttattgtgtgctttttgatttgaggttgccgtgaggcttgcaaatattatcttataactcattattttaaacggatgacaacactgattgygtaaacaaacataaagcaaaaggaagactaataaaaactctacactttaagttcatcttagtgctttttaactttttgttgtttctctttttttgtttttgagataaagtcttgctctgttgcccaggctagagtgcagtggcacgatctcagctcactgtaacctccacttcccaggttcaaccgattctcctgcctcagcctcctgggtagcaggcgcccaccaccatgcccagctaaattttttgtatttttagtagagatggggtttcaccatgttggccaggcttgtctcgaactcctgccctcaggtgatccacccacctcagccttacaaagtgctgggattacctgcgtgagccaccgggtccggcctctttatgtcttactgtactgtctgtcttgaaaagtacttattatttttgattggttcatcatttagtctaattaaaataagagtagtttacacaccacaattacagtattataatactctgtttttctgtgtgcttactattaccagtgagttttgtacctttagatgatttcttcttgctcattaatatccttttttttttcagattgaaaaactccctttagcatttcttgtgggatataggtctggtgttgatgaaatctcgcagcttttgtttgtctgggaaggtctttatttctccttcctgttggaaggatatttttgccagatacgttattctaggctaaaagttttttttccttcagcactttaaatatgtcatgccactcccccctggcctgtaaggtttccactggaaaggtggctgccccatgtcatgtattggagctctactgcatgttatttgtttcttttctcttgctgcttttaggatcctttctttatccttgacctttcggagtttaattatcagatgccttgaggtcgtcttctttgggttaaatctgcttggtgttctataaacttcttgtacaaaaaatcagccaggcatggtggtgggcacctgtaatcccagctacttgggaggctgaggcaggagaatcgcttgaaccctggaggtggaggttgcagtgagccgagatcgcatcattgcactcccacctgggcgacagagcaaaactccgtctcaaaaaaaaaattatttgggctcggtggtgcctgtagtcccagctacttgggaggcaggaggtccacttgatgttgagattgcagtgagccatgatcctgccactgcactccggcccgggcaacagagtgagaccctgtctaaagaaaaaataaaaataaaaaagcaacatatcctaaataaaggatcctccataatgtttccaccagatttctaatcagaaacatggaggccaggaagcagtggagaatgacgaccctcaggcagccctggaggatgctgtcacaggctggggcaagggccttcaggctaccaactgggagctctgggaacagccctgttgcaaacaggaagycatggcccggccagagcccagaatgtgggctgagctgggatccaygtgacagctttgaggctcaccgggagcagcctctggacaggagaggtcccatccaggaaacctygggcatggctgggaagtggggtacttggtgccgggtctgtatgtgtgtgtgactggtgtgtgtgagagagaatgtgtgccctgagtgtcagtgtgagtctgtgtatgtgtgaatattgtctttgtgtgggtgattttctgcatgtgtaatcgtgtccctgcaagtgtgaacaagtggacaagtgtctgggagtggacaagagatctgtgcaccatcaggtgtgtgcatagcgtctgtgcatgtcaagagtgcaaggtgaagtgaagggaccaggcccatgatgccactcatcatcaggagctctaaggccccaggtaagtgccagtgacagataagggtgctgaaggtcactctggagtgggcaggtgggggtagggaaagggcaaggtcatgttctggaggaggggttgtgactacattagggtgtatgagcctagctgggaggtggatggccgggtccactgagaccctggttatcccagaagcctgtgtgggcttggggagcttggagtggggagagggggtgacttctccgaccaggcctttctaccaccctaccctgggtaagggcctggagcaggaagcagcggcaaggacctctggagcagcccatacctgccctggcctgactctgccactggcagcacagtcaacacagcaggttcactcacagcagagggcgaaggccatcatcagctccctttataagggaagggtcacgcgctcggtgtgccgagagtgtcctgcctggtcctctgtgcctggtggggtgggggtgccaggtgtgtccagaggagcccagttggtagtgaggcagccatggggctagaagcactggtgcccctggccatgatagtggccatcttcctgctcctggtggacctgatgcaccggcaccaacgctgggmtgcacgctacccgccaggtcccctgccactgcccgggctgggcaaccttgctgcatgtggacttccagaacacaccatactgcttcgaccaggtgagggaggaggtcctggagggcggcagaggtcctgaggatgccccaccaccagcaaacatgggtggtgggttaaaccacaggctggatcagaagccaggctgagaaggggaagcaggtttgggggacgtcctggggaaggacatttatacatggcatgaaggactggattttccaaaggccaaggaagagtagggcaagggcctggaggtggagctggacttggcagtgggcatgcaagcccattgggcaacatatgttatggagtacaaagtcccttctgctgacaccagaaggaaaggccttgggaatggaagatgagttagtcctgagtgccgtttaaatcacgaaatcgaggatgaagggggtgcagtgacccggttcaaaccttttg

SEQ ID NO: 96087 - DNA, 30691 bp, Homo sapiens
  misc_feature (1)...(30691): n = A,T,C or G
gtagctgggattataggcacatgccaccgtgcctggctaattttttgtatttttagtagagatggggtttcaccatcttggccaggatgttcttgaactcctggccttgtgatccacctgccttggcctcccaaagtgctgggattacaggcgtgagccactgcgcccggccaattcttttattattattttgttcattcaaataacatgtatcagacactgggttaggccagagcacatgcagggacgcaataggtagagaagctctgtggtcacggagcttgaaaatgaagccacttgtggtggttttttttttgttggttttttttttttttgagacggagtctcgctctgtcacccaggctggagtgtggtggcacgatctcggctcactgcaagctctgcctcccgggttcacgccattctcctgcctcagcctcctgagtagctgggactacaggctcccgccaccacgcccggctaattttttgtatttttggtagagacggggttttaccatgttagccaggatggtcttgatctcctgaccttgtgatctacctgttttggcctcccaaagtgctgggattagaggcgtgagccactgcgcccggcccgcttgtgtgtttttgtacctcaaaccttccatggagcaacatggagaattcataaagaggcctgatctctggttttaccaatgagtaaaccaaacgtgccaacacatcactgttgcaatcctgtgagcggaatactgtaacagtagcctggtaacccacacactgaccgcttcagctctggccccttgcccccagcctggccccgctgcagtttcccatctcagaggtgaaggctaaagcccacaggcgtcggctcctcccacttctgtcctccaggtcatcccacccattccaccccctgaagacctctggactctgaccagcgttactctccatggctaccagccttgctctgaccatctcttgctgcggccacacaataacctcyttcctggtcctgcctccgctccagccccttcccatttgctgtctacccaggtgatatgtccctgtgttattttcctatcctagccttctttttttttttttcttttgagacagtgcttcactcttgtcacccaggctggagtgcaatggcgcaatctcggctcactgcaacctctgcctcccaggctcaagtgattctgcctcagcctcctgagtagctggaattacaggcatgcgccaccatgcccagttaattttgtatttttagtagagacagggtttcaccaggttggccaggctggtctcgaactcctgacttctaacgtcatggcggggcacagcctggtggtcgtgattagggactctggggcctgggtcccaggtttgccacttactggctgtatgaccttgaatgacctacttaacctctgtttaccttagatgaggcaaaatgagacaattgggcaagtgagataacgatgatagctcctactgtatacagctgttctgaggatcaaacttaatgcatataaagcacctaagtagtacttgacatatagtaagtgctcatgaatgttagctgttaatataatcataaggccctctgatctggatgctgcttaggtctctaacctcttagcttaccagttgtcatctcccatgtaaatcagcccgaatattattatttatttcagagacagagtcttgctctgtcacccaggctggagggcagtggcatgatcaaagctcactgaagcctcaaattcctgggctcaagcaatcctcccaactaagcctcccaagtagctaggactacaggcaagtgccatcacacccagctaattattttatttttttagtagagacagtatctcactttgttacccaggctggtctcaaactgwccttaagcaatcctcctgcctcggcctcccaaaatgttgggattataggcatgagccactgtgcctggctccaaatacttttaattacctgagagtacaaactcgctctttctctcagtgcccaccctgctgccccccaactccagcaccaagtgctctgagttgaagctcggtttgaggcccagtttttcttctgcattgcatctccaacaactgtacacaacagtatgttgaatgaatgcacgaatgaatgagaacagcatcacatgtgggttctgttttgggctgttctcacgttgctataaagaaatacctgggcctggcgtggtggctcacgcctgtaatcccarcactttgggaggccgaggcaggcagatcacctgaggtcatgagtttgagacaagcctggtcaacatggtgaaaccccgtgtctactaaaactacaaaaattagccagtcgtggtggcatgtgcctatactctcagccactcaggaggctgaggcaggagaatcgcttgaactcaggaggcggaggttgcggtgagctgagatggcacctctgcactccaacctgggtgacacgcacaaaaaaaaaaagaaagaaaaaagaaatacctggctggtagtggtggctcatgcctgtaatcccagcactttgggaggccgaagctgaggatcacttgaggtcaagagtttcagaccagcctggccaacatggcaaaaccttgtctctactgaaagtaccaaaattatccaggtgtggtggtgcacgcctgtaatcccagctagtctggaggctgaggcagaagaatcgcttgaaatggggaggtggaggttgcagtgagccctgatagcgccactgcactccagcctgggcaacagagctggttaatttataaagaaaataggctggctgggcacggtggctcacgcctgtaatcccagcactttgggagcccaaggcgggtggatcatgaggtgaggagatcgaggccatcctgactaacacggtgaaacctcatctctactaaaaatacaaaaaactagctgggcgtggtagcgggtgcctgtagtcctagctacttgggaggctgaggcaggagaatggcatgaacccgggaggtggagcttgcagtgagccgagatcatgccactgcactccagcctgggcgacagagcaagaatccgtctcaaaaaaaaaaaaataggtttagttggctcatggttccacaggctttacagcaagcatggtactggcataggctcagcttccagggatgcctcgggaagcttcccatgatatcggaaatcaaaggaggagcaggcacatcacatggggaaaagaggagcaagagagagagtgggaggagggaggtgctacacactttttttttcaagatggagttttgctcttgttgccgaagctggagtacaatagcgcgatctctgctcaccagaaccgccacctcctgggttcaagcgattcttctgcctcagccttcctgagtagctgggattacaggcatgcgccaccacgcccggctaattttgtatttagtagagacggggtttctccatgttggtcaggctggtcttgaactcctgacctcaggtgatccgcccaccttggcctcccaaagtgctgggattacaggcatgagccacacgcctggccaccacacactttttttttttgagacggagtctcactttgtcgccaggctggagtgcagtggtgtgatctcagctcactgcaacctctgcctcccgggttcaagtgattcttctgcctcagcctcccaagtagctgggaccacaggcgcgtgccaccacgcccggctacttttttttttttttttttttttttgtatttttagtagagacagagtttcaccgtgttagccaggatagtctcaatctcctgaccttgtgatccacccacctcggcctcccaaagtgatgggattacaggtgtgaaccaccacgcctggccccgccacatacttttaaatgaccagatattggctagtcacggkggctcatgcctgtaatctcagcactttgagaggccaagatgggggggatcacctgaggtcaggagttcgaaaccagcctggccaacatggtgaaatcttatctaaaaatacaaaagttagctaagtgtggtggtgggcacctgtaattccagctatttgggaagctgaggcaggagaatcgcttgaacccaggaggtggaggttgcattgagctgagatcatgccactgcactccagtctgggcgacagagcaagattccgtctcaaaagaaaaaaaaaagaaaaggcctgaaccgaagcaatagcagtgggagtggaatgaagaggaaacatttgagaggaagaattaatggtaatccctaaacacctttactcaatgcttcctaggaatgtgttaggggattgtgggaataaagagctgaagtagcatttgctgctgtcctcaagtacctcaaatcctatagaagcacacctaaaaataaaatcatagatgcagggaaggccacatttagcatcactgcagccagtgtcactgagagatcactatgcttgtgaaatcagcaaattaaggcaccatacatttccaagtgcctctgtcatttaccccaagtatcttttgtaagtacctaaattgttattttggttaaaacacactacaagcccgggcgcggtggctcacacctgtaatcccagcactttggaaggctgaggtgggcagatcatgaggtcaggagatcgagaccatcctggctaacacggtgaaacctcgtctctactaaaaaaaaatacgaaaaattagccaggcgtgatggtgggcgcctgtagtctcagctactcgggaggctaaggcaggagaatggcgtgaacccgagaggcggagcttgcagtgagccaagatcgcgccactgcactccagcctgggcgacagagcgatcctccgtctcaaacaaacaaacaaacaaaaaaacccactacagtatacatctacaccccaccaatttttagaggcagggtagtgaggttcagactgggcccacctctaccacttgtcaacacgtgatcttgggtaagctaccaaattctcttagcccatgctatcacgtgaagatgaatgagactggaatgtcagcgagacagagcatgatggggctataggaggggggtatggtcagatcttgcagggccgtgtgaactaccataaaggttttggacttttcttctttctttcttcttttctttcttctttcccttttctttcttctttcttcttcttcttctccttcttctttcttcttcttccgcctctccttcttcttctttttcgtttagacatgaggtgtcactgtcacccatgctagagtgcagcatgcaacctcaaactgcaacctcaaactcctggactcaagcgatgctgctgtctcaggcttctgagtaggtgggactacgggtgtacaccaccacgcccggcttggatctagtattctaagttcaatgggttgtgttttttgttccaatttattataacttttcaattggaacataatgtctacaaataaatgcaaaaatcttgccgagttcaattagtttggacaattatatacgtcaatgttataccaccgaaaacaaaatacagaacatttccatcatctcagaacagtcccaagtgcccctttcctgccaattctccttgtctccggaacacttaagggtgctaagcatgttatgtttgcggtgggttttttttttaacttagatgtggtaatatatgtttgcgtttccaaaggatcactctggctgccgagcagaggacagcaatgcgggtaaagcacaggccaggcgagggataatcaggcgggattgcacggaggtcgcctagcaacagaaagcgctgtcgggggcgggggaaccgctctgctcctgtgaaaggaggaggccccgccctctcctcgccctctctctgccccacgctgtgcgcgagcacacaggcagccccgccccgcctcggcggggtgggggtggacagaggtttcttattggtgagttttccggaagcgatggattcggaatctcgcccgcagtcgcgcaagcgcgagcggctgtgcgcggtgcgyggtgcgtggtgcgtgatacgagcggcggcacgtggcgcgggtgcggggcgtggagtggcgtggcgtggagtggcgtggcgtggcggggtctcgcggcgcgggcgcgcacccggagctgtggacggagagtgcctccctctggcctcagtttcctcatgttgtagtagcggagcatggcccggaccgggcccccgagaccgccccgtgcaacctcaccgccagcctgggggcctcagcgactgggacgggaccaaggggctcggggattctccctgcccccggccctggtgcgtgactgaccctcctgttcccagagcccccagcgcaggccgggatgttcgtcctggtggaaatggtggacaccgtccggatccccccttggcagtttgagaggaagctcaacgactccattgccgaggagctgaacaagaagttggccaacaaggtactgggcccacggctcgcgggcaggccttggcgtgggagagcgagcgccgcccactggccgcaggcccggcctcggtcatgccaagccctggccgtgggcaagcagcttaatgtctcagaacttttcttcaccgtgaaaggagatattgaaggggatcaaaagaaaatgggcttgaaaaagggagttgtaactggaagtgttagattccacaattctaaattactttgcaattgcaggcaagttactgaccccytctgggcctcagtttccatttttaaaatggggataaaatattgctgtccttccagccatgcattgtttttgttgttgttgttgtttgttttgttttgttttgttttttgtttttgagacggagtcttgctctttcgtccaggctggagtgcagtggcgcgatctcggctcactgcaacctccgcctcccgggttcaagcgattctcctgccccagcctcccgagtagctgggacaactacaggcgcgcgccaccacccccagctaatttttgtatttttcgtagagacggggtttcaccattttggccaggatggtctcgatctcttgatccccccgcctcggcctcccaaagtgctgggattacaggtgtgcgccatcgcctcgggtcaatgcattgttttcgtgaagatggagagttctagtagtacagaattaactgtcaggaggttcatcccttcattccagcagccaatatttgtgcgccttctctgtgctgtgcctgtgtgccttagtaccagctgagaggtcttcccactgccgtttctttgacagtcctccctttccaggtattctgtgtcacatcactctctttccttcttagactttttcctttccctctccttgagagcagggaccttatctgccttcttccctgaagtatcccctcatttagccaaagcctggcgggagtagatgtcccataattttctgttttgtgtttgtgtgtgtgagacaagagtgccgctcttgtcgcccaggctggggtgcaatgaagcgatcttggctcactgcaacctccacctcccaggttcaagctattcttctgcttcagcctcctgagtagctgggattacaggcacctgccaccacacctggctaatttttgtacttttagtagagacggggtttcaccatgttggccaggctggtctcaaacttctgacctcaggtgatctgcctgcctcagcctcccaaagtgctggaattacaggtgtgagccaccgtgcccggccatttgttgactgaatgaatgaaacagagacaaggctctgtgctatagtgtggtgggaaagcagatatgaatgagaagggtccacagttgagtgtttggtgacaaattgaggtaaatgttatgagggacaggtgttcacacacctgtggaacaaaggaacgtcccctggaatgaggggacctgcagctttgttgaggaggtggggttgaaggtgagatctgatggtgaagtggagccaaccagaggattcctttctagggtgggagggggctgggtggagagaagagccctgaaggcaggaactggcatgtgcaaaggccctgtgaagaaggaatacaggccgggcgtgggggctcacacctgtaatcccaccactttgggaggctgaggcgggtggatcacccaaggtcaggagtttgagaccagcctgtccaacatggtgaagccccatgtctactaaaaatacaaaaaatagctgggcatggtggcaggcacctgtaatcccggctacttgggaggcagagggagaagaatcacttgaacccaggaggcagaggttgcagtgagctgaaatcgcaccactgccttccagcctgggtgacaagagtgaaacttcgcttcaaaaaaaaaagaagaaggggtaaaatacccaccatggtgtggaagaggctggtgtggcttgggcagaggggagggtgggctggacaggtgggtgggggccaggccacacagccctgtaggatgtcggagttgaggtattggtctttatccgtggagcatcagaaggtgatgggctgagaaggagccagaaagaggatgcttagctggctttacgcatgagacaggtcccttcagaagaggtgaggttgatttgggggttgctagatagtgaagggaactcatggagtctttaagtggatggcttctggttactttgtgaggttgaagatgagggtctgttgggggatggaggtgtggaccttgagagagaaggtgtggaaagtccaagaagggaatatagtccctttggggtagaggtcctgttgggacaagtcttctagtatttgattagatgaatcgtttgagagggggcccacacagaaatccatggtctgacaaagggcacagatcttgtggcattatcttggtgaggtctggccacgactctgagttctctgagcttcttgctaattcttggacagttcttgcaagggttctaagtgggggtgatgacacggtggcagataaggagacactgagtagccagtcgtttgaaccacagtggtgtggggtgagggcatgggatttctgcacattcttggggcctaggtcttgtgtccctctgccagctgcagtccctgtggctgcgtctgtgtgtctgagatgttgtgagcacagtggggtttagctgtggctgtgacgctcactaaactgtgagctctggcattggctttgggatgtcggagagtgcacgtttaggcagcattcctgtcactggtcctcactagtaataacaaagatccttgatgatgatggtttccaatacacgagccaggtacaaggctaggggcttcacatctgttatctctctttattttataactctgcagcctggtatttcacatttgcagatggggagaccgaggctcagagaggtgaagtgaccctcttggcagtcacacagtgggtggtggagctggccttggaacctggacctgttttgtcacccgaggccctgctccttccagagctctgcatccttctgaggttccttaccctggtcccctccacaaactcattttcacctaaaaaaggagataatcatggcttgcttgtggttgtgaggggctcagattgcctgggagctgggcctgtggtcactctgtatccatgtgtacttgtgtgtctgtgtttgtatgcatgcaggtcgtgtacaacgtgggactctgcatttgtctgtttgatatcaccaaactggaggatgcctatgtattccctggggatggcgcatcacacaccaaaggtgggtatcttctgtccctggggcattgggcttcttggggctcagttttctgtagccaaaggtcaagccaaatccaggttcagtggtgcgtgcctgtaaggctgagggcggaaggatctcttgagccacagagttcaaggccagcctgggcaacatagcaagaccctgtctttaaatacataaataaaatatgaaaaaattttaaaaggctaaagtcaaagagatggccagagggtggtgggagtcctggaggctgggagacgtggggcctcatcctgaatcggccaggaattgacccggtgacagcggcagacttctcttctctgggcctctgttccctcatctgtgaggcctgggatgtggactagttggttttcaaggcctcttcagctctgacttcatagctctgtgtctgtgcccttttggtctcattgctactgagccctgcaccttgtccattcctcgggcttcccgctgcctgtggagagcagacggaagggggatcagcaggctggctgggggtgggggacttggatagtaggacacagtaggtaagagtgtggcctcaagattaaaagctgagctctgcttcttactagctgtgtgtcctggctgaatatgtcattgctctgtgcctctgcttccttatctgtcagttgcagttcaggatgtcaactgcagttyaggatagattttatattctaagaccattgtgaggattaaggagttaatacatgaaagctcttaggacagagccttggcacctaacgagcactcagtgacttatcagygtggattgtttctccctattctgtcggtcagttgggtggttttcctctcatctggctggcctggggctggacaatctaggacggtctcacattctgaaggttggcagactggttggttactgggggcctgggctgggctggcccatctctgccccacatggtctcatctttcagtaggccaggctgggcttggcggttttaaggttccaaagttcagtgcgtaagtacttctcaagcctctgcttccatcccgttggctagggtgaggggatggagaaatagacttcacctctgggtgggagaaactgcagtcacattgcaaaagggtgtgcatccaggaatggaaggtgatcaccagatcctggaaggagggaggagtagagagaggaccaccctgagaggagccaggaccaccagtcaagggaggtgatgagccccaggagaggggcattcttcattctcatgtctggaccaaaccagtgtataggagatggtgagaggcccattgagacggttcaggctcccagagcgcaggcgccaagcctgccaycccttgggcactcagagcgcaattctcagcctgccccaggcctccctccgcctgagtcagaatcttgggggatgggyccaaatacttttttttttttttaagacagagtcttgctctgttgcccaggttggagtgcagaagtgtgatcttggctcactgcaacctccacctcccagcatcaagcaattctcctgcctcagcctcccgagtagctgggattataggcacgtgccaccacgcctggctaatttttgtatttttagtagagggggtttcaccatgttggtcagaatggtctygaacgcctgacctcgtgatccgcccacctcggcctcccaaagtgctgggattacaggcgtgagccactgcccccagccccaaagactgttttaacaaggtaccaggtggttgtcacacgagctcatgttggataagccctgctgtagtccatactggtcagcctctcagcacagagatgccagaacattccagagtatgctgtgagactgcctagtgtctgtgtccagccattcagggaattaattagttcgcatggatgttaccatggtacgccgagaggccgaagaaacaggctgtctttgtacagactaggagcattttcattagcagagaaataagattgcagtgtgaaaacaaccacgagggcctctgtttacagagaaggatgccgagctgagcccagtctccgcatttggacaggggccttggttgtccaggagacaagtggtaataggtactagaacttccagaaaaacttggagaaaaaagtcaagttgcggccgggtgtggtggctcacgcttgtaatcccagaactttgggaggtaaaggcgggtgcatcacctgaggtcaggagttctagaccagcctggccaacatggcaaaacctcatctctactaaaactacaaaaaaagccaggcacgatggctcacttctgtaatcccagcactttgggaggccgaggcgggcagatcatgaggtcaggagatctcctggctaacacggtgaaaccctgtctctactaaaaatacaaaacattagccaggtgtggcggcaggcacctgtagtcccagctactcaggaggctgaggcaggagaatggagtgaacccaggaggcggagcttgcagtgaaccragatcgcaccactgcactccagcctgggcaacagagtgaaactccgtctcaaaaaaaaaaaaaaaaaaattatttgggtgtggtggcacatgtctgtaatcccagctactccggaggctgaggcaggagaatcgcttgaacccaggaggcagaggttgcagtgagctgagattgtgccactgcactccaccctaggcgacagggtgagactgtatctcaaaaaaaaaaaaaaaaaattagccaggtctggtggtgtacacacctgtaatctcagctccctgggaggtggaggtggaggcaggagaatcgcttgaacccaggaggccaagaacacgccgctgcactccagctgggtgacagagagagaccccgtctcaaaaaaaaaaagttggaggaaattctgtctattcaattggaagatttctactgctggcttttattagcccccaccctcatctgtcctgagtctctgttttcttgggaaccaggtgggaggcatggagtgatcacaaggacctagatttgaattaattctggctctggtctcctggatggggaccttgggcgggtacctctgcttctctcggccttggtttcctcctctgtacaatggggttaaccctgcagctataaaagtcctgttgagcaccatgcagggtgaactgtgattttgtggtgggaaccaattgccatgctttgaggctgatgcctgaccccaggccctgttcccactgctccctctcctgcaaccccacagcctcactcagggctgtcactgagccagtgctgaagggctcagcaccaggtcatgctgtgccttcacctttgctcagaggaatatttatttgcctgggccttgggagcagttgcttgacctctctgaaactcggtttccctatctgtgcacacagtataataacagtaatagagccttcctccttcatcaaatatctgtgaggagtcaacgagcaagtctgagtgaagctgtggtctagcgccccgcacgtggggagtgctcacagatgatggcctttgtggcatgggaccctgacccccactggccaagtttatccctcgacatttggtgccagcccgtgttccccacatcctccaagcctgggacctgctgtaccctgcccccgcctgccccatactgatcgggggccctgctctcagtctagagcagcgctcctttgtgaccacctttagttatttattttttaacatttttaaatgttatattgatttgcaaatcgggcagcctcctcagctagagttggtgcagagacaccccccacctttttttttttaaagcctttttttttttttttttttgagacagagtcttctctgtcacccaggctggagtgcagtggcaccatcttggctcactgcaacctctctgcctcccgggttgaagccattctcctgtctcagcttcccgagtagctgagattacaggtgcccaccaccacgcctggctaatttttgtatttttagtagaaatggggttttgccatgttggccagaatagtcttgaactcctgacctcaggcgatccgcccgccttggcctcccaaagtgctgggattataggcatgagccactgcgcctggccttttttttttttttaaaccttttttgacatgtttatcatttatttcatttttttctattgtggtaaaatatacataacatgaaatttaccaatttaaacattttaagtgtgtaagtcagtggcattaggcacattcatattcttatgcaaccttcaccgccatccacctccagaactttcattttttttaagatggagtctcgctctgtcgcccaggctggagtgcagtggcgtgatctcggctcactgcaagctccgccgcccrggttcacgccattctcctgcctcagcctcccgagtagctgggactacaggtgcccgccaccacgcccggctaatttttttttgtatctttagttgagacggggtttcatcatgttagccaggatggtctcgatctcctgacctcgtgatccgcccgccttgggctcccaaagtkctgggattacaggcgtgagccaccgcgcccggcccacctccagaactttttcacggggcagatatggtggctcatgcctgtagtcccagcactttgggagtctgaggcgggcggatcacgaggtcaggagttcgagaccagcctgggcaacatgctaaaaccctgtctctaaaaaatgcaagagttttactctgtcgcccacgctgcagtgcagtggtgcagtctcggctcactgcaacctctgcctcccgggttcaagcaattctgcctcagcctcccgagtagctgggattacaggcatgcaccaccatgctcggctaattttgtatttttagtagagatggggtttctccatgttgatcaggcttgtcctgaactcccgacctcaggggatcatcctgccttggcctcccaaagtgctgggattacaggcgtgagccacagcgcccggcctgctcagctaataatttttgtatttttagtagagactgggttttgccatgttggccaggctggtctcaaactcctggcttcaagtgatccgcccgcctcggcctcccaaagttctgggattacaggcgtgagccactgcgcccagcttccttcctcttcttgatggtcctttagactcatcctttctgactttccaggcatcccctctgcaggctacacatccctagacctccaggtggggctcttgtgagatgaactgcagatccagcactctcctggctgaccagcctgttgctctgtgtccttctgttttttcactgagatataattcacataccacaaaattcaccctttcaaagcatacaatttagtggctttgtatattaagagttgtgcaaccatcaccactatcttttttttttaattacattatcaccattttgcaactccttatgaagacagatctcatcaatgatcattaactttttagcttcccccaaagagagacaaacaagcattatatagttcctggtggaagaactcaacaccgattatgaggcagttctgttgctaaacgctaggagttgaatctgttaaaaattctagatgcaagttccagtttggaggaactataggaatggaggaatacagtgactggcaccacaggcctccaggggttatggtaagtaggcagatatgagcagggcaggagagggccccctcccaccaggaacaacaccctcatcagctaagccatcaccactatctaattccacaatttttttttttttttttttttgacagagtttcactcttgttgcccaggctggagtgcaatggcgcagtctcagctcactgtaacctctgcctcctggtttcaagcaattctcatgcctcagcctcccaagtagctgggattataggcacccaataccacgcctggctaatttttgtatttttttagtagagacggggtttcactatgtcggccaggatggtcttgaactgctgacctcaggtgatccgcccgcctcgacctcccaaagtgctgggattacagacttgagccaccgtgcgcggggccattccacagcgtttttatcaccctacaaagaaaccccgcccagtagcagtcactgctaatcctgtccttcacccagcctctggcagccayttaactgctttctgtctctatggatgtggttctggacactgtacatgaatggagtcgcacactgtgtggcttttgtgtctggctgctttcacttggccccatgtgaaggttcagcccgaggttgagccacactgtagtgcatgtcagaattccttcctttgtaaggctgcataatattccattgtgtgtctccagcatgttttgtttactcatccatccatgggggactccgggtgcccagcatttgcttttggatgtggttgttccagcctggggctccctgggcgcaggatcatgtgctgtcccacccccgtgagcccagtgcccagactgggcctggcacaaacctggtgcaggctctgtgaagttttttttttttttgagacggagtcttgctctgttgcccaggctggagcgcagtggcatgatcttggcgtactgcaacctccacctcctggttcaagtgattctcctgcctcagcctcctgagtggctgggatcataggcacctggtaccacacccggctaatttttgtattttggtagagacggtgttttatcatgttggccaggctggtctcaaactcctgacctcaggtgatctgcccacctcggcctcccaaagtgccgagattacagacttgagccaccccgcccggcctctgtgaggatttattaaaccaaactgaatgttgggccatgtgggggacagggtttttccatctgtgcgtaagtggcccttggccgccctcatctgctctctgggaggtcagcacaaggcccagtcatcttcatggtggctgtgatggctcacgtttgtgtcttcccagggtgagaggtccatcggctgcctctcctcatgccctgctgatgccagggtccctgccgtcctggggggcatgttggccgactaaatggttgacggcatcgtggaagcctgtgtttgggattaaacctgtctgaggaaggcaagattcgacccggtggccctgtctggtgggtacagaaagaccaggtgtctccccatggctatgtggctgtgagtgggtcaccctggctctgagccactgccttatcctcacggtgggaactctgttggtaaccagcagggggcagccgcgtgctgattctcaggtcagcgttggactcctactttggggcttcgagcaagggcctgagtgacaaggtgacatacagctaatgccagggcctggggtcagagtgtgcgatgtgggcacagaccccacctggtgttttccttgcagtcaggtgagtggggaccacctgcagcatggcctgagaacccacagaggcatttttgctgggctgctggcctgcgcctcacamcaccagggcatttttagcctcctctccaggtcagagctgtgcctggggccgactttgctgctcagcaggaggtgggagtttccaaaccctgcgttctttaccagttgcttctgccctttttaggagctgaaggagagcctggagggaggttgaaattgactttggagccactgatggctcagaatctgggctcaggtgtgagtaacctggcagttttgggagtgcccagttacaggacagctgctgctgcccccctgtgggggccatgctgtgaacttgcaggagacaaagggagggtctaggcttgcagggggatgtggcatggagcagccacacaggcccccaggtgtgctggcacctgagggtgacatgggagcgcactggggccccggtcagcatcactgatgggctgtcttcatttccagtccattttcgctgcgtggtgtttcatccattcctagatgagattctcattgggaagatcaaaggctgcagcccagaaggagtgcacggtaacagtggccctgacgcctcagacaagacttgggaacactgtgggggcaggaggtctgtgtccacccacatggtcaggggagggctcaggtgtcgaggccgaaccttccccgtggtgtcagagaagcttgcccaccctcccttttatgtgttgtgtgaggacctccatcagcagtgcggtttcactgtgaggccgtcactcaggacttcagggtgggcactgaagctggcggaagtgactgggagtctttagcgcccactggcccctgttgtgtgcagaggttttggggactaggtgctccgggctttgcccagggctgctccgctatgtgggtggtgtacgcagaggcattaggtggggaaggggcctaggtttccacagcgacatccgcctcgtgggcagccccaggcagggcttgcctgtcaagcataagaccccgcagtgtttggcgtccactgggacccccatctcaggccgtcacctgcttccttccttccagtctctctaggcttcttcgatgacattctcatccccccagagtcactgcagcagccagccaagttgtatcctccaagggttaaagtggtttgtcacagggagctcaggcctctccaaaggaaggtccccactccttagggtggcctttggggcctgtaacctgatgtcactggcctctgtgcctgcccctcgcctgtgcttttgctccagaggcaccagcctgtctgtgcctcccatgcagggagtcatgtgatgcccacatgcctgtctttgtcggggccatcaggcttggctgtctgggttgtacactgcacaccattagagctgtggtgtcctgggggayaccattcacttccgrttcacttcacttaggttgtccctgcaggaatcatcttaaagatcacttgccctggaggcatgcactggtccctgggacgtgaggccttgcctgtgtgccgggtcrtgggctaagatgtgttcctcctgggcctccgttgtccctgtcccacccctcaccttgctgtactggggttgtctgtttctgtggggctatccacaaatctgaggctcctcactgggaaggactctgacatgtcacagctgtacccacggtgcacagcacgggacctggcacagaggcaggacccaacagtgggactgccaccagagaacccatggctcccctgtgtgggctctgccagggacgatggagagccaagggggactgccctggctgggtggcagcacggctctgggtctgcatgtgactccaggatgtgttagaaaacctggcgcagcccggctggttctctcaccacctgtcatccaagtgggcaggtgacctcccatcccactatgtcctcttgaaaacggcaagtccttgggtgcccatcagcctgtcacaaggctttgatgaaaagggtgtgtggggctccgtggcaggaggcccaggttgctcttgtcttgagaggtgggactcggaccctgtctcgtcccctcctgctctggtgctctgagatccatgtgcgtctggccgtggtgcctggctggggaccccatgttccccttcctgggtcctggcctccaagagygcttgttcctctctgtttggcccaggccttgtgcatggggctgggacctgcttttcctgtgacttcccagccacagtgatctcaccctgagattggttttycctgcggggtcggggagtgggtgctgagggaagcccctcccactatstggttgctgccttgaccctggaccccctcagcgacgaagcggagcaggtgtgggtgtgggagtacgagacggaggaaggagcacacgacctctacatggacaccggcgaggagatccgcttccgggtggtggacgagagctttgttgacacgtcccccacagggccyagctcagcagatgccaccacttccagtgaggagctgccaaagaaggaggctccgtacacgcttgtggtgagtggctytgatggtgctgaagcccccatgaggcgggagagccggagtgcagggctggaagctgtgtcctggggcttctgctctgggatctcccccagcaggtcagggatcctgtttggggggtcttggctggtcacttctccctggagagcctgagtttctgtaggccagggctgtgaggcagtaaaggtacatggctgctggtggggtgggcgagtcagcttgcaaaggggacagagctcacggtggacaagaccactgataaagcggctttgaggccaagtgcagtggctcacatctataatcccagcactttgggaggccaaagtgggaggatcgtgtgaggccaggagtttgagaccagcctggctaaaaaagtgagaagttgtctctataaaaaacaattagcagggcatggtggcgtgccctgtggtcccagctacttgggaggctgagatgggagtatcccttaagcccaggagttcaaggttgtgccactgcattacagcttgggcaacacaatgaaatgctatctttaaaaaattggggggtagggaggggtttgagggagaaagaaatcaaggaaggggcttgggagagatcaaagccctgagattaagggtagggctgctggggcacagtggctcacgcctgtaatcccagcactttgggaggccaaggtgggcggatcacgaggtcaggagattgagacyatcctggctaacacggtgaaaccccatctctactaaaaatacaaaaaattagccgggtgtggtggcgggcgcctgtagtcccagctacttgggaggctgaggcaggagaatggtgtgaacccgggaggtggaggttgcagtgagccaagatcgtgccactccactccagcccgggtgacagtgcgagactgtctcaaaaaaaaaaaacaacaaaaaaaaggtagggctccctgtaggagcagcattgcagcagtgaaataaaagggagggctccggggaagagtggctttcaaggctgctccctgttggatgcgtctggagcatgggccttgtgtttgctcagccttcctgccacgattagaacctaggtggccctggagggcaggcctaagggtgaggaagggtccctgaccctatcagggcctggagtccctggagargggtctgcgccctgcgtgctgcgtgcccgttgggagcactgctgtggctcccacatctctccagagcctcttggctgccgtgtgccccgcctcttctttgcctgtgctgggcctgctgggctcccttcacctcctgtccaggttggttcaagccagcatgtcagtgaaatgtgcgtgttctttatccctggcagggatccatcagtgagccaggcctgggccttctctcctggtggaccagcaactagccctggggctggacagtggaycctaccagcctgcgggaaggtggtatggccggctgtgaagacaacagcagctgaggccgatgctaaggagatagtgtctcgagctggacagtgaggcaaggccaggagtgcccaccagcttgccccgctcctccaccatctaggccctgctcctccttcactgcagtgatggatccatctgtggctgtggctgttgggcctccactgaccttgactgaaaagacccttcctggaccctggacttgacaacaaacggcacagacaccaatcactcacagaacagtcactggttttggattcttgttttccttgcaagaacaaaaggttctctaraatccttcagccaccaatgaaatgatcaggcaggaraaaaactttagatgggagtcttgtcatcaaaaataaatacagttgcatggagctgcttaagatctgaaccaaactcaaaataggaagacgggggctaaaaagttattttaagaacccccccaccacaaccacagtcactccgtgggctaagcggggagcaggaagcatgtctggtcacaccatcttggaataggaagccatggctggacggatcrgatccactgatggcacacgtggagctgaacttgacgccagcggcggggcggggaggcactgccctcactgttgcagttccttcattctgttgagggcactgccagmgcggaaccactcaatctgcgtctcgttgaaggtgtggttcaggaggatggtctcctgggtcccgttggggtgcttgatgatgcacttcaggggctgcaaggagaaggtgggtgtgggtggaagtggtgggtactgtgtgcccttggccccrcaggggggtcagggagacagggcactgcctggggacctaagaggtcagcaggcaaaccaaatcctaggccagtctgtgcctgatggcccaggtcagacccaggtggcacctacaggggattcctggggcccagagggtcctgcagtgggtgggctgtcccctgagtgccaggtcctggtgagtaaagggaggytggggaggtgtgagggccccgggttgactccaacccccaactctgagaagccactttgctttctctgtggggccacctggagaactgggggcctttccagctggaatgaagcctcctgggagaagctaccctggggccagtgcaggaggggaaacaaggtggctgcccctcaccccaccacctcagggggacccgggcccctaaccttgccaggggtgaagtccttcaggccctgaatggtcagcttgtccacagggtgaatcttgttgtagtcagccgggtcagcgaaggtcagaggcarcaggccctgtttcttcaggttggtctctggaaagcaggcggcattcggtcatcgggggcctgactagcctggagagcttcattttctgaacccatctggggctctgggagatgcccctaatcctgctgcctgggacaatgcccgggcagtgactatggggccctggtctgctccctttcactaggggtgcccctagcaagtgtgcgctggtgctgaggtctgcgaggccttcctgctgcacattcatgatcagaaagaaccccctggcacatgtcctagntctcagyggctcagatctacaagcctggaagcagggcctgcgggaagccgggaagctgagcgtcggatgtgcactgtgtgagcctaagaaggggcaagaggctgacrggcctgtgggctgcagtggacacagcctagaaccaggcccaactcagccacgggcagggagagtgaccttgatcactagggatgggatgaggatggcctgggtacagactccagctcaccgtggatcctggcaaagctcttggtgatgatggcccggcccccaaggtggcgaggctccagagctgcatgctcccggctcgagccctcgccgtagttctcgtctccgatcaccacccacctgawgccatgtttctgtcaggcaagcgggggtaaggttataaggcagaggagggcaccgtcctcacctgtctggccctacctgcctggcctcacccacctggcgcctgggcatcctgaggctcccggtaaaggggctggaggggcccttcctcgcctgctgcctaagggcaagtgaagcctgcgtgaatgagacccaaacgaggccccgaggggacagaggcacgtggttgtttgcagtggcaaagaagacagaagccacccattggtgcttggcagaggcaggtgtgtgtggagggaggttgggtgagacagggacggcctccgggccccacacaagatgcatctgtgaagctcaaggcgcccccttcctgggagcaccctctgccccacccagccaccagggggtgccagagtcctttcacccggctgggccaggacttgggttcagccctggttctgtttgtttctcaaagcagaaaaagtccaatcacctcagaccctctctgcctgctcactgtgaggccccgtgtagccccctctctgagcttttggcctctgacttcctgagtcggcccccttccttgtctttgtctagggccagatatcctaagatatctctcactaactcctcctggtgcagggacccggctgtaccaccggacctgggcctcatgccttctcagccacagggaggggctgcaggcctctcctcccttccacagcagtcccctttgggcttggtcggcctccttcccagtttccactcccctaatgtcctccctgcacctgccttgcaggccccttcaggagtgaccactggcattgcccctatcaactctgacccaccttgtagtagcgggcagtgtcagggacggggccaaactcctgagtgacggcattgcgcacggagttggccttgccgttttcaatgttgatggcaccaatgagcaggttgttggagatgttatccaagtgcccacggaacttgagccaggggccagcagctgagatgtggtcagtggtacacttccctttgaccttgggtggtaagtagagaggacagaggtcagggcatggccctggaggggtggatgacaagccctccagaggcaggcagcaggccccggggcccaggaggggtgacagaggggtgagaggcaggcaagtcttcagacacgtgttctgtggtcctggtgcttccaccctaaggccacatgggctcaggccaggccttcatcccctcaaaggcctctggctgctcagtctcccttatggggcagaggccgcccaaagttgggacaggtcaatgttcgctcacccttcaggcctcagctgcaagatcagccacagacctcatgctggacacaggagcccaggacatgcctgggtcctggctgatgactgattagtctcttctgtcacaggggtgcctggagaccccttaataagcagcataaataaatatctgacacagattggaggcctctggccacaccaaaaaggcttgtttttggtcggtgccaaacacaagccatcccatatccacgggtgcccaactgtgggggcaggagttgtccatggcttccagagcctgtgtggacgtgccaggtgtggagcctgctgtgcaatcacacacactgtcccagcccagcctgagctgtactcacctgcccacacccactggaggtggctctgatcagctgctgctggatggctgagggccccagacggaggctggccagatctagctctgcccagttcggggccacagagaagggggacgctggactgcgttgcgataccctctctgctctgcagccaaacctcccttccatctcccacctgcgtcttgactgtgctcacttcctccaggttcatggcccttcccgatgctcaggggacggggggccctggcagggtggggctgtcctgccgtccccatgctgctgaccttgatgaggatctgcaggtcctccaggtccttgccatcccacttgtcaaaaggctccaggagctgcaggcgctggctggtggggctcacgtccacatgctgcccgctgctgtccttgggtgggtgctggtaggtgtcctgccctgggtcaaactcctgcagcagggaatggggatgcgtggggtgctgagtcctcagttcccacaaggacagactctcagaaggcaagtttcctcgggccccacctcccctcccagggaacagagctgcttccttctcactagcagcgccctccctgcctgcacaggaggtgctgtgaggttgagaaggaagtgacgtggccacacagcaaccagcaagcagggggcgtgggcgctcacccctttgggaagctcatctgcatccggagcctccagcctgaacttcttgccatccgtgcccgtcaggtagtcggtctctgggttgaacttgagggttcccgcaatggccagggctgtgacaatctgaaatggaggtggccagtttgttggtcagcaccaattgccactcctgtctcctgcacctaccaaaagcctaggccaaaactgagaaaggaacccaggaaatttccatgttcttcccagacccctgtgttcctcagaggccagagctgcaggacgatctttgggaccacggggccttgggcctgcagaggactcaggaagccaagggcagtgcggcctctcccatccctgcagggccgggccggcagtgctgttctctctcctcacagctatcctggagggagtgggggccctggcgcagaaatgctggtatgatgcaaacctgctcagtgcgcaggacactaaaaacatggaaggagccattccttcacccatttagcaagacatatttgtagaacacgcagataaacaaccaagtcaagagagcctggccatgtgccagtcacggccagggctgaataccgccaagggcaaggctcactctggccacgggaacaatggcaaaggcctcgcttttgtggaactcctacctggggttggaaactgcatgtgtcccacgcactttcccaggtaatcccgaggattacggggacacagagaaggtaagtgacttggccacactcatacagcgagttagaggcagggctgggatgtgtcctaggcagtgagtgagattccaaattccatgctcataagcacaaaccactgtataaatatctcataatcccatgacccagggagccccaggcaggaagcaccaagcatgcgcctgaggctgggaaggcctgtagctcctggctaccacttggatgaccccagtccccatctccttctgcctcctcctctgacccgccagggacccccagaggccatcccaggcttgtgcgcagctgggcagtctcacctctggggacgtgacaaaggcatgggtctcggggtttgcgtcgttgcggcccgtgaagttcctgttgtaggaggtgacgattgtgttcttctcccmcttcttgatgtccttcctgccaggtcagagggatcagggttagggatatctggccttgtcacmtggcctgtcccgaggacagataagctgggttcctgtggcgcagcccagcctagctcctaccgagggaaaatgaagaggccctgccagggttgcctcctcctggggccacgcgcagagcagaagggaacctcaggatcactgggcccagcctgcaaccacacgtaagccagaggcaaggccttggtcaaggcctgagtttcctgacctggggcactgcctcctcccaaacggctcctgctgtgtccgtcagggtgaggccgcgctggcttcctcctgccagcccaggcttcagccaagttgccccccagtgcctctgcagggcccttcctcacccagcccctcttcccaggcatgtctgccagaggcttctaatgggcaagagtccctggagctagagaccttggctggagtctcttctctccaccccaataattccccctccaacttctggggctctgtaccctgtgcacaaggggctgtcttgtcaaaagatacgcctcttacctgtcccactggccaatgcaggggccacaagcattggccaggacaatgccacccagatccctcaagatctgtgcctgccagggagagaggaagacagaatgtcaagggtgggtgagagtctgatgggaaggggtgatgtggtggctgcaggacgaagtgctgtactggaaccccagggcagccactgggacctgccccagccccggcccaacaggcctctgggcttgtgccgcctggaggcattactcagcatggggtgggggagatgggcagggggatatgggcactcacatagccgtcccgctcaatggtggcgcggatctgctcggaacctggagtgatggtgaactgggacttgcacttgaggccatgggccagtgcctgcttggccacagctgctgagcgccccatatcttcatagcttgaattggtgcagctaccaattagacctggtgcattgtgggtggtggggttaagggtcaggaggagacagtgagcagaggtctccacctgacttcaaattatccagacttggccaaaagagttcaccatctgggctgggccagagacttttttaacagagaccagttgcaagcaaccgaaatatccaacaataaaggacaggctaactcatgacgtggcgtcatttgaagaaagatgctgtagccatyggccatgatgctgaacacattaggactatgaccccttttacagcaatatcatgtacacgtgtaggcacgtcagagggctcatacgaacagccatccttgatgggctggggctgacaggagatgctaattttcttcttttatactttctagtattttctgggttttaaagattgttttataatcagggcaataagagttctttttaaaaagtctataaaacctgaataacatcgcactttctgtctagacagtctctttttgttgttgttgagatggggtcttgctctgtcgcccaggctggagtgcaagggcacagtcgaggcttgctcactgcagtctctaactcctggggctcaagcaactcctcctgcctcaacttcctgagtagctgggacccacaggtgagtaccaccacacctggctaattcaataaattgtttttgtagagacaaagtctcaccatgttgcccaggctgctcttgaactcctgggatcaaatgatcctcctgcctcagcctctcaaagtgttgggactggccaggcgcggtggctcacacctgtaatcccacaactttgagaggccgaggcaggcagatcacttgaggtcaggagttccagactagcctggctaacacagtgaaacccccatctctactaaaaatacaaaaattagccaggcatggtggcgggcgcctgtagtcccagctactcgggaggctgaggcagaactgcttgaacctgggaggcggaggctgcagtgagccgagattgtgccactgcactccagcctgggtgacagagcaagactctgtctcaaaaaaaaaaaaaagggttgggattactggcaaaagcccatataaccagccaagatagtttcttttattaatttagtaatttactttctaattattaaaccaccaaatattttttttcttaaaattacttcaatgaataagggcgaacacattatattgcccttattttcggccagacggtatagaaatctcttttcacatattgtcacttctccagacaactttattttttatttatttttctcattggtgatagcagcagtaggcccaacaccaccttcaaaggtgtcagtacgatcatgactcctgttttacagatggggaacccacacatagacagtgaagtagtttgctcagggtcactcagctgttagtggctgttaggtggcagagccaggattcaagcccaggccatctggctccaggctccatgctcttcacagccacactgtacccagcagcagcagatgccagtgactggcatgccagggcgtctgcatgtgtaaagcatgaaaagtcacataaagcagcatgggtgatataaaatgtaaaacgggaaaatctatgcacacaatacacagaaacacagcacacctctccaagagctctaagagcttgctcctggctgggggttgagattaggagttttaaaaattcttcttgattgtgaatattctctacaataaacatatttttcttttctgccaagaaaaagtaatttttcttttctttcttttttttttttttttttttttttggaggcaggctctgttgcttgagtctgcagttttgagtctgcctttgttgcccaggctggaatgcagtggtaccatctcggctcactgtagccttgacctccaggactcaagtgatcctcccaccttagcctcctgagtagctaggactataggcatgcgcctccacacctggccaatttttttttttttttctgagacggagcctcgctctgtcacccaggctggagtgcagtgacacaatctcggttcattgcaacctccgcctcctgggttcaagcgattctcctgcctcagcctcccaagtagctggggctacaggtgcctgccaccacccctggctaattttttgtatttttagtagagatggggtttcaccgtgttagccaggatggtctcgatctcctgacctcatgatccacccatctcggcctcccaaagtgctgggattacaggtgtgagccactgcccctggccaatttttgcattttcttttaagagacggggtttttccatgttgcccaggctggtcttgaacccctagactcaagtaatccacctgcattggcctcctgaaatgctgggatttcaagcatgagccaccacttctggccgaaaaagtaatttttcaataataaacccatttcagaaactgcccaccttagaaagtgccacacagtaggcataggtgattgtctacagccctgggcagagccactggccctgagacctgctaaacagatggggtggaaggtgctcacccactcggatgtccagaggccatccttccttctctgccaccttgcccacttctgccacagggtgagccaggtcaggggtgaagggcccattgatgtgtggcttcagctgaagaaacaaacatgcaaggagaagaaagagaggagggaagaaaccttgaagcggggacagcctctttcactgcctcaccacgtccccacagagaggccaacgactttctcttgactgaaacctcatcacagggaagaactgagcagttggctctgcacacacccgctcccgggctccctccagccctgcaaggctgggctcagctctgcagatgaaggaactgaagctcagaagtgacatgctgtgcttgaagtcacatagctaggagacagcagaggcatggaatggatcaaggctgtcagcttcctaagttcattatctcccattcgatgttgcttttggaatcttttttttttttttgagatgg

SEQ ID NO: 96088 - DNA, 33719 bp, Homo sapiens
  misc_feature (1)...(33719): n = A,T,C or G
gtggccgttcccacctacagatcggaatgggtcacattccctggcctaaactttgctgtagcctggcctggaccccagctcacctgcagccttggctctcccctccctgctacatacagcctaggagccccatgttggattttcagaaagatgccacactttctcacctttgggccttctgtaggaacagccccagctcaggtctagcctcccgcctttctacccctaatgcttagcttggtggagccctgcctacttccttgcctggcatccctgggcatggcagcctcttcaagggcggggaccatggcttgttcaccagataagctccttctgtgaacactcactgcctctccatttcccatcctcaccttctccagggctggctctgtttctgactccagcactaggccagctcagggctctttcttggttctggggctctaagccaaattggtcctctctcatcctgccacctggacacctgagctcctatgttggctgctgtgggtgggaacccacagccctttggttctttctggaagagaaagggagagacgtctccagtaagcactgccctcctctggagtccctgaacatgtatgtgacctccatagagctgtccacagagacaggggccacactcaggcccaggcaaagggagacgtaagcccagcctgagatgccccatgctggaggcagactgctcactggacgtgcccaccccactgtgtggtggctggccggggtggggtaggtatgaggtacagatcagtctgcagcaggtaggagccgtaggaggacaggaggaagttacatgcatcctccactaaggactggacagtccccagaaccaggccccttcagacccggcatgctcagctgctggtcaggaaggggagagctgagacctccaggcctgagctcctcacccctgcctggcctcttctctctgttgattgcctcagggaaagacaaacgacctggatggaccacaactttgctcctgctcctccagagatgcagtcgcatggagctccaggcccgggaacctccttctcccatagccatgtgctggggcgccctatccgcccctcgagactccctggaggagggtcccccctcacccccgtcctcaggaagaccatccatctggataccttcccccaaagccatatcccacagacctccagccggctgggccttggagccaggacccggagtgtgcccccacaggagacgggcatcgctctgggggcttccttgagccccctgcccaccagcagccttgtacccaggaagctcagctccatctccttgactctccatcagaacagccaggcacggtccctggatcgcccactttctcactgggaagagttgcctaccccaggaaagaaggctgctccccatgaaggagggagggtgtcctcgccaggctcgccacctgtgaccctagtgccagggggcagggtccactctgagggcccagggaacccaggtctgaccaaatccaacaggatgcttgccacggagaagcccctggtgagttcctacctagccttacctttccaatcccggttagcccagagtgcaccagtccttgcagagccaggctcgttgggccaggggcaccttgtctcagtgactgaccacatgcctaccagagcttctccaggaaaaggcaagccccgggccagggggatccccagaccccgggggcgtctccaaagggccaacacgactgtgaatttgactgctatggacacaaggacagacgcagccagacatttagccacaatggccaccaacagacctagcttggctatcaatttagccacaccaaacacatcccaactggacacaggcacagagttccctgccctggatatcaagctgggcacagccagagacttgtcttcggtagggacagtcaagtcaggcaaaaccgtgaacttggctacagcaggcacaatcaagccgggcacagccatgaatctgactacagttgggacaaccaagccagggatggtcatggatttgatagcctcagaaccagacaagctgggcaaagccatggctacaagaagcacagccaaaccagatatgaccacagagggtatagccatggattcagcaacatcagacccagtcaagccggacacaatcacagctacagtgggcaccagtaggttggaaacagccatggctttggccagagtgaacagagccaagctgggcacggctaagaattctcttgctttggacacaagcaggatgggcacagctgtgggttcagttgtgccagtaaccccagacccagccactgggaagaccacactgggcaatgttaataacctaaccatatcagacgttgctacatgcctgctaatgccaagcagatccacagacctagccctggacaacactaatgctgccatggacagagccacagagcctgcctcactggacctggccacagaatacaaaggtaaatgcagaaacttggttggggatggactaggctgccgggagggggaggtgtgtgagcttggagatggatcatgcttgcatgggttgagaaagggaggaaggactctaaggtcagggttgaatgggttgggagaaaaggaaatgggggttgtagggccagacatagggactgtaccctgagctgggttctaacctgccagtctgaggtcaggctgagggaaactatcagaaagaaggttttggccaggtgtggtggctcatacctgtaatcccagcactctgggaggctgagatgggaggattgcttgagtgcaggagttcaagaccagcctgagaaaaatggtgagactgtctctacaaaaaataaaaaataaggggctgggcacggtggctcacgcctgtaatcccagcactttgggatctgcccaaggcgggcagatcacaaggtcaggagatcgagaccatcctggctaacacggtgaaaccccgtctctactaaaagtacaaaaaaaaaaaaaaaaaattagccggacgtggtggcgggtgcctgtagttccagctacttgggaggctgaggcaggagaatggcgtgaacccgggaggtggagcttgcaatgagccgagatcatgccactgcactccagcctgggcgacagagcgagactccgtctcaaaaaaataaaaaaataaaaaataagggttgggcacagtggcgcacacctgtaatcccaacattttgggaggccaaggcgggtggatcacttgcggtcaggagttcaagactagcctggccaacatggtgataccccgtctctactaaaaatacaaaagttagccaggtgtggtggcacatgcctgtagtcccagctacttgggaggctgaggcacgagaagcacttgaacctgggaggcagaggctgcagtgagccaagatcgtgccactgcactccagcctggtgacagagtaagactctgtctcaaaaaataaaataagataaaataaaataaaaaattagcagggcatggtggcatgcatctgtggtcccagctactggggaggctgaggtgggagaattgcttgagcccaggaggtcgaggctgcagtgaaccatgattgtgcgacagagcaagaccctgtctcaaaaaaaaaaaaaaaagaaaagaaaaagaaaggttaacaggggtaacttgtggaggagcaattatggtgagtcctcctttcagcatctcccgggattgtttgtttcctgaagacctggaataatcaggtgatcaataggtgtgtccacctttaaaagcagtggctcacacctgtaatcccagcactctgggaggctaaggcgggtggatcacgaggtgagttgttcaagactagcctggccaggccaggcgtggtggctcacacctataatcccagaactttgggaggccgagacaggtggatcacgaggtcaggagatcaagaccatcctggctaacaaggtgaaaccccgtctctactaaaaatacaaacattagccgggtgtggtggtgggtgcctgtagtcccagctacttgggaggctgaggcaggagaatggcgtgaacccaggaggcagagcttgcagtgagccgagattgcgccactgcaatccagcctgggtgacagagtgagactccgtctcaaaaaaaaaaaaaaagaaaaaaaactagcctggccaacatgatgaaaccccgtctctactaaaaaatacaaaaaattagccaggtgtgtaggctgagacagagaattgcttgaacccgggaggcggaggttgcagtgagctgagattgcgtcactgcactccagcctgagcgacagagcgagactctgtctcaaaaagaaaaaaaaaaaaaaaaaaaaaaaaaaaagcaagcctcctacctcctacgtgaaaatactgactagcgctttaggaagttgtgatttgtctaataggtagtctctgcagcctcctctggatgtgagataatgacctcactcgagactttccaaatccatttacgctcagccttttaggaaggtatctgttgcttaaaagttgtcttacctgaatgtctctttcttggtcccccacccccagccctttaatcctgaaaggtaagttggagccttgtatatatggaagtcctacacagaactctaaaatagggcaacacaagggctggacattcatttggtcttagaaagcctgtgacatgcctaaagtcacaccaaagctggctggtggcagtaagctgattggaatccagattgttaaaatctctactttgggcagcctcattcccaacatttcaagggctcagagtttctgggtctggaaaggtgcctagaaggcatccagtctaatgccttaattgagtcgttagattgtcagacccctttccctccaccccacacactcagtctgggcacctcacctaaattctggtcttcacttctccctacgagatctcagctctccctccatctgcagcccagccctgtctcctgaagtgcagatgtgggcagccagcagcctgctaggcttatctacccggatgtctcccgggcatgtccagaggtagcccttttcttcttgaactgactcctgcctccctgatctcactctctcagctgtaggcattgcctaccttttattaggtgcctagaaacccgggtatcctcttcttcctcatctctctcttgccatctcatccagtctacttcccaccttgttggtttacctcctcagtactcaactatctggctggctgtcccctcctctccatccttctgcccctgtgaggccacctcccacccaccagcttgttccctgtccacacacaactgctgcaacgactcccacattgaatggcagcactttcggcttaatattcgtcagtgactcaccattaccttccattaaaatccagcttccaaggctgcgtgcggacttctccagcctcttatttagctctacacacctgtctggaattttctctgcttcagcgacaccaaggactctgggctgtccaccagcaccacgcagctctcacctctggagaccctcacctctgctgtcctctctttgcagaatacctctccctttccattcttcccttccactcccatttgcctttccatctggccctcatctcctccaagaagtcttccaagccccctctccccagggtgcccacctgcctgcaccctcagttccctgtgtgcaccccggcccctgcattaggacattccatcttcctgtctcctccactagacccagaaccttcgaggggagggatggttgtcctcacccctgtgaggcaatatgctgtccattagtatccactgaatgcgtgaaatttttttctaatgggcaaactgaggctcagagaagttcctgtctggctcaaggttattggttcatcattctggagcagggcctggaacccgggcccctgactcggctctacaggcacccgcgcaacaccccagcccccgcgtgactcacgcgcgctcacggccgcccgcagctgccactggtcccctgcgcccctccgcccgtccccgccgcagcccagtgggtaaggggcggggagcaggtccagcggggagagacgggactgggatgcaggcacctttccgggcctggcacctggagcccgcgggggcggctcctggaccgcccgcagcgtggacccgggaccagttcccgcttgcgggcgcgggcgccgcgggaaggggaggggccctcggcggggccgacgggcgcgcggtcacgtggtgcgggtggcagcggcggcggctggcggcggcggcaacggtgcgcgcggacaggggcggcgcggcgccgagcgagccgaggcgaggtcccggggagggcgcggcggcgcggggcgcaggggcggcgcggcggggccgcgggccgggcgggtgggaggagagcgcgaaggggcgaggcccgtttgcaggggccgctcggcccggggaagcccgcgccccgctcagccttgcagccccgcgcccggagcatctccctggaggaacggagacaaaggaggattcatgtccaaaggtagggcggccggccaggccaccggcacccgccaggaggaggctgcggccccggccagcgcggctggaggcgctcctgggggagggtttccgcgccgaggagcccacgcgcggtgacagatgcgcggacacacgcacacacggtggcacccacctcgagagagacaatcttggagagaggcagacataggacgcggggagacgcagggacccacggacacgcaagcagggacccagatgcgcacagaaagccccatgctggagtacaccaagacacgcacacacacacacaccacgcacaggtgccagggccatgccagccggatgagagacctgtgcactgatacatacgtcccctcccccgcaacccctacaggcacacgctgagacaggcaccagctggtggtctccaagggaacccgttggcctccagaggactgggatgggggaacgggtgtcccagggccctctgctcctgcgaatgggaaaggaccgagagagctttcgtgattccttttcccagagcctagggctggaactggggtgggctggaattgcctttgtggggggyggtggggtcctgaaggctgcggggggctgaggaagatccatcttcagggtggaaggaagagggggggcctgcactaagcaggtgctattttggaaaagtaccctcccccagctgctaccttcctaacacaggggtggggtccctgggccagacaaagccaaagccattcatttgcctgtaaaaggaagtgccagggtctttgcttagcatgggaatggaggggctgtttcttggctgcaaccgagtcaggtggatggtgcctctccctggagcactgatggggcaggtagcttctggcagagggtgctgcaggcagatcccccttctccaggggccctaggagagccaggagctgaggggggccccaaggaccatctagccaggatggcagacttgagctgcaccctgctgtgacccgagctcttccccacccttggggagcccccctccaatccttgttgcagaggaaggaggaggtctcaacaattctactcccttgactgtggcggagacaacagccattgctcactggggggtcagctgctctgcatggggagaagcatctgagggaagagaaaggtgatgtgtctgatacctgcctcactctgaagttctcattcactcatcattcattcattcacttattgaggagtgcctgtggtatgctgggtagactggggcacagagatcaataagacacggccccgccctaaagaagggtgagaactagtacgtatttgtgccagataatttacattcttcattctgtataaccttcatagaaacccagcaaggtaggttctatccccagttgtctgagcagaaaatgaggctcataagggtcacccagccaggattcaagcctgggtcacctgcccatctgacgttgacatggtgggaccaggggagttgtagggacagaggatggaactacagaatccagctccagagcagcattggttctgtgccccagaggtctttgtttatttgtcaggcacccttaccagacagggggccctcaagggcaacaaccttgtctggggtacataagtgtccttggaatttcgcctagggcttggctggtgtagacccccatttgacagcatatgaaatggcctagatgggatggaatgaatgaatgagtgaatgtgatgagtaccagaaaatgtgcagtgggcacagaagagggccatccacatcagaaggcaaagcagaggctttcctgggagtagcagtggggctgaatgctggaggaggaggaggaggaggaggaggaggaggaggagggagccaggggttggagggggaacaggatcttccagcaaagcttgtggcacagtgacctgcacacatttactgtacttggggctggtgggtggcttgttagcatgtgactggcatgtcactggcatgtggtggggaggctgacttgccagcaggcgctgtgtacagtgcacacagtgggtgytcatatgtgcttgttggaggaatgaaagtgagatctaccaggtcctggtcctgtagtgggcctgtggtagcccctagatgctgcttggggatctggtaggaccctctctccrtcagggtctatcttttgggcgtgctcttttaggatgctgcagttgacaggccagggcggagcaggccatggtgagagcacacactttataggaatctttacacaacctctcataagtaaatacaaggcatactttccaagtctgtaaaatggggataagaccacccccccaaaccatgtggctctatcttataacacaggttgagaccaaatgggctcagctgcagaggcataaggggcaatggaaaggcccagcttgtgtgagcagctgggcaggaaaaatggggcattggtcccagtgcaggtgtgctgagtggggcctgtgagccacgtgcaagagtggaggagcagggccaggctgctgagagtcagctgctgcagggctgggccaatcttgctgccatgcggagctgcctggctgggaacagcttcctgggaagcaagagagagccatgccaggccctggggaggtcctgaggctttggcagatttggctgtgcctgggagtgacagaagaaagaacagtttcccatggggagagagggtcttaccagtaccggtggaaggaccaggtggagggagatgagagtaggctcctggctgggtttaggggtgggaagggaatacttctgtcccctctccctcccgcccatctgctgctccatcaggcctccctgtaaggttgagactctgcagggtgttagtcatgaaacataggattctagaacggcagagctggaaggtgtcctcaagagcacatggagtccaacaaccatgcttgtgtaactggcatctggggacaccttcctttaaccaatgctttcacatgtactgtttcatttcccctacagacctgaaaggggctggggcaaaagggtctgggactgtaagatattgctcagtgccttttttttttttttttttttttttttggagacagagtttgactcttttgctcaggctagagtgcagtggcacgatctcggctcactgcaactccgccttccgatttcaagcaattctcctgcctcagcctcctgagtagctaggattacaggcgcctgccaccatgcctggctaatttttgtatttttaatagagacagggtttcactatgttgatcaggctggtctcgaactcctgacctcatgatccgcctgccttggcctcccaaagtgctgggattacaggcgtgagccaccgcgcccggccattgctcagtgcttctaagcatcatgtctcatgaaagctcaccacagtcttagtgatgatctttccattttatagagagggatgcaggctcatagtggggaggtggtcttcccaagtccacaaagctgagaagtagcagagccaggctctttccacttcaccccataccccaatcgtatggatggggaaatggaggtgctctattctggaacctgccctggtggacagtggcctgataaggaaacccacagatttctcctgtgtatgaacacacccatgatccactaaacccagggggacgtttgcccttcctcactagggaggggctggttcctcagccttctctttcatctgctatccaccactccaagagcacactgtgtcgtcttaggcaagtgactgccctcatctggttctcatcccctccccactggttccacagattcagaacaatggctgggagggtgtctgggctccttcaggtacagacacccctactctgcagtggtgctcatggtacagagrggacatcgaggctgggagacgagagtgatagccactctccagagaagggtagccctgtttgcttctaaaagatgaagcagccgaggtcagtgacagttaatagatgttagtgcaggatcctaaaaagtctttgccctttattcggggagggaggcatgactcaggtctgaacaaccccagacatttcttagaccagtggttctcagccagggcaatggtgcttcccaggggacatttggtaccatctagagacattttgggttgtcacagcctggggggctactaagatcaggggtgccactaatcatcctgtaatgcatgtgacagcctcccacaataattactcaaatgtcattagtgccaagatggagcagcccctgggttagatgcacagatgtgggcttcagagcagtgaggtgcatttgaaagtgcccagcaaccagagaacctggcactggcccagattttacctctgacctgctctgtgttcttagttgagttctttctcctccaggcctcagtctctttgtctatgaaatgagggacctggactggatgatactaagatcccttccaggcccaactttgtatgattctgtagcaagagaaaaataccatggtttccatgtgacctctgccgtcctcctgatcacccctccgacccctcccaccttggctctgcagggctcccagagaccaggacggacgcagccatgtcagagctggtgcctgagcccaggcctaagccagcggtgcccatgaagcccatgagcatcaactccaacctgctgggctacatcggcatcgacaccatcatcgagcagatgcgcaagaagaccatgaagaccggtttcgacttcaacatcatggtcgttggtacggaaggctgtggggctgctgcaggcctggtggcnggcagcaccaaggatcccatttctttcccccaaatggctgtgaccctggctcttctaagatgagctgtttgtagaagggagaatttcaccatgctgatcacaaaggcctgacccctgtctccccttaagactagctgacccaggggtaggagcttcaggtggatgccagcccagccccccatcaccagctcrgtgtacacaggcagccccttcaccactctgatcctgcttttgggtttgtgacatgagagaatcagcaatgttcttccttacctctgagagctggtggaaggattggatgaagggtggtcttatttctactcttttgtagtgctttaaaactttgagagaaggccgggtgtggtggctcacacctgtaatcccagcactttgggaggctgaggtgggcagatcacctgaggtcgggagtttgagaccagcctgaccaacatggagaaaccccatctctgctaaaaatacaaaatcagccaggtgtgatggcgcatgcctgtaatcgcagctactcgggaggctgaagcaggagaatcgctcgaacccgggaggtggaggttgcagtgagctgagatcacgccattgcactccagcctgggcaacaagagtgaaactccgcctcaaaacaaaaaacaaaaaacaaaaaagattttgagagaatttccagggatttggtcactgagtagcatcactgcgtcacagaatgtaagagtaggaaggggctgggcatggtggctcacgcctgtaatcccagcactttgggaggccgaggtgggtggatcacctgaggacaggagtttgagactagcctgaccaacatggtgaaaccctgtctctattaaaaatacaaaaaaattagctgggcatgatggcacatgcttgtaatcccagctactctggaggctgaggcaggagaatcacttgaacctgggaggtggaggttgcagtgagctgagactgcaccattggaccccagcctgggcaacaagagtgaaactccatctcaaaaaaaaaagaagaaaaaaaaaagagtaggaagggacctttgccccgtctcagtgagatgtccagtcagtgctgaaaaaggaatctggcgtcatccttctgtcctcttcctccttcatcccccaatcagtcatccagtcctgtccattttacctcatacgtatctcttacgtctgcccacttctctcctctctcttgctgccaccctatactgactttctctcacctggcttgccgtggccacctgactctgtgctgtcaaagtgctgacctgcagcaagataagctcagctggggcttgggccagagtataaatcatctggaaaatcttgctataaaaaacctccactgagctaaacagtgtgctcagtgacaaggtagatttctctcctgaggcagacttcttatctcaagaaccagtagcaaatgggtcagggaccctggtagctgggcccctatgggccacactcggagtggcaccaaccctcctagctctctgtctcctttcctctccaatcccttgtccaccagtgaccaaataatcttcccaccttgcaaaacttatcgagtcacccaacttacttaaaactctgtaacaaactctcctttaacctcagggtaagtttaaactcgtagactgtcctgattgtacctcttcagctcatctctgaccacttcccatctagcattgtactcctcactcagaagaggcagtgctcgtccacatgccatgctctctcctaccctagagcttttgcatctgctgttccctctggctagaactcatgactcttttgaaatcaaccttccggtttcagcttagttgcatttctccagaagtcttccttagtcccagagagactgggttggattcccttggcaatgctgtttcaataccctgtggctattctctttcatagtggttattgcaacatactataattgtctgcttatgttttggtcactctcacactaagcagctccttgagggtaaggatcatgttttgttcacgatagtacctccaaattttaggacaacacttggcacctaagaataattaatgaatgaatgctcttagaaaacatctcagagcaagcatggcaactccaacacccgtgagccacttctctccccagtggtgtgcatggcagactgctagtcagtcatggcacgtgttcagtgctgagcccagatgtagcctttttaacataatggtctaggtgactactaccagataatcagcaggaatgagaaatgcaccttatttaccatccctggtcttgtccaatttcctctctcctcaccatcctatcagtaaagaaaccaaggcatgactaatccaaaggcattcagggaaaacaatgcaggtgggtctggaactctaggcccttgtcccccagcatggttctttttctaatataatcacaagaattcaccagcccagtatttcttagatcttattgtccataggactcttctggaagcccagttaaaatgcagattcagaatcataggtctggggtggggcctgagattctgcatttcctactagtgtccgggcaatgccgaggctgcttgtcaattgcaagtctttcttgtgggattcttgtacgtgttgaagtttgagaagctctgctcagaccagtgggtttgtttcttttgagacagagtctcgctgtgttgcccaggctggagtacagttgcgtgatcccggctcactacagcctctgcctcctgggttcaaacgatcctcagcctcctgagtagctaggactacaggcatgtgccaccatgcccggctaatttttgtatttttagtggagacagggtttcaccatgttggccaggctggtctcgaactcctggcctcaagtgatctgcccgccttggccttccaaagtgctgggattacaggcatgagccactgcacctggcctgaccagtggttttcccttttttttttttttttttttttttttgagacggagtctcgctctgtcgcccaggctggagcgcagtggcgcgatctcagctcactgcaagctctgcctcccaggttcatgccattctcctgcctcagcctcctgagtagctgggactacaggcgcctgccaccacgccgggctaattttttgtattttttttagaagagacggtgtttcaccgtgttagccaggatggactcgatctcctcctgacctcatgatccgcctgtctcggcctcccaaagtgctgggattacaggtgtgagccacggcaaacggcctgaccagtggttttcaaatgttctttagctgtgaaacttttccttgaaatgaaatcttctgcagatatgcatctggaaaacaggtgaaagggagccatagcgaaggaagtggatgcaggggccctgcctgcccagcctcctcctcctctcacagtgccctctctggcatgtatcttcacaggacactaaggcttctgggagcacaatctaaaaaccactacactagaagaaagagtggatatagagccaagatgttattagggttcgagttcctggtcttgcatgtattagttatgttgctctgcacatattttgttagaagaggattcatctctctaggaccatctcaactgaggataaagatagttctgcttcaggatccacagggctgatataaaaatgaatttggctaacaaatgtgaatgtacaatatgcactgtgaggcagtatcaggatgcaaagtcattctatttttccttttagtatcattaaaaagtgaaaacctaagcaaaaaatggaatcacgagaaaacagaaaaccacgacactagacatatgcagaggtygtcccttttcccagtggtcctgtggctctgggaaggagagaatatggaatccaagtgatgtttccccaaggccctctgcagtaagcaggaagccattcccacctgcctgcaatccccactcagcctggccatcccccagtgagtggtcagacaaggtgtggcctgratcatggctctagaattctgtaagcttatggagaaatattaggctcaggaggtggatgcagagtctccctacctcctcctcctgctttgctgtaggccagagtggactgggcaaatcaacgctggtcaacacgctcttcaaatcccaagtgagccgcaaggcctccagctggaaccgggaggagaagatccccaagacagtggagatcaaagctatcgggcatggtgaggaccaggcagggacccctatgggctttgttcagtgagtgcctctgctggaaaggggaaagaatggggcttattgaagaataagatcaataaaaggcaaccttaagacaaaacagacgtgagcacttcactctgaagcaaactccttagactgcaggttcagggaagagagagcagggagctcgaatggaaggaggtgagatttgaggtggatgataaagtacaggatttagacaggtagaaagaggtaaggagtgggcaggtacggtggctcatgcctgtaatcccagcacttcgggaggccaaagtgggaggatcgcttgagtcatggagttcgagaccatcttggtcaacacagtgaaaccctgtctctttttttgtttgtttgttgtttgtttttttgagacggagtcttgctttgtcgcccaggctggagtgcagtggtgcgatctcggctcactgcaagctccacctcccgggttcacgccattctcctgcctcagcctcctgagtagctgggactacaggcacccgccaccacgcccggctaattttttttgtatttttagtagagatggggtttcactgtgttagccaggatggtcttgatctcctgagctcgtgatccgcctgccttggcctcccaaactgctgggataacaggcgtgagcaaccacgcccggcccgaaaccctgtctcttaaaaaaaaaattagctgggtatgatggtgcatatctgtagtcctagctattggggaggctgaggcgacagcatcacttgagctggggagttcgaggctacagtgagctgtgattgcaccactgcactctagcctgggtgacagagtgagaccctgtctcttaaaaaaaataaaagaagaagaaaaagaaatgagtagagagggtattccagattccaggtacagggaacagcataagccatgatatcgagatggaaaagaccctaaatttgacttttccaataactgatcctgaagacaaggcctgggtctccctggctagtaggctgccaggtacctggggtcagctgtaggactgacctctctggtacattttcttttcacccccagtgatagaggaaggcggtgtcaaaatgaagctgaccgtcatcgacaccccaggctttggagaccaaatcaacaatgaaaactggtatctgtctgcctctgagatctttgccctaaagactctgctgggaagatacttactatggtgcagattcattcacgttgagaaccatctgcaccctccatgctctgtagttcccgacagcccaggccagggcccctggggagctccacccctgctaactaaccatccaggaaagccatcggtgcgggggctgagggggaatctggcagcaggtatcctaggcccaccaaccagggaatgacatgaatgtaaggagattgctaccagatcatgcctaagctgagccctaggycttgttcttctgatgcatctatctactttccctccccatcagctgggagcccattgagaagtacatcaatgagcagtacgagaagttcctgaaggaggaggtcaacatcgccaggaagaaacgcatccctgacactcgtgtccactgctgcctttacttcatctctcccacaggacactcgtatgtaccaaccctacccctattgtcaggcctggtctggtttgtatcatctgtgcccatctggattggatgatccatacgttgactcagctaggcctccctagctgagtcctagcccttccagccagatgggttggtacatagtcatggcccatgaccttgggattccctagactttccacgaggaagtytgactttcttgctaggaggttaaagctgtccaacatcagccaccaatatctgcccactggtgtcccagcagcatggcacaactgtatcagcaaagaggacttggtgaatgtgagcagagggcacttcatttattcaccaaatacctgctttggaaaataattggagtcggrgggagcagcaagaagggtgaaatagggcagtgcagggctcctggaytggggctggtgtttggagggtagggacccagttgtaggcatttagaaggtaccagcctggagtgaggcattgtgtgttcagagatgaaggccaaccattgtcatgaagtactatctgataggcagaataagacacacacaagcatgttgggaactctgattgtgagtgacaggtgggccccatgaaggaagtgctgggaacaggcagaggatggagatcctagggggcaggccagaaaccttcctgcagagaccgggggaggggggtcccataacattactaagcccagctgctgggccagagttaagctcttcagaggatggcacaagcaaggtaagccccaaattttctaggaaccaggcagtgatggtagggggagaagagagatgaaacaagacccctgggctagacccaggaactcaacagaaggctggttttatccctccctaggcttcgaccccctggtcagaatgaaccatcagacagactgacttagtgagtccctgagattgcaaaatagagccaagttggggtctcagagcctgaggtaggatgggggcatagactgtcagattgtgggaagggcaaggcctccagtttggccctgcaggactaactctgggggctaggaggagacctgtcaagaagtagtctgataggcagaacaagatgtacacactaggcacggtggctctcgcctataatcccagcactttgggaagccgaggcaggaagattgcttgagtccaggagttcaagaccagcgtgggcaacatggcaagacattgtctctacacaaaatttaaaaattagccagacatggtagtgcgcaactgtggtcccagctcctctggaggctgaggtgggaggattgcttgagccctggaggtcaaggctgcagtgagccaatgaccatatcactgcactccagcctgggtgacaaagtgagaccctgtctcaaaaaaaaaaaaaaaaaaaaaagacacacacagtgttgtttttttttggttgttgttgtttgttttttgtttttgagacagacaaaaaaggaaaaaagacacacacgcacaaggacatatgagtagagacartagtccacagatgctcccaggagaaagaaatccctgagtcagaaaagatgtcctgaagtggtggtttgaggggggcttaaagagaggcagaatctgcaaggggactgaaaaagaaaaaggcaggtgttgaggctgctctacagacggcaaggcagtggggctgtgtcggagacgagaggtagcagcctcttggcctcagccagatgcccagcccagtcctcttctcctgtgggtgtcctggagtggtggtggtggctgagttggggagggcaaggtggctctgatgattctgccttttctgtgccccagcttgcgacctctggatcttgagttcatgaaacacctcagcaaggttgtgaacatcatccctgtcattgctaaggctgacaccatgaccctggaggagaagtctgaattcaagcaaagggtgagaaggccccctgtcttcttttcctgttcccatcccctcctttctctccgctgggttcaggccatctcctagccctcatcattctgccttcacccccaccctcaaccctcccccaattctccaccccagcccccttcttaaccattcaagaggctgaggttggtggtatctggggactatgatgaagaaaagatggcacagctctgggctgccttcttcccaccctccaaacctacctgtgaagaccactgaatacatgtatcactgtgtacatargaaatcactcctccaacgttagcctaattgaagggctagactaattagtgagtcaactggccactagtcctcactggcatcttctcttttttttttttttggagtctctctctgtcgcccaggctggagtgcagtggcgtgatctcggctcactgcaagctccgccttacgggttcacgccattctcctgcctcagcctcctgagtagctaggactacaggcacccaccaccacgcctggctaattttgtttttctctttttagtagagatggggtttcactgtgttagccaggatggtctcggctagtcttgatctcctgacctcgtgatctgcccgcctcggcctcccaaagtgctgggattacaggcgtgagccaccgtgcccagccctcactggcatgttctataagctcagccctgtgctggatgtacagggttggggaggggcgatttgagagaaatgaaaagacaattgctgcctttaagaaatttacaatccagttgggcgtggtggctcatgcctgtaatcccagcactttgggaggcagaggcgggtgaatcacgaagtcaggagatcaagaccatcctggctaacacggtgaaaccccgtctctactaaaaatacaaaaaaattagccgggtgtggtggcgggtgcctgtagtcccagctactcaggaggctgaggcaggagaatggcatgaacccgagaggcggcgcttgcagtgagctgagatcgtgctactgtactccagcctgggcgacaaagtgacactctatctcaaaaaaaaaaaaaaaaaaaaaaagaaacttacaattggctgggggcggtggctcacgcctgtaatcccagcactttgggaggccaaggcgggtggatcacctaaggtcaggagttcgagaccagcctggccaacatggtgaaaccccatttctactaaaaatacaaaaattagctgggcgtggtggcatatgcctgtaatcccagctactagggaggctgaggcaggagaatcactggaacccgggaggtggaggttgtagtgagccaagatcgcaccacggtactccagcctgggcaacagagcaagactcggtctcaaacaaacaaacaaacaacaaacaaacaaaacttataatcaaatagaacaatgaagaggtcctggatggtttcctggagaaggcaagacttaagtcgaccttgaaagagggcaaacagtctcggagtagggggagcctcacctttcttccttccaatcaggaatataacatgcaggggtctgagcactccccagtgggctcacctgtgctgcttgtgtaaatcccagtctcgcggaccctgagatgagcaagctggttgcgaggcgcctgggacctgaagttgcacctcctggcctcttcctcctctcaggctaggttgtaattrtatagctggggcttgcatttattcaccatcttcctgctgctcagggtctcagagttcagagatgactgtggattatccaaggctggatttggctctctgacctcagctcacgcacacaggtgcacacacccctcttttccattaccctgacacttgactaccttgtttcttctcctcgcctctaggttcgcaaggagcttgaagtaaatggcattgaattctacccccagaaggaatttgatgaggatttggaggataagacrgagaatgacaaaatcagggtgggtgcctggggcactgctcctccactgatgcccccttgcgacctctgggatgtgtattgtgcacgtcctctgtctgtcttttccctttctgtactccccccaaccttgcctgacccagaccagaagtgacatagggggatggggaggactatggccctggactgtgaacccacagaagggctccctgtacccagaaagccttctatccccagaccacataaaagcctccttttccccaacaaggtctggcaaaaacagtatttggggtgatgggaggggcagcaggcaggaagagcatcaggctggggtccaggaggatctatgctgtggtcagaccctgccttagtttcccctctatgaaatgcaggggttagactgagtggcttataggcttccccccctagaataacttaaaaaaattaaattggctgggcgtggtgactcatgcctgtatcccagcactttgggaggcctaggtgggagaatcgcttgagcccaggagttcacgaccagcctgggcaacatggcaaaaacttatctctacaaaacctgcaaaaattagccaggcatggtggcgcatgcctgtaatcccagctactcgggaggctgaggcaggagaattgcttgaagccaggaggtggaggttgcagtgagttgaaattgtgccattgcactccagcctgggcaacaagagcgaactctgtctcaaaaaagaaagtacaaagcgctctgcagctgaaggagagctgattcctgaggttaaccagtgaggcagtggtacaattgggactagacccaggactcttcaatctcagtcgggtgctcttttcaagagactgagccttgcccttgccatcagtagtatctctgaatgagcatcagaagtgtgtggttcaaggctagaggaccatatgccatcctgctcctgaaagtccaggttgttggaggatgacggtgcacatrtgtctggtttgtgtttctgccccgtgcagcaggagagcatgccttttgctgtggtgggaagtgacaaggagtaccaagtgaatggcaagagggtcctcggccgaaaaactccatgggggatcatcgaaggtaattcactgcatcttctggaagaactggttgctgatcagttatccagtcaccatttrttaagcatctatagntcaaggcactrtctcaggacatatgaaatgaatgccagccagattctgcccataaggagcttacagtctcattgagaagacgatgctcacaggcaggagtaacaagagactgatttagcacctgactgggtggcactgacttagcgcatcaaaggagttcagaacatggagagattagtaaggcctggaaaaactggagaaaggttttcataggaagggggatgtgatctgacaaactgccggagggttgttcaggtgttgccatttccattttattatgaatggatgtgaccctgggcgggtcttgatgattctgaaagtggtcaaagaatcactttaatgatttcattcaatatgataaccctatgaagggaggagagcgggtgctcctgttctcagagtataagctaccaaagcaccggaagctcaggttaaaagccttgtccaaagcacataacttgttagtggtgaaacttgatttcagactcagattttttttttttttgagacggagtctcactctgtcatccaggctggagtgcagtggcgcaatctcagctcactgcaacctctgcctcccaggttcaagyaattcttctgccttagtctcccaagtatctgggactacaggtgcggaccccgatttttgtattttttayttatccccaaaaattagcccagctaatttttgtatttttcgtagagatggagttttgtcatgttggtcaggctggtcttgaactcctgacctcaggtgatccatttgccttggcctcccaaagtgctgggattacagatgtgaaccaccatgcctggtgattttatttttatttttaatagaggtgggggtctcactrtgttacccaggctgatctcaaactcctgggctccagtaatcctcctaccttggcctcccaaagtgctgggattacaggcatgagccacagcgcctggccccatgtcttaatcctcattctgttccaacagtgcttggccartgatttgcaaatactaggtattcaatatatgttgaattggatttgtcatgtagtgcatgacctttttaaaatggctcaattattattttctctgtgttacttccaaccrgattataagcttctgaagaatgggaagtgtatcttaggccttggccagtttctcagacttggtattagttttctcttctataaaatggtaaaaattatagtccctcttggctattatgccacagcgtctagaaggatgtcgtgcycattgtagctgcttaatatttgttcaatgaatcaaatccagtacacccaagtgagcaaatctctggaagggttacaaaaaatgacctgtcccatagctttctcctaaatgcctccgtgacccaaacagaagstcacctcctgggtgttgctgtattaatgaactgactacctgttttgctttgttttgttttgttcatagtggaaaacctcaaccactgtgagtttgccctgcttcgagactttgtcatcaggtaagatgtctcccctccagctgtccagacagcaggttgaattatttggggtcagggtctatctgttcagattcacctcctgcatctccaggtctctctgacagagytttctgccccagttccagctcctgttgcaaaatggaaggtgctgtagaagaatccttagctcctgggagtggttcccattcactgggtccagtccctcgaagtgatgtgtgtcrccgcctcctcttcctgcccctaattgcagccctcttcttctcaccctgtgtcctctaggacccacctccaggacctcaaggaagtgacacacaacatccactatgagacttacagggccaagcggctcaatgacaatggaggcctccctccggtgagcgtggacacagaggaaagccacgacagtaacccatgacgaccacttctctgtgtcatcacacmtacccacttcacacacacacatcccaaataccaccaccaaccaccttcttcctctcaactctgtcccacaggcctgtctggtatttgtggagcatcttgtctgtgtgtgtgtgtgtgtgtgtgtgtgtgtgtgtgtgtgtgacagagagagagcgagagagcctgtgtgtgtgcatgcaggggtgaggtattttcactgccctccctggagagtcccttgtaagtttggctcctccatgcctgtccattatctgtctcctttccttgtgtcccaaaacaaagctgtttgcctcactcaggagatctgggggaggtttcatttaaaagtgctgggagcaggtgagccacaggcaactcttctctcggaacctgcacacaaactggggctayagagattctccaaggacagatggcagtggagctagacctgagtagggggcagggagttcaggacaaccctcctgtaagttgggggtggtctgggggtaaggctggggcttcctgggaaaaggaaggccatgagaaggcagagaagtaggccagagctgggttcttgcagaaagcatcagtgcctacaaatggagctccacccttcagtctgtgtcgtgttcagtgtcacaaagctaccacctgtcaccagagcctactgctgctctccactcaactggcctctgctgccaggccactgcctgtctctgcttccgactttgtcttctttctccctttccctccttccctcatacattgctttctctccctctcctgcgtgtctctgacatctctcacttccttttagatgaatctactttaggttcattcctatatttagcatttatgcccagtctacttccagaaatgactttagactgcctttcacataaaatcacaaaactacaggacagtacaaacagattgccagagaaatctgggtcaaagaaaggaataggaaagaaagtttctgtagtcaagcacctgaacaggccctgagctcacaggcagccaatgtaaagagggaaacacagtgagttatgcagttcccagtgtccagttaaaggaagcacacatgctagtcatgtgagacaaccttttattgggacatcaggttctagaactaattctaaagaagtatcagaaacaatatacataatttgtctttcttagtaatttggcttcaaagacaaatttttgaccacacctccgttttctccgtcagacttctctcccttctaagcaggcttctctgttgctccatttgcttcatacatacttgacctctcttttctattccccatcacttttgtgctgaagctaatcatatttatgtctgtctttctctacttttccctaattccctctcctcctgactcctgtagacattcccaatgatacccaccgtcatacatttaggcttttcttgcctttccctgaagccctgtatttattaatgcatatatttcccctgcttgttgtacaagtaagttactcttttcctttaatctgtaagattcatgaaattcggggccagggaaacagtttagccttagggaagggaaaacactaagtgaaactgtttacaataacctcatacaaccttctgtcccatctcctggttcagcctaggtgtttcactggtcctctatgaatcccagcacttataatcccagtcttttatcactcaggtgctaggaaaaaaaacatagactcaagacccaagattcaatggaccaggagaaaggggggcggtgatcaggtcaccagtgaccccaacctatgstctcggtctttcctggaggctgccaacccagccctcatcctcccttgctcacaaagttacagggtaggcacctgtcaggacagaacagcagcagcgctacagcccagaggttatacatttcaacagaacagggatccttggctactgtagaagcagtcctgtatggagaccttggaccagcaggggaagatctatgggcatgggaggtgggcgttggaaaggctgagtaggaatggtgcctggcacccctraaccatgatctgagcctccctggagaaggtattttatatgtctgctgccagctgctggtctccacaccctcaaccgttctcaacccccctgcagggagaaggcctcctgggcactgtccttccacctgtgccagccaccccctgccccactgctgaatgaaggccatttcaagcgctgcttctcactccattcctctcagctgttattgctgcagggccaagccctttttagtgctgtgctcgtccagctcaccaccacagcccctctcagccctcagtaggtgggaggggccagctgcctctttaggccagttgcatcctccatttatccaaaccactcctctcctcccagtggagtggggttctgccagtacagccctactgcatcatctgcgtcagccggtcctagcccatctgcagggtgaaagaactcatcaagagctccttctgcccttgtaagcccatcccagctacttgtaaccatctctaagggcaatggcattgctccctacccattcatctgcatgagctactcttggcttccttaaagggtcaagaaagcaatttttctgcttactagattcattgagatcagctgtgtgagccccaaagtgggacaagggtgtctccttcattacttaaagatattcatgagggtgggtcactacagatgttggggagcaagggctaggatcactttttaaaaaatcaccacttgtggctgtcccagagtgcggttgtacatcctccccacctcataacgcagccactgaggaagagtggttttcctaagaagacattgctggagttgactttcttctgtccaaacaaacaaacaaaaactaaacacacacacaaacccccagaaacccacaatatgtacacgctaaggaaaaactagcacccttctgtccactcagcaataagagggatctcttcccacctaccctacctactcctacccccaacccccttccccattaatgtgagtaatgaattagcctgaccacaggtggtcactgtaggctaatggaaaatacccaagggagggcaaagccccccatcagatgcatgaatgtttgcgaatgttgactgccactgccccacacactgtgtctttatagaattcccctttgcccaccctcttcctgtctccacctggacacaacttgctcaaaggctggtgacttgtgggccattcatctacaaccaagtcctgatggagcaagaggcccacgcctaggggatgcaagaacaacccgtttcttaaatgttaccagtcccagccaatcttacggtgacattacagttaaatttcccaattgaaaacaagcaaacagacactcaaactggtcctgtaattgttgctagactttatgtgttgtacaactaaacattgctgtttgaacagtaactgcctggcctgtcttatttgtgctccttgaccaaatcagccattatgtcatctcacccatgtgtggagggtgagactctcttggtaagaaatagccacagatattagagatgaaaacactttgtgaggtcagttcatcttcagttggcgtcaggtcgggcctcagtcattattttctagtgtttcataaccaaagtgagtaatggatgggaggttgaggtgggaagatggcttgagcatgggaggttggaggtgcagtgagctgagatcattcctgacaggaccaacccaagtccatacctaaaggcagggggctaagggggcaggtgaggtcgggaggccactcacctatcactcaccccttcgcgctcgagccaattctcagggcccgcctctttctcccctttctcggcgggggcctctaccctgactccgccccgctccccgggcactgccccaccacgtgacccggtctcgctcctcctcctcctcctccttacgtcataatctccgccctccccttcagaaccgcgccccacagctcggcgcaggtcccgcccctttccatctacggggcggcaggaggcccgaagcaagatggcggtgaatcagagccacaccgagaaccgccgcggagccctcatccctaacggtgaaaggtgcctgaggggaagcacggcgtgctgtcggaggagaggagacgaatgagatagacatggcggctcgcaaactctcagcgagtcagggactttgccgccttttttgggcgcggcgctcttagctccgcccccgacctttgggagcgcgcgcccctcactggtgttccggcatgtggaggtggcggaggccggaacgcgtggcctcgcgcgtttgaggggtgggggtgggaatgcgccttttcaaggcgcggggcccagacgcatgtctcctcagggcggggcggggagggggtgcgagacgcgtgtgtccttcgaagagaggccggagctgaccggcggttgtgagcagccgggggcgttcggtggcagcgtggctgcccttgggtgcctgcgactttgttggatgaggacaggtactgggtgtgtatctcctcctacttccacgaacaaggtgtcgctctttggtaagagggatgaggaggtcgagtgtggatcattctggaaagatctcaaactgttgtggggcttctccttggacctggaaactttctaaagccatgtttcctccttgctccaaccagggagatgtctgcttttaaaaacaaaattgaaaaaattgaggccaggtgcagtggctcatgcctcttatcccaacagtttgggaagctgaggtggcccaggagtttgagacaagactgggcaacatagtgagaccccatctctacaaaaagtagaaaattagtgggccatggtggtgtgcacccataatcccagctgcttgggaggcgatggtaagaggatcgcttgaacccaggagtttgggctgcagtgagctcagattgtaccactgcactccagcctgggtaacagagccagatcctgtcttaaaataaaagatgggactgaacagatgcctgggcacaacaaagcactgttggtcgcaggaagctgtggggcttacaccagttgctttgctccttgcggtgcctgctgctggcccctgagctctctactggagcagactcagccagaggggtgcccatctccaccttcaagcacacttgttcactaaggcttgactccactgcgctcacctctttaccccacacgccccctttcccgtttcctacactcaaactcagtctcccccgctgtgcagttctaaattgcgctcctttctgggctctgacttgccctcaatttccttttctcccaaccagcattgaaactcaagctggatgatgtgcttggggccagcacactcaggtcagtttgaatgtagttgtcaggaagatcgaagtagacgttaccaaatgctgatatccaggtctttcttctatctttccttcctccagaaagttttcttgacagatttatatgggccttagaggttgtatgttctcacctgcttcctacgtacctctgctgctttgttccattttgtggtagatgattgctcaccactctgacagtggtgtccccgtgagcacttactgagagccatttgagcacttgtcattccatggtgtgaagcctttcttttcttttcttttttcttttcttaagatatttttatttctccaaatttgttatttattaggagtgactgaaataaaaaacataattgagtcccatcatcatcatcatcatagaaatggctttaagagaaaactggtcagatgaatattattgcttcccatttccaaccagtgaatagttgccactgataaattgacagcgaggagtctgtcaagaatgctcaagatagccgggcgcggtggcccacgcctgtaatcccagcactttgggaggcccaggtgggtggatcacaagatcgggagttcaggagcagcctggccaatatgttgaaaccccatctctactaaaaatacaaaaaaaaaaaaaaacagccgggagtggtggcggatgtctgtagtcccagctactcaggaggttgaggcaggagaattgcttgaacccaaaaggtgaatcacccaaaaggtgaaccaaaaggttgaggcaggagaattgctccaccaaaaggtggaggttgcagtgagccgagattgtgccactgcactccaccctgggcaatagagggagactccgtctcaaaaaaaaagaatgctcaagatatgtcatataatacaacatgccttttcaaagggggaaaaatcttaggaaataacttacatgtacttcttggtttcatcatacaagacaagcacaaaagcaccacccatgcctctgagaacactggaccatgcacccttgaaaacagctttgcttccttcatcatgagtaatcttcctccagcagtcaaatgtgcctgtgtacatgatgtcagttcctttgcatcctgactgcatcatcatgtagcagcaaatggtgttaaatgaataggaagtcaacccagcaacggcagtgacagtctgtgcatcatccaactgatgacaatgtgagtgttcttgggatccggaagcattccctttgcagtgtcatagttaccgaagtaggcagcaggcagctcggtagataataccctgcacagacacgttaaagccttggtacaggctcttaatcccatcagatttgtagatcttaactaggcagtcaccgaaacctcgcaattccctttcagctccagctttgcccacatcagctgctacacgagtatgggcaaaatcaagagggtacacaaaacacaaggatgtggccccagtggcaccgcctgatgccagattccctgcaaagtagcgccaaaactgggatctcttgtccacaccatccaggaagatctgcttgtatttatctttgaaggtgaagttaagagcctgggtgggggaagtatctgatgacactggccaggttaccgcaccaggacaggactccgtgctccttgggaatacagaccatgcagtctctaatgcccttgtattgcttatctgcagtgatctgcttgctggcatgctgcacctgtagcagcagcttgacccgctcgatgggtgctaccgccatcttggagatggctgcggccactccacctgccagggagtccttggcgaaggacacagcagcctctgtgatgtcgaaagaggaggcaggctgctgtgggatgggactggtccgagaatcggctttgactccggggctgattgtgaagtcatttctaatttggtgtttgggtgtcttctcactcgggctatgggtgtctctctacttcactgcttgtgtgttggagaaagggaaggaagcatgttttaaaaaacaaaacacagaaacactgatttttgtggtcctttgaattacctttatgggatccattttgtgctcctgaatacttaatagcatttatcgaacactatttcaagtactgttcttagttctaagagctttatactgtagttaaaaccactttaccagccaggcgtggtggctcacgcctgtaatcccagcactttgggaggccaaggccagtggattacatgagaccaggagttcaagaccagcctggccaacatggtgaaacccctgtccctactaaaaatacaaaaattagccaggcatggtggtgcacgtctgtaatcccagcgactcaggaggctgaggcacgagaattgcttgagcctgggaggcagaggggaggttgtagtgagctgagatcatgacactacactccagcctgggtaacagggtgaggctctgtctcaaaacaaaacaaaataaaaaaactcagtctatctacagtgaagatcagtactgttttccctcatttcacaggtgggaaaacaaaaagaagtcatttgcttaaagcgcatgtgggagagcttggatttggatttgaacttaggtactgtgcataaactcctgtactccagctgtccctctagaaagaaaaggactctttctctgttttcttctcaccaaagaagatcctattagtaccctagcttcctggatagaaactaaagaaccagagatagtggtgcacatctgtagtcccacctattcgagaggctaaggtgggaggatcacttgaggccaggagttcaagaccacgctgagcaaaatagtgggacctcatctcacagaataaaatttaagaaaagaaaaaaaagaaactatagccaggcatggtggcacatgcctgtaatcccagctgcttgggagactgaggcaggagaatcgcttgaacccaaggaggcagaggttacagtgaacagagatcacgccattgcactccagcctgggcaacaagagtgaaactccatctcaaaaaaaaaaaaaaaagtgccagcttatgaggtaattacattggttctctccagaggtaacctgccaagaagagatgctatagatgttactcttatactgtaaaacattgtgaaatcagattgcttaaaaatgatgtattacaaagttatggaaaaaagcaattgtgactatggaagcccaaggcttatatcctagctctgtcttacactaaatgtgggtacagtgtttccagtttttgtaaaatgggagctaatatcctccaacctgtgtgcctgacatggtgattaaaaggattaatcgaaacaacagtttgtaatttattctgtcagagcaaactgctgataaataaaagggagtaagttgactaaaaataaattttttttaaaaaaagaaaaatccgaataaagcaagtttgtactttgtatacaaataaaagatgttattaaaaaaaagaaactaaaaaaacttgagcaggagaagattgattctatgaggagtcttcaaaaagatcatggaaaatacgggttgcgaaaaaactatgcatggattccagattatttttccaccaaaattaactcatactaacttgttataacatgactgaacaggatttagtttgaggcactaagaaagataagatatcaatttgaaaaagggctcctatcagagcaacataaatactgcttaaattgaaggaagaacaaacatcaaatttatggtaaaccttgggtggaagaatggtgaaaccattgatgctttaggaaaagtttatggggaaatggcccaaataaatcagcagtttacaaatggataataagaagggacaagaggccagtcgcgatggctcacgcctgcagtcccagtactttgggaggccgaggcaggtgggtcacttgaggtcaggagtttgagaccagctggccaacgtggtgaaaccctgtctctactaagaatacgtaaaatttgccaggcgtggtggcacatgcctgtaatcccagctatttgggaggctaaggcaggagaattgtgggaacccaggaggtggaggttgcagtgagctgagatca

SEQ ID NO: 96089 - DNA, 22231 bp, Homo sapiens
cctttgtctgtcctcagagagttcacctggacatccaggtaggtgaacatgccaatgactatgcagaaattgctgctaaagacaagttgagtgagttgcagctacgagtgcgacagctggtggaacaagtggagcagatccagaaagagcagaactaccagcgggtgagtgactgggccgggagcagtgggcttctccctagaagctgcccactggctcagccaggaatttcacattaaattcattctgagacccccaagggacttacctgcactgcattgtaggtcgtggggcgggtattactaactcgaccttgtaattgaggatacagactcgtaagaggctgtcattgccctaaatcacagttacacacagaatggcacagtagcatttgataccaacaccttgggtgctgtttcagtgggtccacatgctcccaggaccagggtctcaaacttaccggtgaccaggaaccagagattaccataagtgaatctgtgaccttaaggactagtagggcagtgacccatctaaacaagcacagccactgttcagtgtcacctgggggcttccttgcagaaataccagccctggctttacagatgttccattttttcaagaggaaataggatttttatgcgaacattttaatttattttttatttttttctattgctgctgcacaaattacctgtgttttaaatgttgacaaaagactgtgcactgtgtgaggccaacaaaacatacctaaaggccagatccagcccccagcctgccagtttacagcctgtgcccaccatcttcaaggagcagtgtgggagacctaggcagagggcttagagcaagtccactcctgtgtgctccaggacagctctgcctcgtggggtgataccacaactaccttacctctctcccaggcaccagggcaggactaggtgagggctatgcctgacagatgaagaaacagacttgggagaatgagtaggttgcctgagggtaaagatagtccccaggtagagtgacactttgcaggcacttggctggaacctgggcaaagctggctgaccttgggcatcctcttggtctgggaatcagcagttctagcagccccagccaactcaggctcaccttatattcccctgcagtggcgagaggagcgcttccggcagaccagtgagagcaccaaccagcgggtgctgtggtggtccattctgcagaccctcatcctcgtggccatcggtgtctggcagatgcggcacctcaagagcttctttgaagccaagaagcttgtgtagctgtcccaggcgtcacaacccatcctcccaggctgggggagaaaggacctcctggaactgacttcttctgtcaggaggactggtttccagccatacctgttctggaagggagaggggctggaggcacccacaggcacaagctgaaggcagcagcttggctaatactgagcaggtagtggggcaaattcctgccctctctctctggcctctgggccgtttggtagtaatcacccaggggctggtaaagcccctcctcttggcacctcagaatcacagtgttactgatcagggatgtgaggctgctsttgggggtrgggggaggggaatgggcaggcaagccagtcttctgtcttcctttgctaacttagggttttgagcaggttggggtatggtgcctgtcatacccacctgccaccctgggaacctcactgttctctctttcagcctagacctgctgatccagggtgtgtgtgagttgagggtgggtggaggggtttgcagtgtgggaatgtggccctgcagttgacctgagctgcttcacatggttgtccattctggggcttaaagaactgggaccagaccaagtagaggccttggtgctggttggggtggggcctgcagagtyttagttactgatttcattttcaataaatgtaggtttgttacatgagtttcccaatwaaaaaaaaaatgacttcttgtccagtgcaagtgactcagtcatcagtgggcacacactgcagggtgcctcagggaatgccagttcttccaaagagcaaagcacttcacattccaaagtgaattcccaccagtcagcttcattctttccttcttctccaggccttcctgtggcagggaatagtgggtttgtccaagattatacaacaagtaaattgggctggggctcaaatttacaccctttcctctgtgccagctccctggtgaagttccctctttctagagtcagtaagcaggattgtcatggatgctgccaggaagtgcctggtaaggaggtgcattgagcaggggagtgctacaggacagccaccctgggctggcagggacaaggatgttgatgggctaaaccaacagcaagtgatttcaaccaggaccatgaaggagaggaaggattctgctggaaggagatggcaggacaggggtggttggagaagtggaggcaaacagctggaatggaggtgggtgggtgtttaatttcagctgcagagggtgttgtgaggaagctggaaaggaaggttggattagagaagcctcgagctccaggtaagcgatttggacatgcccacctttcaagaggggctgcaggcacccacaggcacaagctgaaggcagcagcttggctggcttaatactgagcaggtggtggggtaaatgcctgcccccctccctctggcctctgggccctttgcagtaatcacccagggtctggtaaagccactgagagccctactggcacctcagaatcacagtgttattgatcagggatgtgaggctgctgttgggggttgggggaggcaaatgggcaggcagttttgagaagaaccttctaataagaaatgtgagggaggttacagcagtgtgtgagaaagaccaggaagaaggagacaagtttgggggctgcttcccctaatgggatgatgcaatctgggctcatgctgccaactaattcttccacatgaaaaaaaaaaagttttttggcgggcacggtggttcacacctgtaatcccagcactttgggaggctgaggtaggtggatggcctgaggccaggagtttgagaccagcctggccaacatggtgaaacctcatctctactaaaaatacaaaaaatgagccaggtgtggtggcgcatgcctgaaatcccagctacttgggaggctgaggcggcagaattgcttgaacccgggagacagaggttgcagtgagccaagatcacaccactacactccaacctgggctacagtgagactctgtctcaaaaaaaaaaaaaaaaaaaaggccgggagcggtggctcacacctgtaaccccaacactttgggaggccaaggcgagcagatcacgaggtcaggagatcgagaccaacctggctaacatgatgaaaccccatctctacaaaaaaaaaaaaaaaaaaaaatacaaaaaattagccaggcgtggtggtgggcgcctgtagtcccagctccttgggaggctgaggcaggagaatggcgtgaacccaggaggcggagcttgcagtgagccgagatcacttcactgcactccagcctgagcaacggagcaagtctccatgtcaaaaaaaaaaaaaaaagtatttttaaagaacagctttaaaagtgcagaaaaattgtgaagacattttccctattagtaacatcatgcattactttatccagacttccttagtttttacctactgtcctttttctgttccaggattccacatcacatttagtcactgtgtctccttaggctccttttggctgtgacagtttcttagaccttccttgtttttgatgattccttgactgttttgaggagtacaggtcaggtattttgtacgatttctcagctaggatttgtctgatgtttttctcatgattagactagagttgtgggtttttgaaaagagaccacaggctgggcatggtggctcacgcctgtaatcgcagcactttgggaggcagaggcaggcggatcacctgaggtcaggagttcgagaccagccgccaacatggtaaaaccccgtctctactaaaaatacaaaaattagccaggcgtggtggcaggcgcctgtaatcccagctactcggaaggctgagacaggagaattgcttgaccccgggaggcagaggttgcagtgagccgagatcgtgccactgcactccagcctgactgacagagtgagactctgtctcaaaaaataaataaataaataaaataaaataaaataaaaaagtagaaaagagatcagagttgaagtgtcattatcaacatggctcttagctggatatcacatttaaaaattagataatttgggttttcatttgagatctgatttcttgagagtgtgaatctgacaatctgaagtagagcttcatcctgatatagtaacagctaaccggatggagtggtcccctttagatgggctgtgcattgaccacggttctggggtaggatgcagtgccctgggggagtcaacaggaaggggaatgggtggattatatacttccaggtttacggggtaaaggggttactgggaatgattcatttcccacccacggtgaagttctctctggagcagagtgattaagatcatagattgtggggaaaaacaaaacaaaaaccccaaacccatagatttgcaaccaaactacctgatttgcctctctgtgcctcagttctctcaattttaacttggggataagcacctaccgataaggactacgtgagataaccctcatgtagtaagaactattaacaatgactggcacataataagaacttaatagatgtttgctatctattaggaaacttaaagtttgcctggaagagcagaggaggtcaagtctaacaattgccgctttctttccccaggtaggaggctagtaggaggggtgggggggctgggggtgagggggatggttaagttcccacggtgacggggcagatatgggaactcagtctcctattcccttcttcagttctcagctccaccaaagtacccttttcctggatgacagctgtcatttatatggcgttgaactgtgtgcctagcgctgcacaagtgtttgcactttctccttgaatccccacagctaccatatagaataggagccattgatatacccaggtgaggaaacagatgcagagatgtggcttggtcaaaacacagctgaattggcagagtctagtttctttttctttttcttttcttttttttttgacggagtctcgccctgtcacccaggctggagtgcagtggtgcgatctcgactcactgcaagctccgcctcctgggttcacaccatgctcctgcctcagcctcccgagtagctgggactaacaggcgcccgccaccacgcccggctaattttttgtatttttagtagagacggggtttcaccgtgttagccaggatggtctcgctctcctgacctcgtgatccgcccgcctcggcctcccaaagtgctgggattacaggcgtgagccaccgcgcccggcaagcagagtcgggtttcaaattcagtcaacttgtcttcagggctcggctcctaacgcctgcgcgggctgtcagctgaactcagcgccgagccgtgagcttggctttgcccctccaagcttgcgcggagaacgcgccgcctgggccgagacggggaccccgggacgctcccgcctcccctcggaaagaggacggagatgcagattctccccgagcgttggtttgggagtctggactcttaggtccagtcccagcccagtgatttgttgggaggccctgggcctctgggcttcagtttctcgggcttccaggcgggtcccggggcggctaggaaggagccgcccagagagggaggcgcgcccgcgctgctcgcaagcagaaccttggaggcggcggctccgggagctggcgcgcgcggcggagcggcggacccggcggacccggcggaccggggggcggggcggataggcctgggcggagcgggaggcggaggcgccgcgtaggcccgggaggccgggccggccgggctgcgagcgcctgccccatgcgccgccgcctctccgcacgatgttcccctcgcggaggaaagcggcgcagctgccctgggaggacggcaggtgagcggcggcggtgggcccgggccccgtcctcccgggcgccgctcccttctcggccgccggcggaatctgggaacccgaggccatcacgtctccatgtctgcgggtttctgtgagggcgtgtggttctccctgtgggtcccyggcgctctgttccggtttctgtctgtccctgtgggtctctgcctcccccgccccctctccctttccgcggcactcgtccttcccccagcaccttccccccggcccgtgggtccgtatttctccattgacttccctttgtgagtttctgatcccctctttgctagtctctctcgttatgtgtttcgttgtgtctgtgtttctccaccagcctccctctatctgcatgcgggtctctgactccgctgacctctcaccatggatttgtgtttctcaatttgtctctgatccctgaggacgtgtattccgtttctctggtctctgccttcctcatcacatccatatagcctcagaccctacccttcctccttaacacttccccccatccttcgcaggccaccagcagaacccaccagacagaagctccgtgctctgcctggctggtcactgcctggcacgtactagacactccttatacacgcattagtccatttcctgtgcagctgtattggccctacgtgaaagatgcgagcttggcccacaccttagctaattttgtttctcactaaagcagaatggggaaagcgatttgactgcctccattcgtggggcacttgagatgtgtccctgtaagtcttctcacagaacacatgactggatctcctcctcgtgaatgacacctcatttccttcatgtttcttaagtccgtcaggtgccataagattctggaatttagtggccacaacttgtacttttggggatttttcagacttggtgttgaaaggggaaaacaggaatataatagaaagcgtggactagcgttcgacctgggcaggagtcctccgtaattatgtgagcagagacccctgcatctgtccgaccgcagcctttccgtcactgagccagttatgacagtattggctctgcagggctgtgtgaggattaaaggaccgcacacatgtaaagagcatggcactgcctagcacaacaggaggtgccagttgtcttcccgttacctttgcagttttgaggtcctgtaaccagagcagctgaggattcaaacctcgtagtacgaaggtctgtatgagacaagaaaggaaaggtaacagaggagcatttctatttcctgatccttttccatagctgtttccagagaaatttactgatgtcaattctgtgcttttgacacagggttggtgcaaagatccacgcaactgatgcaggctagtgtagctatctagtgtaggctctggagccagcctgcctgggtttgaatccgccttttactagtcttgggcagtgattgatgagggagacaaagcctcttctggactgcccctcagagccagggtggcctgggcctgggagccactgggactgcaaatctggtttgccacctggtggcaccaggaacaattgttctcggtgtccactgtcctgaggaattgggactctgggttcaatccagttgctctgcggtttgtgctcttagagcacaggatgatgcccatggggatgtggtcctcataggagaggggagcagggccgagggaattagcgtgtggacgtgctcggagtacccagtccacgccgttcccctggataatagtcactgcttcttttcatgaaggtgggatatcaccccatatccatctctccagtctctaccctgtccccagaaaaagcccagagggcaagggagaatctgtagaggttccagccttcccagaccactctcaggactgggctgtgctcctccccagctgaatccaccaccacaggataatggggggtaagtcagaagccctggggggtttcctaccaggccacctctcagctgcgtgtggaacctgggcctggctgcaaggctactggcttccaggttggcggtctctctagaaaaagggaggagttggtctggctttagcatgtgacttaaggcatgccctgactgccttacccctttctgtaactcacttggcaagctctctgctgtctggcctgygcttgctgtgctggggccacagataagaatctgacacggcctgagaagcaaggacacaaggcattacaaaaaagtgggaagatgccgtgggaatacaaaagtgggagcattatgggggcagggggcagtgctggccatgacattggagttcggctctgaaggatcaacaggggtcctcaggcagataaagaaggacatttcaggcagaaggagcaggctgtgtgagggctggagcaggaaggaatatagcaagtggagaagctccgaggtgcccaacatgagaacatggggcgaaggcttgggagcacctggagttggggccaggtcatggagggctttgactgtcaggccaaagggcttggcctttgtctggcaaacagaggagggtcattcagaagactgaaggggtctgagcagggcaaggaacasatgagtgaggaaggatcagagggggacttaggagatagaatttatttatttatttatttawgagatggagtctcgctctgttgcccaggctggagtgcagtggcgtgatctcagctcactgcaacctccgcctcccagattcaagctatgcttctgcctcagcctcccaagtagctgggactataggcgcgtaccaccacacccagctaatttttgtatttttagtagagatggggtgttaccatatttgccaggctggtcttgagctcctgacctcgtgatgcacctgcctcggcctcccaaagtgctgggattacaggcgtgagccaccacgccyggccaggagatagaatttataagacctgatagctaatcgctgactcttaagattgtgaagtggattcctttgcagattactttggggagaaggtagggggagtacagaggaagcttctcccttcatggattcctcagctcctgtctcagcatactcaggaacttccagaggagcggcaaaggaatctggtgaattctgtttctttgtatttgctaaccaaaaggctgtctcctggcatcaccccagtgtctgtgatgttcagctgtttttccagtttctgaaatcagtgcctgtgctgtacccagccctcatctttctttccctctccatctcccatcttttatcatgagctgcctcttggactaaaggtttgaggctcgttcagtgaaccgccaytgacagtttgggccttgcattgcttcggggggcacgtctgatcttcccagagtaaacattggtcattttacctggactaatgccagcacacacccgtgtctgggtggcctttctggtcattcttggaagcaggatggagccacggtttctgctggggtggatctgtagggsagcgggtttggaaagcagtgggttgcatctctaaggtggggactcctgtcattggctcaggacattgagccactatcgtggggaggagcacctgcaagtgacaggagcctcctcatccttgccctgagcagctctgaccaggactcagtcacagaaagtaagagagcattgaggagccggggcagctctgtgaactgggagtggttcagagggcttcccgagagcgggtggcatgggttgggtctagagaggcaagcaggattcggatgcatggtagtggcatgagcagaaacattaaagttgcttctgtactaattcccaggtgcttggggtagacgagttatgtgcagcctcctcgtggggaggccagagaacgggtctgtcacagggccagccctgccccgccctcctgaccctgtcccgcgcttgctccaggtccgggttgctctccggcggcctccctcggaagtgttccgtcttccacctgttcgtggcctgcctctcgctgggcttcttctccctactctggctgcagctcagctgctctggggacgtggcccgggcagtcaggggacaagggcaggagacctcgggccctccccgygcctgccccccagagccgccccctgagcactgggaagaagacgcatcctggggcccccaccgcctggcagtgctggtgcccttccgcgaacgcttcgaggagctcctggtcttcgtgccccacatgcgccgcttcctgagcaggaagaagatccggcaccacatctacgtgctcaaccaggtggaccacttcaggtagcgcccgcccccaccctctcccctcggcacccctgcccgggctcaggcttctcagggcctgtgagaggccacctggggcaggggcaggagggcgggaggtggcagacccctctcactgggtgtgacaggaacctttggagagggccctgatctaatttccattttgaaaagctcactgtggctgccgtatgtggaatggattataccagggcaagaggagaagcagggagagcagttaggtggtcactgctgtggtctgcggtgacagtggcttgatggcctggtggggggtgggtagagagaggtgctgtggaggaagcccagacaggactccctggggattggcccggggattagggaaagggagggtcaaggccacggctttaaagttgcccacagtctggcgttgtcctaaaatccccgcccttaccaaaaagtgctcccttccatgaccacagcctgagatctcacccaccagcccccacctcctttccctctaggtaastcccactggaagatggattctcagccccaccagcctgatcttcccaccttttcaagtccccttgatccagatccccagaccccccccttttccctgccacccttcttgtctttacttcctccttacccaacctggagtccaaggtccatcattaaaaccctccctggcatactccctcaagcctctggtcccttgctgctggcgtaatcccagcctgatttactccagctctctgctccacacctgtgcctgggcactggagggtatggagaggaaagacaacacgtgaggcggccatgctgctgtccccatgccgatgatscccctgccaggaaggccctctgccctgctgggagcctcactttcctctggtctgtccactgcagcctttaaaactatctgttctcctcattcatccctcgtcctcactcatagctgacgactttgcttccaatttcagaaaacagaatgaaatggaagagaactttccccagttccctccacaactcacctgccagcctctgtgcacagggactcaaggctgttccagcttctgtccgggctgactcccaccatccccatccttcagtatttccccccaccccacagttgggcccttcctctccctctcgatcagcgttcctctcctggagcatacccatgagcacacacaccctgaagtggctcctctctcaaaggaaaaagactccctggatcccacatccctcgaggctgtcacccttctctgctttctggcagacctccttccctttctctcccctcgtctctcttgaaccccttccgctcagactcctgcacccaccatggcacagagcagctctcactgaggtcaccagccacctcctccactctgttggtccagaggccatgctgggccctcatcctgtggacctgccagcagcatcttctttcgtaaaatgcccctgcttggggcagcaccctctggtcctccctctgcactggctgggcctctgtgtctgtgggttctgctcatctccccgagctctcaccatcggggcttctctggactcggtgcttcggcagccccccttttttaactccaggtgttccttggggcatctcatgtcatctccagcattaaaccacgtctctgatgattcctgaggctgtttcctggagttctctcctaaactccaggctcaacagcccagccatctacacagtccctccacgtggtggcctcagagctactgcaagcttccatgatcacagctgaattgctggtggcctgccctgccccaaacctgtagctctgtcctcttctccatgggaatggaagctctttgctctcattgctcaagcccaaaagcccgggggtcatcctcagctgctccttctctgtcatacactgcgtcctattcgtcagcaaaatccatctagaatctgcccgcttctcgctgttgccactgccacctcctgagctaggscaccttcatcttttggtctctcacctaaatcattgccatagtctcccagctggtctccctgctttcacccctgctctgacagtctcttccagcacaacagctagggcggtcctgtccaggcataagtcacagcacgcctctaccctgctcagagcctccatggcacccatcttacccgagtcaaagccccgtccttcagtggcccttgggccttgtgcagtcactgtgtcacccccaacatccccacctctgccctcgccctgcccagctgcccrttggtctgctcctgcctcctgccgtggcagtgccatctctcctatgcagagccctaggcacccactrccctgtgggtcatctcttcaggccttcaggtttctgtcactcagttcccctggccctccctgacggccccaccgaggacaagagccacctccacccccagcaagatcgccctccttgcctgctttgcttttccccccagcacgaaccactgctggccacgctttgtgtttgcttgtttctgtttccttctattggaatctcagttccttgagaacagggcctggtttttcactgctgtacctcccgtgctttgaatggtttctggcacatagtgggtgcttagtaaatatgcgatgagtggagggactgccccacaggctgagtgaagtcagtgctgggccagagggcagcataggcaccatggggacccccgggtgggtgctgagccccaggcagtgagcccgtgtgctgcccctgcccagccttgcccaccctgcacaggttcaaccgggcagcgctcatcaacgtgggcttcctggagagcagcaacagcacggactacattgccatgcacgacgttgacctgctccctctcaacgaggagctggactatggctttcctgaggctgggcccttccacgtggmctccccggagctccaccctctctaccactacaagacctatgtcggcggcatcctgctgctctccaagcagcactaccggctggtgaggcccggacagcctgctctgctcagagccgggagctccctccaggctgcgggtggtgggaaggatggggcagtgcctctggggcccagcagatggagccctgccctggcctagcaggagaacttgggagcagccagagtgcgaagagcaggcgagccagtcagccgcagcagcagaactgcttgcacgggggcttcagaaacctgggtggttagtggcccttaacactgaagagtgtaggggcggttcaggtgyaccttgcccacctctcagacagtgtcaccaggaccctgtttctctgtgcatctcccagctctccttccctgcactgggtttattggcaaggtggtggttgttactgcagtctgtatccatctaggccccgggctggtgggagatggggcccttcccttgtagctcaggcaggagtcccgcagtgagctgcactggctcttgattggccggcttgagtgctgagcccacccctcagccagtcactggctggtggacgggcaggcaggaagaascacttgtggctcaggcctgggtgtcctcctctccaggccatggcaggggccagctttatgtaaatgaagcccctgagccaggtgcaagaatgggtgtctgtcatggaaccctgctacccctctcacacacacaggaagagatgagggcagggccaccaggagaaaggggaatgggggaagcagaaatcaagtaggagctggcgcttctgcccatcgacagttccccacagagatcccctctgggcagccagcygtttttgagaaggtgagcctctcacacaggttcaaggcccygtgagaacgggagagggcccgggacgcgctgcttcctgccgcccgcactgcagaagtgcaggagcctgcaagcacccggggcttattcagaggcgctgggggagaggggcactcccgagcggtaggagaccaaaggcccccccccccgggaagatgggccgagtgacgctgcttgtctctgtgtcagtgcaatgggatgtccaaccgcttctggggctggggccgcgaggacgacgagttctaccggcgcattaagggagctgggctccaggtgagattccccgggccccgccgccacctcagctgcggtggctgccctgagattttcttctgtttcctcagatgaagctcctggggtctggagatggccctgattctgatccctgccctaaccctgccctgcatggtcatctagccagttccttgccctgtgggccccagtctcctctcctgcaggctgggagtgcaggtcccttcctgtgggacctcgggagctggtggtgagggctggggctccaggaagggcagcctgaccccgacttccttggacctccctagcttttccgcccctcgggaatcacaactgggtacaagacatttcgccacctgcaygacccagcctggcggaagagggaccagaagcgcatcgcagctcaaaaacaggtgctggcagggctcctcaytggggacggataggtggtcatgtggggagccagcaggcccgggctttcaccaagttctccttggcccaaatggtcccatcctcccctgcttggcccaggtcagtcgacgggcattctgcttgggcaccgtgccctgctctggtggctgctgtgggcaccctgggcactgtgggtcagcccagacctcagggtccaygcaggctggcagggtggggtggcgraggcgtagctgaaggtgccagaatcccagccacacccgggatgcagggatcccaccctcaaacagccccttctctaggaggcttatgcatccaactggagatcccggctcgcctgcttcctagtggggcacagccctgggcaagaggcttcactgctttgagctctgggttcttcctctccagtggggaccacaggacctctgatggcgaggttgtgtggggtcagtgggtagctggcacccatgcagccctgagtccgtgctctttcctctcttcctccccaggagcagttcaaggtggacagggagggaggcctgaacactgtgaagtaccatgtggcttcccgcactgccctgtctgtgggcggggccccctgcactgtcctcaacatcatgttggactgtgacaagaccgccacaccctggtgcacattcagctgagctggatggacagtgaggaagcctgtacctacaggccatattgctcaggctcaggacaaggcctcaggtcgtgggcccagctctgacaggatgtggagtggccaggaccaagacagcaagctacgcaattgcagccacccggccgccaaggcaggcttgggctgggccaggacacgtggggtgcctgggacgctgcttgccatgcacagtgatcagagagaggctggggtgtgtcctgtccgggaccccccctgccttcctgctcaccctactctgacctccttcacgtgcccaggcctgtgggtagtggggagggctgaacaggacaacctctcatcacccccacttttgttccttcctgctgggctgcctcgtgcagagacacagtgtaggggccatgcagctggcgtaggtggcagttgggcctggtgagggttaggacttcagaaaccagagcacaagccccacagagggggaacagccagcaccgctctagctggttgttgccatgccggaatgtgggcctagtgttgccagatcttctgatttttcgaaagaaactagaatgctggattcttaagtgatatcttctgattttttaaatgatagcmcctaaatgaaactttcaaaaagtatggcaggccagacaaaatgtgtcgtggaccgctcacatgtcacttttggctgaggggcaaggggaggggtgagttacaagctggcaaggaattggggtggggcggggacgacaagtccagggggaggagaagccaaaggtgtgagggttcctgtactacctccaccccaccaaggcttctgggcagcccccgaatgcccttctgagcagtcttaccaccttcaggctctctctgggtaagcttcctccggcctcactgagacacggaggagggagagcggctgaggagattcacccacaggactggagagaggcaggcagggcactcagccggtgcctcgggtcatggcttgagtggggaggagaaggggagaagtgggaggatccctgtggtgttccctcagcacagagggattacagtggtcactgaatgcccaggagcagtgagaagacatgaactggggagtgctcttgggggaatcacttggagggaagcccagagcccatgagagtgggaggcaagggaccctgcatgtaggccactccaaggcatttggctgccaaagatgcaaggcagaaggcagaggagaccatcaggccccagtaatgtgggtttgttttaacaccaggacacctggagtcctgaaggaagggattcctgagcaccatcccagagctcaggaaggtggaatccacagctctggttcaaaagacttctctgaggatgatcagggctgctgtgtgcagttgtgtgggttgcgcactgtgtaacctgtgtataagccgagggatttaagcagaaagggctggggtaaagcttcaggttcaggtgtttagtccagggtctttgtgatcctaaattgaccttccccatcgattcagccacacccactattgtgatgggcagacaggcctcgactctagtgcaggggtggtggagaggggactgtgccagttccctggacaatcccagctgcttcatcttggactgacatggacaccaggcagtaacaccagctcttgggagttggtgggaacaggtgtaatatcaaagctcccagctctgcactctcctgtcacataggaagacctcagaaaatggaggttccttcctttccacctgcactgggggagtgcaatgagcagaagaaaagcgaaggtccctccaccttctgagatcagctgacacctgagcttaggtgcatccctagccctgcagcctgttgcttcccttgaccgccacccccacctccatcttcaaggctgtgctgggcactccaggctgggcctgacgcgttccaaatctgcagctcccctcactctgcatcctgggcctccaccactctccaggagagtgggagacgcctgagccatgggtggcgagaagcggcagtcctgtgccgcctcagtgccccacttgcctccttcgtggaatggacttgacatccctgcctcgctggccagggcgtggccgaaacctacccaggatgtaggagcacctggcacagcgcttggccagtgaggcggtggttgcaataataataaccatcccttgttgaacattcaccagataaccaaattctccacaccgcatttcacttaggcctccctacctaagagctgggtcctaattcactggttctgtacatcaggaaggcaaagcacagacaggcaagtagcttgcccaaggtcgcagagctgtaagggatggggggctgggattgggaacccctggaatccactttcagagccaggtttcttcccctttgccctgtacagcaggtgcccatgagcaggtgttccttccctacaggcctccctcctctcccctgctggaaagggcagatggggagggctgagaggaaaacaggggcatggtggagatgcagaggatctgcctcaggctccgctgcctcgaggaagacagggattctgctgctgggtgctgaggagcgccgatggggcattagtgggacccagagtgtggcactgtaaatgagagctgtgtggagtgcttggggaaggcttccccgaggaggcaaagtcttgctggtggagaatttgtcagcaggaaagggaagggatcatcatgtgcaaaggcaggcagcctggagccagcatgtgtgtcaggtacccaggagcagctggagtgttcctggcacccacgatactgtgcagaagtggggaggtgggcagcagagggaaggctggggtgagtcatgaggatctgtgaatgccacactaagcaacttgtactttattctaggggtgcaggggctttgagaagtttcaagcatgggagaactttttttgttgttctttttgagacagggcctctctcactctgtggccaaggctcgagtgcagtgacgcgatctcggctcactgcaacctctgcctcccgggttcaagattctcctgcctcagcttccggagtagctgggattacaggcatgtgggaccacgcctggctaattttttgtattttcttagtagagagatggtttcactatgtttgcaatctgcccgcctcagcctcccagagtgctggaattatgtgtgtgagcccggccaggggagaacttttgaacacttacctgtgttctatgacacagatcctttgggggataacaaagatcctttgggggacccagggtggactgcagggtggagtctgaggaaggagagcacccagtccaagggagagatggtgaagccagaatgaggcaggtgagtgggcgtggggatgctaaacccccagagccagtaggagccctccctagcaggatcaatcagacgccatcaggccttcccttcacggagggtcgactccactgcagactgtttcccaaaaggccaaatggacggacacatggcctttttgctatctcagccctcatgccttgagaacatattttacaaaacaaaaaaagagaacagcaactttcagtttcagcatcaacatgtaaacagcttggcaaaaccccatctctactaaaaataaaaaaaaaattagctgggcatggtggcgggcacctgtaatcccagctactcgggacgccgaggcaggagaatcgcttgaaccctagaggcagaaggctgcagtgagctgagatcacgccattgcattccaccctgggcaacaagagcaaaactccgtctctaaataaataaataaataaataaatataataaaaacaccaagagcgatctctataacaagaaaaaagagcctgtcttactgaggccctacgacagtcacccagctccagccgcctctagccttcctgtctcacctaaggaggtgggacaaagctaagacacctgtgaagacaccagggatacggatgcactaaaagaccaagatttaatcataaaattagaaacgtgcttccccgtttcctaaatcataccaccacatcaacggggctccagtgtaacagcagtggattgtagctgagggagctattaggcacagtaatttttttttttttttttttgagttggagtctcgctctgtcgcccaggctggagtgcagtggtgcaatctcggctcattgcaacctctgcctcccgggttcaagcgattcttctgcctcaacctcctgagtatatgggactacaggcatgcactgccaagcccaacttatttttgtatttttagtagagacagggtttcgccttattggccaggctggtctcgaactcctcacctcaggtgatctgcccatcttggccccccaaagtgttaaaattacaagcgtgagccaccacacctggcctatgttggtttttaaaatgttaaacctgttttgcacatatgaaataaatcctgttaaattgtggtgtattcacagattcacatttattcataaattcaatttgctaatattttgctaatagttgcatttatatcagggatccctaaccctcaggcctgggactagtaacagtatcaggccacatagcaggaggtgagtggcaggtgagccaggattgccacctgagctctgcctctagtcagatcagcgacagcattagattctcaggagtgtgaaccctattgtgaacagcacatatgagggatctaggttgcaagctccttatgagaatctaactaatgcctgatgatctgaggtgcaacagtttcatcccgaaaccatctgccccacccaccatgtcccatggaaaaattatcttccataaaactggtacctgttgccaaaaaggttggagaccgctgatctacgttcatgagaggtattggtctgtagttttcctttcttccaatgtttttatctgattttgatacaggaaatgctaacttcatgaaatgagttaggaagtattcccttcacttctattttttgggaagagaatgtagagaattggtaccatttcttccataatgtttgctagatttgacaacaaaaccactgggtctggtgctttcttgtttgcaaggttgtttattgacttccataatttatcaatttccataatagatataggcctattcagatcatctcttttccctgtgtgagttttggttgtttgtgtctttcaagaaattgatctgtttcacctaagctgtcaaatctgtgggtacagagttgctcataatattcttttgttatctttttaatgtccttgggatcagtagtgatgacccctttctcatttctgttatcagcaatctgtgtttttttttcttagttagcttagctagaggtttatacattttactgacctgtgaaagtactgtttttatttcttttttctattgctgctgcacaaattagcacatttttacttcactgaacttttctattggtttcttgttttctattttattgatttctactataatttttatttctatccttttgcttgctttaggcttacactgatctttcttctctagtttcctaagatggaaacttagattatgaattttaaatctttttaatctcttctaatataggcattcaatattataatttatctccaaccactactttcactgcttcctataaattttgatacattgtattttcatttttatttagttcaaaacattttaaaatttctgttcagacttcttctttgacccatctggtatctagaagtgttttgtttaatctccagttattttgagatttcccatctacgtttctgtttttgattttgtttaatttcctctgagagcacactttatatggtttgtattctttgaaatttgtaaggtgtatcttaaggccaagtatgtagtctatcttggtggatgtttcctgtgagcttgagaagaatatgtactctgttgaatgaagtatactgtaaatgtcaattagattcagtggcttgacagtattgtccagttcagctatatccttactgatttttttgcctgctaaatgtgtcaattactgatagaagagtgttgaagtctccaactataatagtggacttgtctatttctcttgcagttctattagtttttgcttcacatacgttgatgctctgttgttaggtgcatacacattaaggatttaacaatgtcttcttggagtattgaccctcttattatataatgcccctctttatccctgatcatttttctccctctgaagtttgccttatctgatatcaatactgctactccagttttcttttgattagtattaacatggtatatctttctttatacctttatttttatgctatttgtgtctttatatttaaaatgggtttttttacagacaacatatcattgggtcttttttttttaatctactggcagtctttgtgttttagttggtatatttagcgccattcacatttaaagtgattattgagatagttggattaatatctaccatgtctgccgctgttttctagcaggtgcacttgtccttgtttttcttaccttcccttctttttctgtcttttctggtttaactgagaattttacatgattccactctttttactttctagcattataattatacttcttt

SEQ ID NO: 96090 - DNA, 31106 bp, Homo sapiens
  misc_feature (1)...(31106): n = A,T,C or G
cggacacggaccaaagctggcagaggaagaaggagaaaattctgaatttctagggtccaaaagttgacaaaaccattagtaggaggggtgggccatgttcattaagccatagtggtccctagttcattgttgagcaagttttagccctgcagttttcaccaccagcacctacccagcattctggtttttatgttttttatgatctatgcagacaactgtgtattctgttttataacagtttgtttgaatttacttacagttaaaaaatttaaatatatttatgtttgtacgaaatcttatttcaatagatggaaattttaatttttttttccttcatgttgcagggtttggggtggggatactttcattgtagaggtagtttattagactcataaatcacatgctgaatgaatgccattactgatccttgacataccatgtatatattcacttaatgtgtactgcacaattccgaacattggttactcccttgactgtttctgacataattctgggaggtgccaggggcattgactcccactacctattctgctatccctaccattcagtgacctgtcccttcatcttgtactcacacagtggaattctcagcctgagcatagaacatttgaaggatgtgtcctgccattcttcccaggaatgtgcaagtgaacactctgttattagatgcctatgcaattattttttctaaatagattaaccagtggggatgccaggcatattcatctgttcaaatcaagattgggtctcttgatgccaaaggttagcagcaacaggacatggcttctgttttggtaacattactaacatagcgcacattcctcaccgtgttgcctaggagcttccagtgcagaacagagatgtggtctgttctcggtgcatgccatgtgcagactctgaagatgagaggatgtcaattggcagaaggagctacctgaaggagatgaccaaacaaggatgtgaagaatgctagttttggccaaaactgatttgaagttgtaatgaaaaactgggggaggtggctgttgaccaggaaaggatcttgggacaggataaacaggcacactcaagactctcctaacttctgattttgtccaaagttatcttttcttttaacatgaaaacgaggtatgtgttagactggggagttagcagatagctgggatggaagacagcacaaacattaaggccttgttcctgcctaggtccctttgcacacaaccttttgagttagaagaaggcaagatggcagtctcactgtcttttccttccatagataatgtcttgctgttggatggcactgacctagtggctagcagcacataagaaatagctgttattttttgagcaactactacggtccaggcaatgtatgtggccttcatttaatcctcatagcaaccctatggggtataggtattatcatctcaatttccagatgaggaagcaaaggcttagagtaacaaataagccactttttgtccatggcagtggaaccacagtgcccctactcttcattcctgaagaaaatgctatattttgactccagtattgattattttcctgtttttcttctagtgaaaagtagtttatcagttatgtcccataagcttaactctcgcttgttttctctttcattaaatggcaatttattggaggtagcgctgtataaacaggggacagtgtgtgtatctgtttgcctgaagataagaaaagggaaagggtacttctggaaagtgaattatttagcttaaaattgagcagtttccctaaaacatgagtcagcagcaggagggtatggatcagccagaccaggaaccacaggcttaattattagctaatggggagtcaagggaagaacagctacccacttcccccatcgcctcctcacaaccgtcttgtttgcccacagtcttattctccccatgctgtgatcctgtgagaggagcattagtgaaagagtgaagagacaaagtataaaatgtgtgagatcagcctacatctgcaccctgcttctgataaaagttaacctctctgagacctggctttcttgtccataaaatgggaaaaaatcatactaacagggttctaaggattaccataatgtggataaagctttgatccagcacaatgtcatcacatagaagaatgagttagtggcagcagttattaatgtgatgctagtctatgtgtcacaaatgatgttgcactgaggggtggagggatgggggacgggtgcagatgcaagaggagatagttttcagaggaatgtgtactcaggagggactactcgggctccatcaaccatcaggcttccacaggaaacttgggtcccaggcatctagagttctcctagggcccctggatttcttttacttctgaaagatgagaaatagctgttctgctgatgctgccaactcacggagagctgggaagctccataaacttcacaagctattgccgtaaattggaagagatagagggggacttctctttgttaggcgctgtagttgtgctttttcatttagtccttacagcagccccagcagaggttgtgcctcgcccatttcccccaggcattcgccattctgctgtatacccacagagtcctgttgcaagtacctgagactctgcctgaggacttctcttggtttgtgttggcacaagctgagagtaccagggagttagtgcccctgggacagctctcagccagtggaagtgggaggatagataccccagcttcctcactcagtgagggacaactctaaggcacattctacctatttctcagggttccctgtgggagtgaacctctctaagctcccagtaacaattaacgtacacttccttggcttctttctcttcctacctggcttccagctcctcttctgtattttcctgatcaggactgggactagggtgatgagcctttattcttgggttcatctaagtgcaaggttggcacccgtatgaacctgagagggtctctttacattctgtaccctaggcatatcatttgcattgccctgattctggccctgtcctggatcacttcccaaataaagttatttgcattcaaattaggtctgcctctgggtttacctaacctaaagcaaatcctatgaagacatcagtctccaagttttatacaaggaaaaccgaggctcagaggaataagaaatttgtctaaggtctttcagttggtaatgagatgggattttgaaaccaggtctgcctgaccccagagctgaagctttctgtactatagcacactacttcctacttctcatttcagtcacaaaactaatgactcaagggaaatttcaggtttggatgagctcatttttgcctgtgaatcagggtagctttggccttaggttgttagcagatgggaatttggggaggggaaggcaggtagtaagtggatgagagggttgtagttgtcagtggaaagatggactagtggaaagactgctgaaaccatatgcaccaggaagacagtaagagcttgcttgcttcctctcagtttcaaaagccctggactttttttttttttttttttttttttgagacagtcttgctctgtcacccaggctggagtacagtggcgtgatctcggctcactgcaacttaccctgcctcccaggttcgagcaattctcttgcctcagcctcccgagtagctgggattacaggtgcacaccaccacgcccggctaatttttttaatttttagtagagacggggtttcactgtattggccaggctgatcatgaattcctgacctcaagtgatccgtccacctcggcttcccaaagtgttgggattacaggcgtgagccatcatgcttggccagccgtggactattgagattgtgggagggctcttcaatttaacaaaaattaattgatacttgttccttgccagataaagaactgaggtctgaggctgcacrggtgaataagaaacattctctgggagcccatagtacaatggggaagaagaacacataaacagatgcctttaataaacagatataaatgcagtgatacaagaacatgcatcataatacggaaccaataagcagaccacactcagctggggtcggccaggaggagcttttcagagaagggctcctcattgtcgttgatgattataatttaagggatgaggaaaaatgaggtgaaaaggtgggagaggccaaagggagggtcattccagacaagtcagtgcaaacaaagacacaacagaagtagctcgatgtgtgtaggagagctgcaaggcacattcacggtataaagggtgtggaacaaattgggggagcttattgaggatctctgtgcctggcatgggcactgtgagtggtgagaagcctgtgagcaagcgcagagggaaggcctgacctcccagcccatcggcagtgctctggttgtgcccacctctcccccagcaaactgcctttcctcattccttagctccatctctacagttggagattggcactaaggggctatgagggaacctcgtgaggacttgtccttccctttgttggtcagtggccatctggtgtctgaagagaaccgctggcagctgcagtgcctctgctacagccaggctgtcccagctgctcacagacctcaagctcagccatccttctccctccactggccttgacccagactttccctggcattctgactagggaaccaggacccctgctcctggggtctggacacagaccttccagaaacgcagatgaagagccctggccatgcttgtcaggggcatatcctcaccctggctcaagaaatggcaggctatctgcatgaatcacagctgggcctttcatagtcagttccacattctcctctcccaactgaacaaagttgaaagggactgggatcccaggctaggcaggatgctgtgttgtttgtgacagccactctaccctctgccaccccatcccccacttccctgcctttcacagcctatatgcctggttggtacccagtaaacttcacagcaggactgatgtttggcatgtttcctggcctcttcatgccactactgatagaggagccactatctctggtctccatcctgatgtcatgtggaggcctactatctgtggatagagttactgctgacaaggcagcctgaagctttaaagtgtatccatgccttcaacaaagattgttgcaggctgtctagtattctacattggtgccccaaggttctgtgcctttgaggagaaattcccacagaaaaacagcttgttcgccaatagctccacagcagcctaacactccccttcttccagtagagaagacctaagatgtgaacctactctccctgcgcagcctacagactaaaggctagactccgcagtctgcctgtcacctcctctcccactatatattcctaccttggtgtaccctcttcaggcgcctggagctgcacctcattgctgtgtgtgtgtgatttgtggttgtgcacatgctctccactttgtcaaggaccacttttgtcagcatactgctgttctttcttcaagactcagcttcttcagctagccctgcccactctctgcagagtcagtcccttccgcttgtgctcccacattgcctcttgctcaaaagtacttaccataacctttccaggctaggcgcctccagctccttctaggggcgagccaccacctcagaactcactatatttgcaaaataaacagccctcagcattgtagagggaatggcccaaaatcttagacccagttcaacgctccacttcgcggtaatcatcttgctcaagttttcaccacagccttgcctagcctgggctactcttagggcaggcttggaaggaagtgcagcttcctgaattagctgatgtttggtaagtggtggtggaggaaaagggtggggcttgaggatattataactcgggtcacccctgagtgttgcttttggtcattggggtgcctcatattgccagacaagagctcagacctgaggagagtgactagcttctctgtgtcccaggtaagcacttcggtctaattactgcctgctccttccrcagctgtcttgtcctcatccctcctgtttggctcacaccaggggaagtggacactggaaagattaagccagctggttctctttctttgtttttgagatggggtctctctctctatcacccagactggagtacagtggcacagtcagggctcactccagccttgacctcctgggttcaagtgatcctcccacctcagcctccggagtagctgagactacaggcgcacaccaccacacccagctaatttttgttatttttttctagcgatggcgttttgccatgttgcccaggctagtctcacattcctgggctcaagcagtctgtctgmctcagcctcccaaagtgctgggattacaggtgcaagccaccacacccagcctgccagctggttctcgatggcagctcccaacatcagtagaggtccctggggtacttttcaggaggaaaactcacttcgtgtagcccattcagctaagggaagccacggggcccttaggcaaacagaccctgggctctggggatactgcagtgaaggagacatgtccctccccacagggaatctcagtgggaagagacagagctgaatacatttacctagcatataaatattagggctacttggggattgcttcacagattctgtcatgtaaaaatgctgaataaatattgaatggatgagggaatgaatgagtgagtgaatgaataaatgaactagctgggccttgagaargacacgtgtgtagcccttagtccttttcgaaggtaattgccccagttacctcattttatccttgaaatagacctgcagcatagaacaagaattccacacccctatttgacagatttggaaactcagcataggtatgtatggtttggggagatttatcagaagctgatttgttgctttattaaataaaaaactacccactccccttgcttccaattttggaaaggcacattagcacatacctataccagaccctgtgccggccatgagtgcagaggtgatcaagttgggtggggtaaggaggtgaagaaactagaagcagagctrtcagtttaggaggctgttgtaataatcaggccggaggatggtctggtgcagtgtgtgggaatggggaggaggggatgcagaggagagctcttagagagcctgagatccaattgcatagaggaggtgagggtgagggatgcgcgcaggcagcccgaacggccgtgtgagtgagcacacttcgatgtctccagtcaagrtggagaacagaagagctttgtgggggtaaggtgatggaaaaatgagtatggctttgttgaatttgaggagcttctccaccatccagatagtgatgtctaacagaccactgggatttaggatttggctgaggccaaaggtagatttgggagccctgacacagctattaatgaaaccttgggaatgggcgagataaagggagtgtagagggagggcawgaccgaaacttgggaaccccattgtctgaaggaasagaaattactgatgaagactacgagagactcaggaaggagacctaggagagactggccgtgaaagccaaggacagggggaattctgtagcaaagagaatgactactggctttgcatgcctgagagagggcagcagaggtggggactgaggaaaaggcttgggattgggcagttaggaggtcaccagtgaccacgtggagggcaaattagtgagcatagtgggagtaggcaaggaggggagtgtaggggtgggaaggtactatatttccagaagttctgctgttgcaaggaagggaggtaaagtgactcagtggacagatgtctcttcccatattgggccctctgctgtgtttcccttttcccccacccctaaagagcacctgactcactgagggctcccttgggactatggaaacagcaataccacctccagctcggatgagcgaagtatctgacatttctacagttccttacagtgtgcaaaggaccactaactcctttaatcctcacaagaactgagcttttcatgttatagaggaaatggagaatcatagagtttcagttcagattcaactacataaatctgaatgcacatctgagcaagttcctttgctctcgtgatctcatttgccccacacaaccctttgatacatgttggtcccatttcacagatgaaaagcctggaggttgagatggggtgcagctgccttgtggagagcagggttcccacctctgagtacagggctctttctgctctgcatcacttcactgttaaaacccacctgatgtttatgttgcacactacatctcataaagcatttccccaggtgttattctatttagtgctcacaacaaccttgtgagggtagatattatttcctcctgttttatggatggaagctgaaattcaaagaagtcataaatgacgtccaaggtcaggtcactagtggaacccctttctgaagcacagatccacccctgtccatgacccctgttgccttcaggatgaaattcatgtgccttagcctggcacaatggctgtcccttttccagcctgcctgcttctctggcaggtctttggttccctctttgttccaagcctctagcatgtccctgacctcccaaccacagcagcatgtccatctattacatgtggccatcttgctcactgcctgtgctaatcatactgtgattgttgatgagactgtgaggtccctgagggcagggcctaggtctgcttcatctgtaccacaacgtccagcatagcaggcatcaggaactggtgaatgtcaatgaatgacagaattaacgaatggcatttggactgaaatcagcctttccagtgctctctcattagacatgcttgtgaaaaacaagggccttctggttgactgctacaggatctttgatggttggaggttctgaattctgntcccagcttccttcctggtccccttcagaaggaaggaagttggtctgggttacagactcctagggcctatagagtaaatggttgacccaggttgtcccttttctcccataggtggccaccttccactgtggaagctcatggactccattgggtcttcagggttgcggcagggggaagaaaccctgagttgctctgaggagggcttgcccgggccctcagacagctcagagctggtaagttcagcactgggttcctgtttcatgcttgtctaaggccttcaagagcagcgtgactgaagctgccatggggccctgggctctcacccatgcagcccctttccactgagcttttcatatctgagctggtaacgatctcctttcatgctccaaacaactgcaaggttgggctgatcatcttacaggtgatgaagagggatatagagaagtgttatgacttgagtttaagacatgacaggagcttgagctgaggtgtttcagctccaaacatgtcatttttgccaccttgccacacaggtgccgctcccgccccaagtgggtgacacagtctagagtggactttctcagggttatctggtcaaaagttgtgttcttgagacctttcctttcccgcctctccagttcctcctgcatgtctccctcaatgtagccgctacaatcaggcacacagacgattttagtgccaaactcatgcctgaggcttgctcagaagtgagtttcttctttttctgtcatcttgaccaagatttagaagctgtctcataccacacccttgagcaggaaactcttgtgtaagccatttcatatctcttagtctctgtttcctcatcagtaaaatggaggaaaataaagtctaatcctccccaccccctgaaggctaatggagataaaggacttgcctatggccgggcgcggtggctcacgcctgtaatcccagcactttgggaggccgaggcaggtggatcacctgaggtcaagagttcaagaccagtctggtcaacatggtgaaaccccgtctctactaaaaatacaaaattagccggcatggtggcacatgcctgtaatcccagctacttgggaggctgaggcaggagaatcgctcgaacccgggaggcagaggttgcagtgagccaaaattgtggcagtgcactccagcctgggcaacaagagcaaaactccatctcaaaaaaaaaaaaaaaaaaagtccgggcgcagtggctcaggcctgtaatcccagcactttgggaggccgaggtgagcggaccacaaggtcaggagatcragaccatcctggctaacacggtgaaaccctgtctgtactaaaaaatacaaaaaattagctgggcatggtggcaggcgcctgtagtcccagccactcgggaggcygaggcaggagaatggtgtgaacccgggaggcagagcttgcagtgagccaagatcgtaccactgcactccagcctgggtgacagagcgagactctgtcaaaaaaaaaaaaaaaaaaaggacttgcatagaggaggtgcccactaaagggtacttgagtcattctctgcagtttctttagttttctggcatattctgacatccacttgactaggcttgttgcccagattgtggaggcattacccctcgctgcatttcatgctcccacttcccccttgtccaacctgtaccccagaccctgctgcagacagttcttctgtgccygacccacagccgtgcctcaggagtgacagcggtggctgggccacagtgcctgcccagccaggactggctctagggcctgctgtcatctcctccctcgcttcttgcccctccctgatgacactcctgtgcaggcccacatctgccctgctggctccatcacatacacctgcggttgaaagaatccctttcggctttgggggacttcacagggacaccaaatttcccatggtcctggacccccaactcagcaccacaggccttaccctgtgctccccttgccatgaccttaggttgaaaaaagttagttaaccacgtgtggccagttcccagtaccatctcagaggcccttccccaccccttccaccaggcttctctttgtcatcagagagggtatggagtcaggctctccaggctgggtgtgctttgtgctctgaggacagggaatccgtgttccactgagcatctcctatgtgtgacactgttcctccacttcaggtttgctgtcgtctcagtcctcatggcatctctgagaagtaggtactattgttcctgctagatagaggggttgcttgctcagagaggtgaggtgatgggcccaggccagcaacacagcaagttggtgacaagagccagtgttgaaaccacattggacttcacatgctctctaatgcctttctccttgctcttctgtctgaggtctctccctgctcttcctggggtgtcaggggtggctccgatagcttctcctggcttgtgtgtgcctcaccaggatctgccagggaagtccttctgtctttcttgcagttctgctgtcttctagtctctcctcccgaacatctcaatatgcccaagaggaaaaggaagaaaaacaatttgcccaagccattgacttctccgtgactctactgttttcatgaagcaatactaaaacgcccctcccatcccaatggcacttggcacttccacatacattacagcctttaattcttatgccaccacaaccatccaatcaacaaatcctgcttccagctggtgctcctcgtggccctcagatgtagccttgagcaagacatagtccctggcattgggggacttccaagtactattattttctcagttttgcacgaagaggtgactgaggctcagagagaggtgtgactttcccaggactgcagagccagaaaaagggagtgcgaggactcagctgtaagttttctcaagccggatcatctggggtttctttccagcaactttcatcagccttgagttcttttcaagggaactttctaggttttataaagcttcacattgacatagaaacatctctgcattcaggtagatatgggttcaaattctcccctgccccttcacagctgcttggccctgcagatgacttgccctctcggagtctccgtttccatatttctaacacttgggcagctggggctcagaggggcaaggctgagascccgcctgtcctgcagctctttgactttgctgcccactgcctgagttcctggatgtgcagcctgtgagcaaacagggtctgcagcttggcttcagcttctctttcccttgtcaccagataggcctggtcagggtgagatagagtgggcatgggcacccctagcaggcatggctgctggaagcatgtgctgtaaggcaaacgtgtaagtggacatctggcaccccagttaggatgattcgccttcttagggatctgtttcccattctcttcctaaagcaagaggtgggactgagttgtccttatctccctcaactggcagcttctcctcccagcctctcctccctggagcggccttattatccaggtgcctgagttgttattccaaagataagtgtccagtttggggcaataggtcattgaaatggaactcctgtgtgacaggaagtgggggctttggaaagtctgagcctgaggaggatggagttgccaggctgtgacccttcaatgaatccagggaggctgttggggcttctttgaaggatgggtgagagagtcatctaggggagggtatttgctcacagggatgaggtccctggggctcttaagctactgggcttctggtggagtgacagcctggggtgtcctggcttctgccttccctgccttctcacctgccccttcagactccgatccactcccggatcagtcttctccaaatccatcccctygctcttcccctggatcttcgaatggcttgttcccttccttcatttagatcacctcctcagggaaaccctcttgaactcatatctaaaaatacctctttctaccctggtcactctctaatttcttatcctgcccccctacgtttaatagccaccatcactactggaaccaaattgtatgttcacgtgcttaatttctgtctcccaccctggaatctaaagcatttgttgcttcttgggtggttatgtgtgtgcggtgcttagaatacagctgggtgcatagtgagggctggagcaatgttttgggaaggatgactgactgaaaaaaggaccatcctctgcagtgtggtctccaaatgctctcgtgctgggctttttcaggcttcagagtctgagagtggattaggagagggaaacacttgaagtttgttcgtgcatttgtttattctcttgttcgttcaacaacaactcactgagagactcttgctgtgggtcctggggagccagagagcaatcattagtggtatggcaggaagaaggtcttgccaaaccctgaattcaaagaagaggaggggtagggtagaggatgtaagaaattgagaaggagccgtgaggtaatggggcaggaggaggaagaaggtgggttctctttccaggacagagccttctgaggatgccagagctgggtgcaggctgttggcaagagagtcagggtgtatgaagagccgaggagtgggctgggcagggcaggcctctgccttgtttggaggtggggagtctggccagcccaatggtgctccttcccagatgttggcctgtttctccccaggtgcaggagtgcctgcagcagttcaaggtgacaagggcacagctacagcagatccaagccagcctcttgggttccatggagcaggcgctgaggggacaggccagccctgcccctgcggtccrgatgctgcctacatacgtggggtccaccccacatggcactggtgggtatcatagattgagatgcgtggccaggcctggaagagggtactgatctaggggagggaaacgttccttattcctgtcccccatctctatggccccttgaccagactttgcaggccttaggaatttgggaagtgggcagagggctctggtcttgccagctgcatggctttctgtgacctgcttgccctccagagcaaggagacttcgtggtgctggagctgggggccacaggggcctcactgcgtgttttgtgggtgactctaactggcattgaggggcatagggtggagcccagaagccaggagtttgtgatcccccaagaggtgatgctgggtgctggccagcaggtaagcactcactgcccagcctctggggtctgggggcctggctgggtggctagggctcwgatgggcaaggctgagcccccccacttctcctgcagctctttgactttgctgcccactgcctgtctgagttcctggatgcgcagcctgtgaacaaacagggtctgcagcttggcttcagcttctctttcccttgtcaccagacgggcttggacagggtgaggtggagtggacatgggacgctgggtagagggtggctgcagccccatgaaggccgtcagaggagtaacccagcttntctacctccagagcaccctcatttcctggaccaaaggttttaggtgcagtggtgtggaaggccaggatgtggtccagctgctgagagatgccattcggaggcagggggtgagtggagggaggggtgacaggagggctgcccatgttggcctgggcctggcacacatgcgttgggtctgggcttctgagagagttgctttcctcttctcttcatgtcctccatccagtttaacctccatccagtttaacctatacatggtacatgttgctaccattcccattgtataggttaaaaaacactgaggctaagaaaggtcaaataaacattcaggacctggggcaaaaaaacatgaatagactttgacctcctcctcaaggttttcacagtctagatggggaagcattctaataaaagattgtccgtgtcaaggaggagtgcgtggacaactctgggagcactacggaggaagcactggctctttgatcaggggcttgaaggaggagtttgcctcccttcaagtcaggctggggctggggcggatgatctagtctcagagaaggccacacacaagagtctggatgctggacaaaggctgatccgtctgggctaacctcttgtggtgagaagccagtgctgggaggaacaggcttggggagccaggcaggatgacagtgaggctggcaaggcgcagagttcaaggaggtgctcagtctcaggaaactcatcctggtcctgggagatggtgagggtggacgtcactgtgacctgggggcgcaagttgggggttagggaggagctgagggtgggattggaggaaaagttcctataaggtgggagcccagagcatctgtggcacaaatgtgtgtggcatgcagacatgtgtttcatggactctatgtatctccttcaaagccagggccccagccctgcccatcccctggattccctcctctggccactcaggccagccttgacctctgccctcttcatcatctaggcctacaacatcgacgtggttgctgtggtgaacgacacagtgggcaccatgatgggctgtgagccgggggtcaggccgtgtgaggttgggctagttgtaggtgagccatggaccatttgtgatgacaggtggagggtgtgctgcctggctagcaggccttgacagggttgtctctgccagacacgggcaccaacgcgtgttacatggaggaggcacggcatgtggcagtgctggacgaagaccggggccgcgtctgcgtcagcgtcgagtggggctccttcagcgatgatrgggcgctgggaccagtgctgaccaccttckaccataccctggaccatgagtccctgaatcctggtgctcagaggtgacctggcagggggccctgacctttggttccaggcyctgtctatgactgctctgctcccaaccccttctgtccctgttctcaggcccttaggcccctccctgtcactctgagggtctccagggagcaacctgggggccctggccaggttcaaagaaggaagggcccaaagttctagaayccagaattgtcaacccttgatcttccctgttcctgactctggcctgccctgacagtttgggggttgagggctggaagtggttgagcaaactgctctctgccttcctttgggtccttcttgttctccaggaggcttctgaatgtaacctatgtcagagggggcagtggggtctgggcatacacccacctgtcctctgggaggctattcgttgcttctggagtctccagtttgggagccccaaagaaaagaatccttctttgggaactcttggaggtagggccaggtggactgagggcttagaaaaggcttcctccagccacycttcccccctgcaggtttgagaagatgatcggaggcctgtacctgggtgagctggtgcggctggtgctggctcacttggcccggtgtggggtcctctttggtggctgcacctcccctgccctgctgagccaaggcagcatcctcctggaacacgtggctgagatggaggagtgagtcggggagatggtggtttagtgggggattcttggcttggaggaaggggatgatactctgttmccaaggtagccatggggctttagtgggatggggagcttctgggctgagccccaaaccacttccctttcccctccagcccctctactggggcagccygtgtccatgctatcctgcaggacttgggcctgagccctggggcttcggatgttgagcttgtgcagcacgtctgtgcggccgtgtgcacgcgggctgcccagctctgtgctgccgccctggccgctgttctctcctgcctccagcacagccgggagcaacaaacactccaggttgctgtggccaccggaggccgagtgtgtgagcggcaccccaggtattgtggaaacgtgatccgcatgattagttgncatgaacacgtgtgtgtgatacacacccagagggccctctgggatcacatgtgcaagccagtggacacgaagggcacttaggcagagggagggccagactgagctatgggaggccagaagacatccaaggagagaaacgatgcttccctttgtgtgtgcaagggtggaggccatggcgacacgggggcgtatggctggtgcacagaacagatttcaaattgaagtgataggggaggctggctatggtggtacacgcctgtaatctcaacactgggaggctgaggtgggaggatcattggagcctgggagtttgaggttacagtaagccatgatcactccgtggcactctagcttgggtgagagagcaagactcgatatctacaaaaataaaaaaaaaaaagtgatggggccttgggcttcaggagrccctaggggtctggggccaagctgggcacacctgtatgtatctgggggtccagggccaagccgtgcacacctgtgtgtgtctgggggtccagggccaagccgggtgcacctgtatgtatctgtaggttctgcagcgtcctgcagggkacagtgatgctcctggccccggaatgcgatgtctccttaatcccctctgtggatggtggtggccggggagtggcgatggtgactgcygtggctgcccgtctggmtgcccaccggcrcctgctggaggagaccctggccccattccggttgaaccatgatcaactggctgcggttcaggcacagatgcggaaggccatggccaaggggctccgaggggaggcctcctcccttcgcatgctgcccactttcgtccgggccacccctgayggcagcggtaaggacctggcctgartgtgggaccgaaacatgggctcctgggggtcccagtgtgtgctggggctggagccacaagccctatcccggcactgagggtctctgcccccacagagcgaggggatttcctggccctggacctcgggggcacgaacttccgtgtcctcctggtacgtgtgaccacaggcgtgcagatcaccagcgagatctactccattcccgagactgtggcccagggttctgggcagcaggtacccacagcctgaaccttgatgtcagaggtggggaagggctgagcagtgcctacgcctgacctgtcctgccccacagctctttgaccacatcgtggactgcatcgtggacttccagcagaagcagggcctgagcgggcagagcctcccactgggttttaccttctccttcccatgtaggcagcttggcctagaccaggtgagggagggccaagagaartgattcccaagggcctcctgcccccacatacccttcatggagtgggcaggaggcaggggaaaaggctgggcggtggcgggtctggggttggtggtggtggcagcactgctgggctgggcttgcacacagcctcagtttccccagacagggtaggcccagggttagggtctgaaccatttgggagcaggtcaggcctagactggggctgatcagaggacagatcgtccattttagctatagcactggtgtgtgggcctcagggtcctgcaggaaccagcatttgttcctgtctctagcaggggcttgaggtcgcttggggtttttttggcctctctcctcctcctttctttgtttccttctcagtgcctggctcagtgttgggtgcatgactagggtggcagagtgccaggcacaggctaagacacacatccctactcagcacacactttagcttgttcttacacaaggatgagggacttctcaatgtgcacaccggaagcctgtcacggaaacaatacctcccgggcctctggtccaaactcccaggaatctccctttcaacatacccaacttctgcttgaaagcctcttgccaaggagctcactgcccctgaaggcaacagttgcattcttagacacctgtgatcmatgaaaagcttcatctcacctactccaaccagcctccatgtgattttcaccccctgctcctgctctgacctctctctgatatgcaactcatttttttttttgagatgaagtctcactctgtcgcccaggttggagtgcaatggcatgatcttggctcactcactgcagcctccacctcctgtgttcaagcaatcctcctgcctcagcctcccaagtagctgggactacaggcacatgccaacacgcccagctcatttttagtagagatggggtttcaccatgttggccaggctgatctagaaatcctgatctcaggtgatccgctcacctcagcctctcaaagttctgggattacaggcgtgagccaccgcactccacctgatatgcaactctgtactctgctttcttttacacggtggtcctttggatggtgcagtgggccagtcttgctgcttggctgctctgctccaggctaagcctgctcagtccttttgattattccttgtaagatgtgagaagcaggtgagactccatgtgcaaatcggggggcggggtgggggcaagaaatatagtcttattaattttctgtaactgaacttaatttctgtgctgaaggctgggcgcggtggctcacgcttgtaatcccagcactttgagagtctgagacgggtgaatcatgagatcaggatttcaagaccagcctggccaagatgctgaaaccccatctctactaaaaatacaaaaattagccgggcgtggcagtgtgtgcctgtaattccagctactcgggaggctgaggcaggagaatcacttgaacccgggaggcagaggttgcagtgagctgagattgtgccattgcactccagcctgggcaacagagcaagactccatcttaaaaaaaaaatgttgggcccacattattttcaggggtgaaaacttaaccagtgtggggattgccttccccaggagcccctttggctctgcagcagcctttgctgtgcagaatttgcagggatgtgggaactcagggaggtgccccgggccctgctctttgggcacttgcctctgccacttcctctcttgagtctcgacaccttcctgtgcattatctggggaaggagggcagaggcctcctctgttctcagatttctcagatcccttctgaacaggggttcagcccagtggggagggcataggacacctgtctcaggaagtcatcagcaacctgggtctgacttccccctttgcctccccttccccactctagggagagcagcccacacagggctcttactcatcatctggtctctctcaaacgggttctttctctcactctatcacattctctgctttctgtttttgagacaatgagcctaggacaataaaaaacgggataaaaggacatattattggaggaaaacgttgcttactatttctaaaatcttctgccccaaagatttcctgaccyaccctccatgctcctcctctgagcaaagcagtaattttctcccaacagctgtagactaattcctgctccccctgccccctccctcagaggacgcacactaagaaaacagcattcctttccaggtaaagttgagccccgtgtcactaagtttaagtcccttttctcacaatctgggcactcagccttcatcctgcccaggggcctgggttctggcttttccattcctcctgcccctgcatttggaacacatgagtgactcgcccattgacacggctctatccctgaagctgagaattccttcctctagagtaacttggagttctttctgaaagggtgggatctgctgtcatctgggcctctgagccttctctgtcctcccctgtctcacacacagcactcactttaccagctctgttaattcctaacccaattacaaagggccattccttccgggcacacgtcttaaaatggccagaccctctgactgtctggaactaataatggaaaatgtaggttagatggttattaataggtttttgcacaccgaaagcctcctggggagtagggagcgggcagagggcaaggccttcaaccatacagcaaagtaggcaaggaattgtgcttggggagggtggaaagcctaggcttgtgatggatgcaggttttgcagaggcagagtgagcctgaaggggcctccagcttcctgccacttcctctcggtctcaccccagggcatcctcctgaactggaccaagggtttcaaggcatcagactgcgagggccaagatgtcgtgagtctgttgcgggaagccatcactcgcagacaggtaggagcctgttctaggggtgctttggggctgtggcaggccttgaggggagcaaagagtctcctactttctgaggggggagccctctgcggtagagacctctgggtccagtgctggttgctgtgacgaccgcgttgcccagcaactagcagcatccttttgtgtgcaggcagtggagctgaatgtggttgccattgtcaatgacacggtggggaccatgatgtcctgtggctatgaggacccccgttgcgagataggcctcattgtcggtgaggagggccctgccctttcatgcccctactgcttggcaatttgctgccttctgttgattcctctggttggatgtttccttggcggtggggatgtgggattgctctggtctgacccagtagggctctggaacaatctcttgggctggcagtttggagcttgggtgtatagtccagctcagtgactgactcatggtcatttaagctctctgaacttcactttgcccatctgataaatgaatctgagctttggagttgtacagatttgggtggaaatactagctttgtgtttccacctgtatgaccttgggcaagtcaccagagcctcagtttcctcatctctaagatggagataagagtaacaatgcctgtctcaaggcatcatgaggatgaaatgggaggggacaaaatacagcatggtccctggctcatggtacacacctggtgtttggagctgggcgggggcaggggaccaatgagcaatgagggtccttcagacagtccaagattccatccttattaagcacctaccctgtgtccacaggggactggacagaggaataggaagacacrtaaaacaagaggcaatttctgccttctcagaacygaccactcagcaagggttaagcccagaacaacacgtagcrgtcagagagtgacttgattctacacgtgggcagcrgcgaggccaagatcaggaaggagtgggtcccaggatgagtggaacttgaaagccctgaaagaaaggatttggctctgttggggaggagggatcccacagctcctggggcattggtctctcaacacgaggcatgtggcagcctctcttgagggggaggtttttgaacccagcacctggcacggttaggcacttgggagaggcatgcccaggttgctgtgtgcataaacagctggacagaggagctccaggtggggccagcaaggagcccaccttcctggrgctgaagctgtgtcagagaaaggaaggagacgccctcatccagggtgcgtcctctgcctggaatgcctttttctttctgtgcttcttggattcagtcacttcctctctgttgctttcctgatcctgttggcagagactcgccccgtggtctgggctcccacgatgctctccttggtgcttccacgggggcacagaggctctgtcagagctggctattcattgcctgacstctggccagactgtggggctcctcgtctctgatttctctgtgtcccctgctcttggcccagcacctcttagttggattaagggcctggcaggcsggtccagggagcttcggcctctcaaccgcagagagctaggggcgagggcgggggatgtcacatgtctcccaggggaatgacaggacagctgggcattgtaggagcacttgggggtggcatggtggatgcactgatggtgatgttggtgggaaaggcagtgaaggtccccagggcttggagctggcagggtctgcacgagggatgtcgggaaggaagaaggaccaggaccagggacaggctgtgagcatgagaggtagagagagtgagcccgaatcgttgccatctcggtatgggaagtgctcagagggtccttgtctacatcagtaagtagcttccacgttgtctggcctctctgcaggaaccggcaccaatgcctgctacatggaggagctccggaatgtggcrggcgtgcctggggactcaggccgcatgtgcatyaacatggagtggggcgcctttggggacgatggctctctggccatgctcagcacycgctttgatgcaagtgtggaccaggcgtccatcaaccccggcaagcagaggtgtgggctgggcccaggcagtggtggctggctgtgaccrgtgctggggatggtggctggtggggccttctgccgagtgcacacatgttcatgcaggtttgaaaagatgatcagcggcatgtacctgggggagatcgtccgccacatccttttacatttaaccagccttggcgttctcttccggggccagcagatccagcgccttcagaccagggacatcttcaagaccaagttcctctctgagatcgaaaggtgcctgaggcctacattgcctcccccacttcaggggktctttctgtccactgtgggggattgctggccatgggtggtgacgaggtctgctctggaggatgaagtgggagaagtcacgacccacctccctgtgctctcttccttcctggcccccagtgacagcctggccctgcggcaggtccgagccatcctagaggatctggggctacccctgacctcagatgacgccctgatggtgctagaggtgtgccaggctgtgtcccagagggctgcccagctctgtggggcgggtgtagctgccgtggtggagaagatccgggagaaccggggcctggaagagctggcagtgtctgtgggggtggatggaacgctctacaagctgcacccgcggtgagtctgggtgtgcgggctggggagggaggtgtggccaggtggggctggtggcctgggctcacctcagccctcctctcacagcttctccagcctggtggcggccacagtgcgggagctggcccctcgctgtgtggtcacgttcctgcagtcagaggatgggtccggcaaaggtgcggccctggtcacygctgttgcctgccgccttgcgcagttgactcgtgtctgaggaaacctccaggctgaggaggtctccgccgcagccttgctggagccgggtcggggtctgcctgtttcccagccaggcccagccacccaggactcctgggacatcccatgtgtgacccctctgcggccatttggccttgctccctggctttccctgagagaagtagcactcaggttagcaatatatatatataatttatttacattcacgcccgataaaacccctatgtgccccggcggccgggcaaggctgtgtacataaggccaagagtaagtgcgtgaatgcacttaagacaaagtcaggacacgagcttcacatgacaggccccgcgtggggcaccagccagccctggggacgggcacgccacgccacacacacactcaccactgtacagcctgggactcccattgcatattcacaggccccgccgggcagggcacctcaaggctgggggaggggcaggggcagggaggagccgtggggtgtccctgggtgggtggagagggcagcatgtgagaggcaaatgtgcaccaacactgggcgtgagacgtgagcagcctcaggtgtacrgcatgagatgtgtgtggttggggggtgtctgcgtgacccgggaggggggtgtgtgtgagatgagcacacgaggcatgcgtggcacgtgctcgtgtggtggtcgtgtgcctgaatccaggggctaccccctgtccggctgtggccctcggtcctgcaggcttggagcagggcccctcagacgtgcccctacccagcaggcacagaaatgtttgcataaggtccagctcaggcaggagctctggggccctggcccaggcccagtgtgtgcgtgcatggccgtgtgtatgcggggcccctggagagggacgggaggagaggtagcatcacacgcacatacacacacacagatgggctgggcctggcccaggctccaggcactgtccctcctgggccctggggccgagtgtgagtggcagtgccagcctggctaggcaggccatggagaggtgggagttcgggcagggtctgaaggaccagcattaagggacagcttcggccgggagggggcctgtccgagcagctctccccggtgtggggaagggcccctgtccggcttctgcctgtccttggtgggtgccaaagctggtgagagtgtaggtgtcgggcctggccggcctcagcactcagcctccgacactgtgaagaggccagcgtctggctggcccagtccagccactgctgcagccagctggctgaggttgccgttggggaagtgccgcgcctcccacaggttgagratcatggctgtggggctgggcttggaggcaaagaagctgagatggctgtggaggggaggggggccgtcagcagcctggcctggccccagcygacacctcctgccccccctggcccaccccagggcagggcctccccgaagccaaacacaatgactgccccggccactagtagatgcggcacaggccccacagggcctcctgtccacctcacccaccccgccgccgggcaggactgtcggtggcctgcgcaggccctctctgcccctctcccgcccacctgtccaggtggagtttctgggccagagtccgccagtcggcaccccgcctacagggtgggtccaggctggaaattatcttctgccgaatgaggaaggggatcttgaaggcactggggcccaccagggctgggacccccgcttcactctccagagccagcagctcagcaaaccttgtgtcctggaggtgggagggaaagaggtgcctgttagaactttccccaggcccgggtccaccgccacctcctgctgggggagctcccagactcccccagagcatgggggcggcatgagcactggtacttcctgggcacctcccatgtgccaaggcccttcttactggggctcggaggtgcagcgacctgcccaaagccacatagccagagagcagaggagccctctgtggcctccctccctctccgcccttctcccctccaagtcactctgcccagcctctgctgacactcaacacacacagctctcttcacggcctgagtcccccctgcccagctctcaccgccagaaatgctcttccccttaatgccgcagccaaactggctcattctttggggcccagtacaaagcccctcctcagggaagccctccagggtctcccctcctgctgctcccatgtcccctgcactcccctccccaagtcccatttgcacctgtgcctccctgtctctgagtctgggaggaagctgccaaggggtttctaggaggaggtgggcctggggacaggcgggagggagagtgggtggcagggcaggcagggcaggagcgttttgggggctggtggggagttggtagtggragcacgtcacggcggtgcggcagcccctcccgtccaccttggtgatgttgaagttgatgctgaagctctgcccgtcgccctccacctgccacacccacagcttgcaggccaggtcactagtgctggggctgacacgctccagggtgaaggtgcagtgcaagtaccgctgygtgccattccagatgtgataaaaggggatctcctgatggggttgcagagaggaggtgtcaggtgagcccaagctccaggcctcttgtgcgctggccacggccctggccctcacctggtagctgacaaggagcttactcttccacagggagctgggcacatcgtggatggataggcgcaggttgtggtaactgtccttgaagtgcaggacccgtggctcctggatcagctgtccccccagctgcttctccagctgcaccacctcctgcagtgccccaggtggtcagcccaggcccctccccactgcgcccaaggcaggcagtccacagggccaggcatagctcggcctcccagcggcggggggtgaggggcgggagataccttgagtgcatcgtgggtgtcatgcaggcagtagacccggatgttgtactcgagggaggtgcaggccaccggcgcaaacagaagcagcttgaggcgcttggcggcagycacgctgagggcctctcccaccagggcaaagcggcccagctgctcggtgaagaygtagcaggcactggcctccagctggcagtagtagaggtgggagggcgcctcctcgcccaggtgcagcacatcctgtgggcaggggtcagtgggtcaattcggcccagcctcagagccctagggccagctgtggcttcaagaagtggccggagactggggaggggtgggggtgcggctcaggaccacccagcggtggaaggccgggtggagcgtgcagttagcccacgttcccttctggagcccgggtcagttccctgctcacctcccagctgccctcgcacgactgctttttgaggcgcaggctccagctgtcagggctgggctccccacagtggtccatagccaggatgactggccgggtgagcaggacgccagggggtccacagctaacgatgggactcagcagggtctgacagccagctaggggcaacctcaagtggggaaatatgggtggggagggaaaggtgtcagtggcccatcctgggtcctgagggctaggccaagggcagggcagcagcatcccaggggccaggggcttgggctgcaggaccacgtggggcttaggcacagctctttcccccgccgcctcgggccaggcacaacagtgggtgggcagggggcttcctggggaccgaaggcagcaggcaggtccctcccacccccggcaacagggcccgcggccacacctcacgtcttccggcttgtgcagcgtgaggtagatctcatagatcttccctcggggtatggcatctggggggatgaggaggctgattcctggaacggcaggaagagggccagggcttacccactgccaaagcacccaacaccccaccacacagcccctccaggagccttcctgtgaggactgactggtgccagcccggcctggggacagaggggcctcaaagactgccgtgctgaccaaccacccccacaggcatgaagctgagtcaggggcaccccatgagcaactgagggaacccaggtggggaaagcatgcctggctagctcaggcacagaaaacttggggacagaaggtatgcggtaccgacctcccttgtcccctgaaaggcactggaggggaccagggtatcccttgcttaaaaccttccctgcccccggatgaagtccagctccctggcctggcattgaagggcctttgcctctggcccccactgcctctctagcccagccagtgctacaaagttggtggttctggaaccactgcctgagcccccactgccctcccgtcctgctccagctcccctctcccttgctccttctactctctgccatgccatggtccctgcaggtggggtgggtcttgaataacctatctcctgggctggatgccctcccgtcggctggcttgcctctgctccaacgtcttggaggagcaggatcagcgtgtgagtggagaggggagtggttcaacagggagatggtgggacaggatccggcaaagacgggggccagggagtccctctagaggtggtgagcagggactcccccagacagggagcccttacatgaggaggggctcccagctcaggacatggggagggagaggaattccatgactttaccccaccaagtccaaaagcaaatgcacactccctcgtgggcagcgcagagcagggctgggctggtatcaccgtttcaccggagagggcagagtcacagccactgctcccttcactggcctgcactgccccgcggtcccagctgtagtgttggtgacaatgccagacatcctcgcaggaaggctctccatggggaaggtacacgcacttacatcctcattcatcaactcctaatgctgggtactcaggacggcgaaggaaaaccacagaccccactctcatgaagttcttagcccagcaggggagaaggacaagtcaaccacagcacaggatgcgggggaagtggcagccaccccccggcctggggagcgaagagcaagggctgccgggccccactgttcgcctgcgtctctgtaagagctgacagatgccgtctcacctcgtcatcccaacagccccatgaggggttcgttatcatccgtgtggacgtgaggcacagacggcaagagctgtcaggcggggacccaaaagagaagtcccagctgagctggtgggaggggcagggggtcggtgcatgcagagggcagcaccgtgtgtcggggatgttgagtccatggtggctgccgtgtgcgggacgatgtgtgtgagggaagaggctgaagcagctggcctgcaggggacaggtcttctctgtggtatcatgtgggctttgcagggggcagaggggagcccagaagggattcgagcacgagagggtcatgatcaactctggcttcatttggtgaagttttacagcaaggaaccaggtaaggggtttggtggcccgtgtcaggagaggcagcaagggaggacaagagcaggaggtggcaggagctattgaggagggactggcgtgggactgaagctggcggggggcaagagaggacgagcagcaggtcaaggtgaccccaagtttccggcttgagcaactagacgatccgtgaactgggggaagccaggaatggggaggctctgggggagggtgggagacggttctgttttaggcaccaggagtctgaggtgatgtgagacatccagatggagctggccaggaggcagctgggtgtacagttctgtcgcccgggagaactgcaggctaaggatgggggagtgggagttatctgcacagacacggcgattaaagccatggagtgggcgaggccgctcggggagaagggcactgggagggagctcggaggcacacctacatttatggaacaggcagctggagaggggcaagcaaaccaggagcgcatggggtcatctaagctgagggacttgggaatttcgggtgggagtggccagccatgccagaggctgcagccacttcttgcaaggcagccatggaaagagttcttcagagggtttcggtgctggggtgggtggaagccaggatgcagtggggactccaggatggcctctgcccaggcccgtgctcatctgtttgcccttggttgtctccctgctcagttgcaagctccttggggccggggcttgccctacctctgggcccagggccccacatggagactggaacaagtaggctgcttggctgtgtaaatgaatggacaattaccttgtgcccacaggcaacaagaggaagacagctctggccacggcctcggtgccagccaagactgggttctccccaaaactccaccccctttccttgctgatctgtcacgggacaccgaggggcacgagaggaacgtccggctgtcccgtcctcctccaggagggaagtggagctctcagagccccctggggtccttcctacctgtattagggatcatcagccggcccccgaggaagttgaaggtcccataggtcatgttgctggtgcctcggggcagggagcggaagtagttctgggtggagaggcgggagacgaactcctcggcctcagaggtgggagagctgtggtgcagtgtgtggcggccgccacccagggggctgagcaggtgcccattggtgagctggaacttggggctgggcccatcctgccggggacagagactgccctggtaggtggtggtggtggtgctgaggtccggctggatggtgagcagatgggggttgtctgcaggataaagacagactcaggcaatggcacctagggcatm

SEQ ID NO: 96091 - DNA, 13019 bp, Homo sapiens
  misc_feature (1)...(13019): n = A,T,C or G
nnnnnnnnnnnnnnnnnnnnnnnnnnnnnnnnnnnnnnnnnnnnnnnnnnnnnnnnnnnnnnnnnnnnnnnnnnnnnnnnnnnnnnnnnnnnnnnnnnnnnnnnnnnnnnnnnnnnnnnnnnnnnnnnnnnnnnnnnnnnnnnnnnnnnnnnnnnnnnnnnnnnnnnnnnnnnnnnnnnnnnnnnnnnnnnnnnnnnnnnnnnnnnnnnnnnnnnnnnnnnnnnnnnnnnnnnnnnnnnnnnnnnnnnnnnnnnnnnnnnnnnnnnnnnnnnnnnnnnnnnnnnnnnnnnnnnnnnnnnnnnnnnnnnnnnnnnnnnnnnnnnnnnncatgtcctagtctacctccttaacatctatccaatataaatcatattctccatccccatgaacaattcaccattagtctcattctttctttctttcttttttggtggtgatggtggtggggcgggcggggaggggtgggtggacacacagagtctcgcttgctctgtcacccaggctggagtgcagtggcattagcctctgcctcccgggttccagcgattttcctccctcagcctcccgagtagctgggattacaggcgcacatcaccatgcccagctaatttttttttatttttagtagagacagggtttcaatgtgttggctaggctggtctcaaactcctgaccccatagtgctgggattacaggctttagccactgtgtccagcagagtctcgtcatttctgccccaaactacttaaaacagccatctcactgattttcccacttgcagcctctcaccttttaatggtcccaacaatgtcccaggctaaagtttctaaaactctgctctaactagggatctagttagatcttcatcctttcaggaaaatagcccaacactcccccaaccatgtgcttaaactgtaccaaatacttggaggttgctaactcaggattttattaatagattcaacacgtgctttcacatgtgatgccttcttggtaaaatgtatcacattttaagtccttttccttcttcaaagtcagtgtagaggttagattctggccctactataagagtcagaaacattcctctatcacttactggtactgatatgttaggcgagtactttaacattaatgtgcctcagtttcctcatctgcaagatcaggatggtatccacctcatagggttatcataagcacttaaagcagaaaataaacacagaacagggtctggcaaacaaaaatgctaactattattattatgattcattcctcaaagtcacttagtaatcattcatgacttccaaacattgctccccagcttcttcttgctctgttcccacagcatatacaatacacacttctgccacaatattaataataccaaaatcccggcaggtatttcgactgctggtatctatttcagattctcctgcaaaaatacaagctcgaagaagtcagaggcacctagaaaccccctgattaaggcagaatctcagagcttaggcaggctcagacctgcggtattccttatactccgccttctcccccagtctcagtggtggccagctctgtgcaggccaaaatactggcgactttatccctgaccacctgagattacaagactcaagaccccagctcctgaagtattagtactaacagcacagtactatgtatttttgtattagcagtagaactgatagacagcccatatctatgtacagaaaccacaagacaaacagagtaagtgaggagctactaaaataacatgtggcaaacagaacctttgttaaacttgttccctatcgacattactcccattccctaaccaggaagttttacctgcttagaatcttcttccatgtcacttgcttagaatcccttttcatctcaccctatagacaaagtcttacacagatgctcctcatgttaacaattggtttacctggatgtaatcccatcataagctgaggaacataatggaagtgcatcatcataaagctgtaagttggaccattctgagttgggaaccatttgtactttaagtaccaaataaattaaatagcaagggatatattatctttcaaaggacagctagaggaagaaggtaattaccactaaggggataccaattatgtactctgcagggacactttttataatcccactgtattctaagagcaaactttctccattacatggtaagagaaaaccgggttcgaagttgattggaccacctggtaagcagtaaaactagttctgcttataacagggcaccctgccttcattgctaggccagtttacaaaactttattttgattcagagcatttatgctttgacctttactagtttgttctacaatatctggtgaattttacttcttcccaacgagctcaagacaagacaagacaagacaagacaagacaagacaagactccttggagcaaatgtagctctgctagagatctgagcctctgtctagcaaactgaagtgtttcttctatgaaatagtttcagaactccattatttgatggaatgctgacaaaacaactgataagtcaaaaaaaagctcaaggaaattcaaattaagtaaaggttaaggctcaaaaataatgagttacatgggtcaacttccttgcaaaatactgtatttgcagccagataatgccctgagaggacaaaggcagtttcaaaatggagcatatgtgaattctaaaacagatcagacactcaggtaacagaggtctgtgtttgcctgagaaacaaaaaggataaagttaccttttttatatgtcccatccactcctttgcccatcttatccttgctgctcacgtcaccctccatgtaagggaagactcgggcctggtgagtccacaaatagtcattagatccaaaaaagaggactgggaactctmccacatcatgtctcatcttatcaatgttggaaggaacagctcgaggatggcagatctcagctggccaccacctgggaaaggtgaaaaggagaaggaaaacctctagaaggctgcaaggcattaggaaaataacctactcatataaaagtaaggattagcaatgtctgtctgtccacattaaagtccatcttacggcattcttacaacctaactagaacacaaacaagtcgtatgtgctagaagctggaaaacatctgcccacattcccacacaggcgcgcactcccttagactcaattattctacttcaaggattctacttaaaggaaataatgatataggaacagagagttatgacaataacattcactgaagcattataagaaggaaaaactggaaaaagtataaatgctcaacatcaagaaaataatagtattatccatggtacactatacaaaataaaatacaatttggtctttaaaaaggaaaccttcaataattagtaggaatatgggagaacagcaccaagaaatcaaaacacaaacacatacaaacaaaatcaaagaatgtaaattactatacagccactttagggagacaatttggcactacctattaaagctggaaacctctatctacctactttactccagagaatgccctagagaaggccctaagtatataaaccaaatatatacttgtatataagtatatacttatattcaaggtcccaagtatataaaccaagaaaaactgaccaaatgttcacagtccaaacaggaaaatggataagtgaactagacattatgtgactacataaaggaacagtgaactatgaatgaaccactatacaatactatgatgaatctcaggggcataaaagtgaatgaaaaaagttgcaggaaaatgtatcaacaataattcctttacataaaggtctaaaacacagcaaagaaaacaaactctcacagaagggcgaaggaatgaaaaacctagaattgagtacagtggttacctctgggggtaggagagaatggaatcagggcatggaataaacctcaaaagtaccaacagtgttctatttctttaagtgggaggtacatacacaggtgccacttttgtcattctttaaagtcatgcatgttacatcctttgtgctttccatattcaatcaaaatatattttttaattttattattattatactttaagttttagggtacatgtgcacaacgtggtttgttacatatgtatacatgtgccatgttggtgtgctgcacccattaactcgtcatttagcattaggtatatctcctaatgctatccctccccccaccccccaccccacaacagttcccggtgtgtgatgttcaatcaaaatattttaaaaaagaaaaagtggccgggtgcagtggcatgtacctgtagtctcagctactcaggaggctgaggcggcaggatcccttaagcccaggagtttgaagttgcagtgagcaatgatcacaccactgcactccagactgggtgacagaggataccctgtctcaaaacaaacaacccaagacacataacagagtataatctgtaaaaacagttattttggatggtggggggcataactgcgtattggtacgtctgggagtacatatgccgaaatgttaacaatgcgcctgccttgtgagattattactgtcttttcatttaaaaaaaaaaaaaaaaacttttcacaaaatacacaaaagaaaaaaaaatttcgacagagaacatgtattattcctataattgtaaatcataaagttaggtttctcttcctataaggaaaaaaatcaagaagaagaggggaggagtaccatgagtaattaagtagatcattagaaatacgttaagcattgtatctgagaggtctcaagaaacagaggatggtaaaagagatgagtgctattcttcaggcttacctgtatcgkccaacttttacccagacaatctccctgtagtgtggctttttgcctgctttacagtcattgcaataccagtttccttcagggatatcaatgttcaggcattcacgatgaaaagcagcagggcaagaatcacagcacagaaggctgcctcctgtgggaataaaaaaatgtggcattcagatcacaagactgcaagtcatgtatgtgtacatccatacacatatatatatatattttctttctcttcactaaaagatatactaaataaaaacattatcagtgacacataatgaccagagtataaacagcataagctttatttaactctcgtcaggttcaggttggaattctagctctaggaccacaggcccttgggaaattcactttccttgctgagctataatttcctcagcggtaaggagttttctctaataaacaataaccacatctgtttgaagattcacctagctaataaattacctagtagcgtctgacacataagtagtatctccatatggttagttccttccctccttttagaactactaacttttcggctgggcacagtgcctcaggcctgtaatcccagcactttggaaggctgcagcaggtggatcacctgaggtcaggagttagagaacagcccggccaacagggcgaaaccccctatctactaaaaaattagccacgcgtggtggcacatgcctgtattcccagctactcgggaggctaagacaggagaattgcttgaacctgggaggcggaagttgcagtgagccaagacagcaccactgcactccagccagggtgacagcaaggctcttgtctcaaataaataaatatataaatgctttcaaaacacagtagtttcagcagacaggcaggcattttattttgttgccaaaaagaaatgagccacgctcttgccagaaatgagcatgattcaaacatgctagactcaaacatgtaattccaagttttaccctgaagtggggagtaaagccttagcaaagaatatatccgagttaatcttgttctcactgtgcttctttcacctcttaaaatcctactatagaaaaaggcgggggtcttggcggccggaagaggagtaggtgcgggtgaagatggcggccgccgaggtcgtgaactgcatcatggaggtgtcctgtggccaggcggaaagcagcgagaagccgaacgtcgagggcatgacgtccaaagattactactttgactcctacgcccacttcggcaactccatgtttcacaaccgccacctctttaaagacaaggtggtgctggatgtgggctcggacacaagcatcctctgcatgttcgccgccaaggccgggcccgcaaggtcatcggcatcgwgtgttccagtagctctgattatgcggtgaagattgtcaaagccaacaagttagaccacttggtgaccatcaccaaggggaaggtggaggagatagagctcccggtggaaaaggtgaacatcatcatcagcaagtggatgggctaactgcctcttctacgagtccatgctcaacactgtgctctatgcccggacaagtggctggcgcccaatagcctcatcttcccagaacgggccacactgtatgtgacggccaccgaggaccggcagtacaaagactacaagatccactggtgggagaacgtttatggcttcgatatatcttgcatcaaagatgtggccatcaaggaaaccctagtggatgtggtggacctcaaacagctggttaccaacgcctgcctcataaaggaggtagacatctacaccgtcaaggtggaagacctgaccttcacctccccgttctgcctgcaagtgaagcagaatgactacgtgcacacccaggtggcctacttcaacatcgagtttacgcactgccacaagaggaccggagggaccggcttctccaccatacccgagtccctgtacacgcactggaagcagacggtgttctacatggaggactacctgaccttgaagacgggcgaggagatcttcggcaccatcggcatgcggcccaacgccaagaactgggaccgggacttcaccatcaacctagatttcaggggccatctgtgcgacctgtcctgctccacagactacaggatgtgctgaggcccggctctcccgccctgcacgggcccaggggctgagcattcctagacggttgtggggctcccccttcctctctctctccctccctcccccagaggaggttttaggggcctgggctggggggatggggagggcacatcatgactgtttttcataacttatgtttttagatggctgcatttatgccaataaatcttcagctgggaaacaaaaaaaattcttactataaacatacttctgttggcactttatatataatttattcccatgctgacttttgctttttttttttaacagtccagaggtcttttattttttttaacacctatgatgccatgaattcatagggaataggttccagcagctcagactccttcccattggttctcacaaagtatgcttctctgagtggagcaagctagtgcttcagttgaacccaggttaactttctctttggcttctttttctgatcattttccttcacatgtttcaggaagctatcttggctcttaggagtgcttaatgtgctcaatatgcacatgaaatctcttggcaagaatcttgcccttgtttgtttacaacaatgccaacagcatgctgggtaacactgtagactcttccagttttgccatgataacacttgtggggcattcctttttgaagagtacccattcctttgatgtctacaatatcacctttcttatagattcgcatatatgcggccaaaggaacaactccatgttttctaaaaggcctacagaacatgtactgggtgcctctcctctttccctttgtgtttgtcattttggcgaattacaggaagatggcagtttcggccaaaagggcctttacttaataattctcttcaacaagctcttaaaataagagtgggagttttatttgtttttgttggggccaggggtgtgtttcagatcagactcctacttcaactggaaaagctcacttttgtctgtattgtatagtgaagctcagattcagagtaagattacatttggaaatgtgtctgctgctaaaaaacaagtctgaagaacaattatgttgcaatatgttatttgtttgacatacgtgaagaaagtatggcctctcagagatatattgctggaaaagagtgctaaaataacctgttcagaactgtggatattcattcttagatactatgctaaaactccacagtgtatagttgcaatgtggaaactgaaactatgtcactaaacttaaaatgactacactaaaattcattgatctgtcttctattttgaatgcatcttttccatatgcaaagtttttaacatcatgcattagctatattaaaaatattgcctcatctctactaaaaatacaaaaaattagctgggcatagtggcacatgcctgtagtcccagctactcaggaggctaaggcaggaggatcgcttgaacccgggaggtgggggttgcagtgagccaagatagcgccactgcactccagcctgacgacacagccaaaatcaaaaaaaaaaaaaaaaaaaaaaaaaaaaaaaattggttcattgagtcatatgcatcttctaaatggcctatttcattatacttttaaaatcacatttattaatactaccatgatccaatcagtaagtactaagaaattgtcaaactgaaggtagcagacaatagtttacgaaaattttaattttcacttaaaagctcaaattttatcattcgccattattttgcagttctttttcttgaattgataggctcacagttgttcattttcaagtaaatgtctgccaaatatccaagcatgaataaccatagtttatcagtaactcttacaattaaaaacggtgttccatgaacaatgtggatagttcagcttgaaactcagttgcatgagtgctttaactcaagataaccatcagtatgcaaagaaactgctttacgtgtacttcccacttcatcacagagaatagaaaaacaatgttgacttcatggacaagatataataaaactaaggtgttttacttcaagaaacttctaaggtgaaactgccatgcttttactgcgagtaggtgatgatacagaacacgatgactgcttacttgtattggtttggaggtagtgccttggtttatactaaggtggcagcagttttaccaatccattgactgtgtactagctgtcagatttcaactaagtaaaaaaagcttccagaattaactaaactccagtctttggctacagaaacaatatatctcaagtaaggaaaattcttcttttacagaattattggcatatacatacacctgataatacaaatctccttagtgatgtgaattcaaaatatgtcagacaagtctcaaccaatttagaaagtttattttgccaaggtgacgatcacgtccatgacacaacctcaggagatcctggcaacatgtgcctaaggtggtgggggtacagcttgcttttatatattttagggagataagagacatcagtatgtgtaacattgtcattggttctgatagggggttggggttccaggtcataagtaggtaaaagacaaaaggttgcattcttttgaatccttcatcagcctttcactgaatacacaatttaatctggctcagtgaaactgcatttttacataaatagggcagaggaagcaatgaggtacgcatttgtctcagatgagcatagggatgactttctgtcccacacctgtgaagataagctatcggtttccattgccagggtgaaattcaacagaacagagcaattctcctgcctcagcttcccaagtagctgggattacaggtgtctgccatcacgcctggctaagttttgtatttttagcagagatggggtttcgccatgttggccaggctggtctcgaactcctgacctcaggtgatccgcctgcctcagcctcccaaagtgctgggattagaggcatgagccatggcgcccagccttgtagctgtattattgaggaataaaatgggaggcaggtttgcctgatgtagttccaagcttgacttttcccttggcttagtgatttgggcctcctgggatttattttcctttcacagtggtatctatttttttggttgttttttgttttgttttgtttatgaggtcagtctcgctatattgcccaggctggtcttgaattcctgggctcaagcaatcctcccaccttggccacctgaatagctgggactacaggcatgcaccaccgtgttcggcttctttagtgatatcttaagaaagaggaaagaaaaagaaggtattgttttcttgaaggaagtcatcttgcagggaaagtgggtaataacaaagataatttttagaagaaaatcaaacaaaatgaggcaggctgcagaaaaagtcagccctacagaggattaaaaatgagaccagagaccatttaaacttattttctcactgtgcaagggctttaatcatatcttttcatttaattgatgctattataatatgactgtgtgatagggaatagagcctatattttataaacaagcaaaccaagccttggtaaagcaatttgcctgaagagacaagccagaattcaaacttggactttgagattcaaagtacaatgctcattctattacatatattgactctttttaaaattagtccctcagaatgttcagagccagccaggttttcaggaaactgcataatcaataagtagataataaaaaaattattgccaagtaactactaaatcaacaaaataaaatctgaaaataaatgagaaaactgaagaactggtgccactctcatcactagaaaatagtggagcaaagtccacaatgaacttagaaaaataccattacaaaataccaataccattaccatgaacttagaaaagtatcatttacctttgtactagatatccttctagtacaaaggcaaatgatgcctcaaagcagagaaatgagcacctgtgggatcacaaaagttcagacaaccaagagaaaaactgaaataacgaattcagaactttaggtactacaattaacatactggtgatgagtgctaaaatcttccatttaactagcaaaaatcaagttgtcagggatgataaggatagaaaagaaaatacgtaaaaggttatactaactctgctctaaaaaacaagtattttaaaaatgaataaaatggccgggcacactggctcacgtctgtaatcctagcactttgggaagctgaggagagtagatcaactgaggtcagaagttaagagaccagcctggccaacatggtgaaaccccatctctacaaaaaaaaaaaaaaaaaaaaaaaattagtggggcatgatgttgaacgcctgtaatcccagctactcaggaggctgaggcagtagaatcgcttgaaccggtgggggagggatggggagtggcgtggcagcagaggttgcagtgagccgagattgtaccacttcactccagcctgggtgaaagtgctaagaataaaatatatagaaaatttatctttcctctacgtgatctcttaagaactaatattcttacaatgagaaaatatataactaaagttcacaaatcccttcgctttttccatcacgttcactctttttctattaatttgtataaaattgcttgttaacaaaacacaattacatggtaatgctattttcaagaattgtttctatctaggtatcagactttctatctgctgacatgcatgaatgtctggaataatgccacttaatattaagcaatgattttttttttctgatggtgagattaagtgaatttttgtctttactgcttcaattgtttatcattttaacaaaattcaagtcattattcaaaataagaaaaataaaacctctccctattgggcaacaaagccaagttttaaaaagttctgctggacaggcacagtggctcacccctgtaatcccagcactttgggaggccgaggcgggcaaatcactagagggcaggagtttgagaccagcctggccaacatggtaaaaccctgtctctactaaaaatacaaacaattagtcgggcatggtggcgggcacctgtaatcccagctacttgggaggctgaggcaggagaactgcttgaacctgggaggtggaggctgcagttagctgagattgtgccatagcactccagcctgggcaacagagtgaaacgttgtctcaaaaaaaaaaaaaaaaaaaaaaaaagttctgctatgtaatcattaattcgggacatcatttcctgaatggcagatgaatagtatcatttctaatattttttccagtggcaatatgatgaaaagtatttttgttccaattaaaacattgatttaatccctttttagactacaaatagaggaagaaatgatttcttaccttctgagcacacaaagcaccagctaacattaacatgctcatgatttcggcagccccgcctaggggtaaagtgattagggcagatgatactattagatgcaaggatctttgacccagcagccagscaaaagtcattggcgtggtatgccacaggacagcggacacagcgcatcaaccgacctaaagcaggaaaatcagggacaagcaaaagaaaaacaaaaatattaaatataaaaagaatgtgagttattcaagtctatttgttagcactgaaaaaatgtcacaaatagaaggaatgaccactaagatgatggatcttaaacactcgatccatcaagaaaactcagatgggagctatgtgataagtctccaaaaggaatcaaatcccgtaactgtcagtgagcctgcttcaacaagggaaagcccaactcaaaccactgtcctgacaactaggaaatcagccccagaataaatagggagaggggagacaacaataatgcttgcctggaactctgtgattcttttaaagcctttcaagtgaacgaacctctctaccctctccagaggaaacacatcccctcaaatacttcatctattataa

SEQ ID NO: 96092 - DNA, 48066 bp, Homo sapiens
  misc_feature (1)...(48066): n = A,T,C or G
ataatttacatgccataaaatgcatgtgtcatctttacagtagtggtggacagataatttatttatttatttaagacagtcttgctctgttgcccaggctggagtgcaagtggcgtgatctcggctcactgcaacctccagggttcaagcgattcttgtgactcagcttcccaagaggctggaattacaggcattcaccaccatgtctggctaatttttgtatttttagtagagacggggttttgccatgttggccaggctggtctctagctcctggcctcaagcaatccgcccacctcggcttcccaaagtgctgggattataggcatgagccacagtgcccagccagggccagattttaaaaaacacaaatagaaggaaatatttctttctttctttctttctttttttgtttttttgagatggagtctcgctctgtcgcccaggctggagtgcagtggcatgatttcggctcatcgcaacctccacctcccgtgttcaagcaattctctgcctcagcctcccaagtagctgggattacaggcgtctgccaccatgccccactactttttgtatttttagtagagatgggtttcatcatcttggccaggctggtctcgaacttctgacctcgtgatccacctgccttggtctcccaaagtactgggattacaggcatgagccactgcgcccagccagaatgaaaggtttctatgcaagcacagtggctcatgcttgtaatcccagcactttgagaggccaaggtgggaggattgcttgagcccaggagtttgagaaggaaaggtttctgacattgaggctaatctaatcttttgtccctttgcctgcccttctgtttccttccccataatggttttccctcagctccttctcagaccctcaatatctctgagtggcataaaaactctttttctaggccaggcacagaggctcatgtctctaatcccagcacttcgggaggccgaggcaggcagatcacctgaggtcaggagtttgagaccaggctggccaacatggcaaaaaccctgtctctactaaaaatacaaaaattagccgggcgtggtggcaggcgcctgtaatcccagctactggcgaggctgaggtgggataatcgcttgaacctgggaggcggaggctgcagtgagccaagatcacgccattttactctagccctgggagacaagaacaaaactccatttaaaaaacaaaaaacccacctctttttttttttttttatgtgtgcctataaaaggagaggttccactagatgacttctaaggtcctttcaggtaccagttggggtgagttgatagtcctggtctctctcctactaaaacttgttcttaggaaggatcagtgattttttttttgtattattagtagagacgggggttcaccacattggccaggctggtctcgaactcctgacctctggtgatccacttgccttggcctcccaaagtgctgggattacaggtgtgagccaccatgcttggccaggatctggtaatctcattctcattacatgaaaatatctgatgaggcccagtttatttttctctcttgtgatatttgcattttaacaaaagatgaactatcatttttggcttcaaaccaagaggaaaacctccaactgttcagtttctacacatacaggggtaagggatatgtttgagtgggcaggacgaccttttcggcatccttgaaaacacagcagcagataggaagttaggatcattgatgtggagatgggtaggtactcaaggttgccactaggtaaaatgggacccactatgggtgggaaagtcaagattttggccatagcacttggcagaattaagaaagctgtggaccattggggaaggagtcctctcaatttcacatatgaccttaattgccctgtttaagctagtactttgaagtttcagtgtgtagaaacattatcaccggtcagatagcatatattaaacatttatacaggtacagataatctaagtcactctgaaagaggttgatataatgaaaagaattcacactgttagaccaacatccagaatgtggtacactgtaaccccgttcttattaggagaggcagacacacagtggttgaggaagtggggccctggaaatatatttgctgggttcaaatcctcctggctctatcatgtactaccagttgggtggccttggtcaagtggcttcactgttatttatctcagtttctccatgaaatgggaataacagggtaacaatattaatagtaatgtaaaatggagataacaataattcccacaccttggggttatgaaagttaaatttgttaatacatatcaagtgcttagaacagtgcctggcgtggccgggcacggtggctcacgcctgtaatcccagcactttgggaggctgaggcgggcggatcacctgaggtcaggagttcgagaccagcctcaccaacatggagaaaccccatctctactaaaactacaaaattagctgggcgcggtggtgcatgcctgtaatcccagatactcaggaggctaaggcaggagaatcgcttgaacccgggaggcagaggttgcggtgagccgagatcgcgccattgcactccagcctaggcaacaagagcgaaacttcatctcaaaaaaaaaaaaaacaaaacaaaacactgcctgacacatagtaagtgctcaataaatgtcagctatgaacatcattacctcctaatccctttgtgtaggaaaccttgatgcttcatttccaacagctctagcttcagttattaataaatccttttctattttccaactgccmaatggggaaactgagtcacagggtatcagagaatgctgtgaagggaacacagaaggcagggcagcgccagaggttcaagtgcagtaggcccttcatattcctgaattcaaccaacaagggatctaaaatattcaggaaaaaaaaatagcatcttcactaaacatgtacttttttttggtcatcattccctaaacaatacagtataacaactacataacatttacactgtattaggtataagtaatctagagatgatttaaagtatacgagaggatgtgtgtaggttatatgcaaatactatataccattttatattttttattttattttttatactgagtctagctctgtcgtccaggctggggtgcagtggcgcaatgtcggctcactgcaacctccgcttcctcggttcaagcgaagattctagtgcctcagcctcccgagtagctgggattacaggtgcccgccgccatgcccagctaatttttctatttttttagtagatacggggatttcatcatgttggccaggctggtctcgaactcctgacctcaagtgatcctcccgcctcggccccacaaagtgctgggattacaggcgtaagccaccgagcccagcccattttatattttataacagggacttgattatccgcagattttgggatccgcaggtgtcctggaaccaaccaatccctcacggatagggagcgacctacgggcctgcagtccccgagcggctccccgtccccgccaggcctccgctgccccacgtgaaagatgaactaaagaggctgagtcacgtttctcaacttttccctctccctcgttgccagttcccgaagtcgttttcttctctggccgaaatccagtcccacttgatggcggtggagctggggatcctgactgtggatcggccccgggaaggatcccgcggaggccgccgccttcccgtccactcaggccccagccgaagctttccagctcccgctggcaccgggacagcgagcccctccgcgcgcggacccacgccccgagcgacccttgacttctcccggaattcacagcttcactccctcccctcccccaaaggcggacgcaggggaagctctagtgcctgaggaggccgcagagtgcgaactgcagcggctcggggtacgacaccagggcttcctgcacaggcagagaggccaggggcgggggattcatgcaaacagctggagccagcgccctgccccctccgccccgcccctgcaaaagagggctgtaaaattccggaagagagattagaggcaggggatgggtggggccgtgaatagtacattccttcctccccctgcctccttctacccagttatcactctgggagggttgagtcgtctcttggccttctcttgtccggtgcactggcagcgtccagacatggggcttgaaacctcccatgctcatcggaactttgtggagcctggatcgcttatttcgcagctcatgactccatctggtttcgggctcggaaattttggttgttacttgcaactgggtcttttcaactgggtcttttccataagagtgcttcataggcctgtctgtgcatttgttagtagttcctatttattgagcgaactttgcaatggaggcatactttatttagtgttggagggaaggaacatgaaggcttagagaggctgcgaaacctcaaagccacacaatggcagagccaggaatcaactcagcgattggttccacacatttcccaccacatcctgctgattcctttgcttcaggtctttaaaaggcaagacttatttgttagggggtagggaagtaacatttatggaccatctcccactgtgccagctactttaaatatattgtctttaatcacttaatttgtcacaacacttcaagacagatgtgatcaccatgcccatattacagatgaggaaaactttagaggtgaggagtttaagggccagagctgggattcctgtacagtcatactgcaaggcctgtgctgtttctaaaaccacagttaatgtctgcatagtgcttgacagtttacaaagcaaagtattttcaagctcttcatttgagagctatcatcctatttcatagatgaagagaaaggttcatttgtgaagttacaacatctcttgaagatcacaaaactaatggtaagttgcagaatctgtaattttgaaataaactgcagagctggtggtatcaaggctcatttcatttattcattgcacggtgccaagtaccaactaataataatactagctaacatttattgaatacttaacatgagttcaatgcatgagttatgcacactaagtcctttagtcctcaaaaaacctttttttgaagtttaccttttctgttttacagatggggaaatagttatttcatcagggagatgaaataactccccaagtctacatgacaacaaaatggcaatgcaaagatgccagatgaattagtgtaaaatcccagggtgggaaccagtcacctgttcccaacctctgtgtaaaccacttttctgagggcttcagtttctttaccacacgatcatgacttgttttcttgtttttttcttttttttctttttttgagacacagtctcactctgtcgcccaggctggagtgcaatggtgcaatctcagctcactgcaacctccgccttcccggttcaagtgattcttctgactcagcctcccgagtagctgggattacaggtaggcaccaccacgcccaactaatttttttttatatttttagtagagacggggttttgccatgttggccaggctggtctcgaactcctggcctcaggtgatccgccttcctcggcctcccaaagtgctgggattacaggcatgagccactgtgcccggcagaccattacttgtttttctaacccctgtgtgtggtgggcccacatagctcctgctctcaaggagctaatgctctgtaaaatcagccaagagtactgccagcttgccccacaggggcactgggaagattaatcagcgaatggcacttggaatgcttcagcaaaagcactggataaactcagggcacttatgcgtgaaactcactgctaggggtgtttcctgctgtaataaggcacctgcagcccagttcctgatctgtttgagatgtggagagagtaaaaccatgttacagccttctgtgggaagccatttggatgtcggggtgagagcatctctctgctttccggggggtaagggaatgtggcagtggtgtcatagtctaggacctttccctctcagaggcagatatttttttcagcatttcacaagggtttccagcttattctgaggacaccagttattgactgaagtcagaaacgaatatcatgattatttgggcttcagaggcagacaaacctggggtgaatcctgtttctgtcatttcttctctctgagcctctggttccttctttttttttttttttttttgagacggagtcttaccctgtcgcccaggctggagtgcagtggcatgatctcagctcggctcactgcaatctccgcctcccagattcaagcaattctctkgcctcagccttctaagtagctgggattacaggcgcacgccaccacgcctggctaatttttgtatttttagtggaaacaaggtttcaccatgttggtcaggctggtctcaaactcgtgacctcgtgatctgcctgcctcggcctcccaaagtgctgagatacaggcgtgagccactgcaactggccttttttttttcttttttctgagacagagtctcgatctgttgcccagggtggagtgcagtgttgtgatctcagttcaccacaacctccgcctcccaggttcaagtgattttcctgcctcagcctcccaagtagctgggactacaggcatgtgccaccatgcccggctaatttttgtatttttagtagagacagcttttcgctatgttggccaggctggtctgaaactcctgacctcatgatctgcctgccttggcctcccaaagtgtggggattacaggcgtgagccaccgcgcctggcctttctcaagtgttttcatacgttattatcgatacgtgaaagagcccatgaggtagctgattattatttccatttaatagttgataatacttcccttttttaatgggggtaatagtaccttcttaatagggtcattttgaatcataaacttgataatagattttattttattatttatttattttgagatggagttttgctcttgttgcctaggctagagtgaagtggcgcgatcttggcttactgcaacctccgccttctgggttcaagtgattctcctgccttagcctcctgagtacctgggcttatagatgcctaccaccactctcggctaatttttgtatttttagtagagatagggtttcaccatgttggccaggctggtctcaaactcctgacctcaggtgatccacccgcctcgacctcccaaagtgttgggattacaggcatgagccgctgtgccgggccttgataacattttaaaacgtttcaatcaggacttgaaaaagagtagatgcttaataaaaggtaactatggctgggtgcagtggttcatgcctataatcccaacactttgggaggccaaagtgtgaaggttgcttgagcccaggagttcaagaccagtctaggcaacatggcaagacctccatctctacaaaaataaaaaaataattagctgggcatggtggcatgggcccatggtcccacccacctacttgggaggctgaggtgggaggattgcttgagcctaggaggttgaggctgcagtgagccatgtttgcactactgcattccctctggggtgacaaagtgagaccctgtcttaaaaaaaaaaaaaaaggccaggcgcggtggctcacgcctgtaatcccagcacttctggaggccgaggcgggcagatcatgaggtcaggagatcgagaccatcctggctaacacagtgaaaccccacctctactaaaaatacaaaaaattagctgggcgtggcggtgggcgcctgtagtcacagctrctcaggaggctgaggcaggagaatggtgtaaacccaggaggtggagcttgcagtgagctgagatcccgccactgcactccagcctgggtgacagagtgagactctgtctcaaaaaaaaaaaaagggggggggcggtaaaggtaactactattggagccactattcttatccttatgttgttaatgttgttattacattattttatttcagggccagaaggagagctaggtggagggaagggtcattcacttggtcagacaatctactagatgaaaacaaacaagcaaacaatctgctagactgccccaaatagatccatttaagcaggggagaatctgaaaacaggcaattacaattccatgttaagtactatggtagagtattgcacaaggtgttttgcaactttatcggaagaatcaataactcacagacgcagcaaaagttttgcagaggtggtagctctttctttcaaatcagtctatgtttccaggaagtagaaaatactgcttgctggaggcagacagaatgcaagtgagcccagtctgtgctcctcacctaagggccttgctactgatctgcagcccctcctgctcctcaaggcctctctcaactcccacacagccctgctagccagccttgccctagaataccccctcctgggccacctggtggtgaacatcctggactctgtgctgtggcttgatgcggctgagtcataagacctttctttttactgctaagcgctaatggaagccttctggtcagaagcaatgccccaagtctaccttgtggggaaggtctaatgacgacagatcactgcttctccccgcagggctggatgagcatggatgtggtggcgaggtgggggagaagcacccacgggagcatcttcatttcttcctatataggcgccagttctgggcaggcaagacttcccaggggtggacagaaagaacagaccctccccaacccgcaattcccagggggagacatctccctcccaagccagcctccaatgccgcactttgccatctggtcgtggcccaaaccagcctcctagctcgctagtgaccacattttccaaaccaaaactcaggacgcatgatctggcaaagaatttctggctagcttccaaatgcaagaggcaaaaacctttccacctgagaatctctacgataatctgcgtcgttaaaggtgacattaagtcggaaagcttgaaattcagggtctcttctttctcactttctcaactcaagcgttttctttttctttcttttttttttttgagacggagtctcactctgtcgcccaggttggagtgcagtggcacgatctcggctcactgcaaactccgcctcccgggttcaagtgagtctcctgcctcaacctcccgagtagctgggattacggccctccttccgggcgggcgccaccatgcccagctaatttttgtatttttagcagacacagggtttcactatgttggccaggctggtctcgaactcctgaccttgtgatctgccctcctcggcctcccaaagtactgggattacaggtatgagccaccgcgcctggcccttctcaagcgttttcatacgttgttatcgatacgtgaaagagcccatgaggtagctgattattatttccatttaatagttgataatacttggaatcacttgcccaagatcctacatcctgaaagtctgaattttggcttgtcagggacagttcttagggtgggtgtgtgtcttgtgggcagagctgggggtggcgtattaatatcttcgacgaagatgcacacgccattcatttggggcctcaggaagggcagccgagaactgagctggccaggttcccacttctgagttggaaatccccaagcccaggacgtggcggccaccccgtcccatcaggatctgacccgaggccttagggccaagtagcgagaaagaacccttcgaccttgcaggtcacacctcggctgcaggccctcgacccagcccaggtgcggatgggcggggcgcagcgtgggcgagcgactccccaggccacgttctgccttccctccccgatcacatggactcgccttccgtagccgggagtgcggagcggaacgaaccacgaggaggaggagcgggggaggcgcccagggcagtgggtcagcgccccgcggggcaggtgggcgggcccaactgcccgcgagccggccagccagccagtcagcgaacgcggagggcgggccggtggccctgcgcgccgcgccccgcagcgccccctgaggggcggcggcgggagctggttccggctgcgcgcgcagcggtggtggtggcggcgcgatcggccgggctgtaaccgtcgtctgtccgggagcggctggagcggcagcggcggccgggcacggcgcgaggtgacgccacagggcagcggcggcagcgnnnnnnnnnnnnnnnnnnnnnnnnnnnnnnnnnnnnnnnnnnnnnnnnnnnnnnnnnnnnnnnnnnnnnnnnnnnnnnnnnnnnnnnnnnnnnnnnnnnnnnnnnnnnnnnnnnnnnnnnnnnnnnnnnnntgttgccaccgctaccgccgccgcagccgctgcagaggtgactgaggagagaggcgcctcctcgctcccgccaccgccggacttcaatgcccagtccccagctcgccagcgtgagtgcgcccctcccgggcggcccccgcgccggcgccgggggcctcggggaaggggagggcgggaggcgccgcagccattagtgcaggccggagacacgtccccggaaggagggccgggccgggccggggcgggggagcgagggtgggtgagcgaggggcgggctcgtgtgtgtggaagggagagagctgtgcgagcgtgggggagagtgagttggtgaagggagggcgtgtgagtgggggacagggctgagtgtccgtgcgaggaggtggggggagtgggagcgcgtcgggaggcagtgtcgatgttgggggaatgtgggtgagggcaggggagggtatgggtgtgtggggagcgtgtgggcatgaggggtggtggtagaatgagtgagtaaatgggggaggagagagttgagagtgtggtaaagagcgggtgagtgtggggggagaacatggtgtgtgtcggtgagaaggtgcgtggcagaggcaggagtgtggyagggtgtgccggcgtgtgtccagtgtgtgagcaggcatcctagaggcccttccccttggtctttgtgtgtggcgatagtgaaccctggtgtgttgggttggggagttctttccgggagcatcttgtccgtgggtcttcaggttcaagtatgaggaaagggggtataagtctcctccagcggcactatgatcttctggctctgggattttaatttttttcccccagaaaggatgtgatgtgtttttttgttgttgttctatacatttttttctcccacgtttcatgacttcaaagtaaattttcaaatttgtcaatgatgccatcctatcctagtctggggcccctgagagctaacgaaaagaagtttgtctgttgcccaaaatcctacactctggcctgtagagtgttcaggagcataaacttttgtaaagtactgctagtttttcaggtgaagagtattttattgttaggtaaattgaactgtagtctggtttattatttcctggaatttgtcaagaaattagcagtgactagcaattctagtgtcactgtaggcattcagcaaatgtttgtctgtccggagtcgccaaactacattacactgctgagttggaatatggtacttgctgtcatgctctgtaagagagagtagtttcagagggaagtgagtgaagttatgccttgctgagtgtgcaaaaggagattaaggatacagaatgacacattatcagggcttcagaatcacttgccagcacaccattgtattggtgaagatggtgagaagttgtttgctggtattctgatcttggcatttttaagtttcataatgaatggactaattattatcatggacttttcccattcttgtgttgtaaaagtagggattcttgaagagtagtaccttgatagggattttacacattgatataatcttaaaaatgatgttatcttaaaaataatgtctcctagaagttggtagtctttcacttgatcttagccmaaaggccgagaagcgatagaagttggtagtctttcagtataagcmaagagtagtatggtccttttgttttttttttgtttgtttttgagatggagtctcgctctgtttgttgcccaggcttcccgggttcaaatgatcttcccgcctcagcctcccaagtagctgagaatacaagtgtgtgccaccacacccggctaattttcatatttttagtagagatggggtttcaccttgttggccaggctggtctcgaactcctgacctccagtgatccacctgccttggcctcccaaagtgctgggattaacaggcgtgagggtggtccttttgatagtgaacataatagaattacaggcaaaatcactgatgtgtaattaaaagttagaaattatatttttcggctgggcaagctggctcatacctgtaatcctagcactttgggaggctgaggcaggaggatcgcttgagcccaggagttcgagaccagcctgggtaacatggtgactccatttctacagaaaatacaaaagttaggcgtggtagtgcgtgcctgtagttccagctatcccggaggctgaggtgagaggatcttgtgagtccaggaagtcaaggctgcagtgagccagtgagaccctctctcaaaaaaaataagaagaaagaaatagtaaatagtattgttactattcagtgagggaaggaattgattagtattaatttcctcytgtgctacaggtgctttttatattcatttaattctcacaactacaagaaaggtggtatcttcatttgcatccatttagcttattttgaatcacttctatttgccaggcactagggatacagcgatgagctcccatggatttacagtggtgagaagaagagatacagaaactcaaaaggttaagtaacttgtcccaggtcayacagataataattagtgctggattaaaaatccaggtctttgactctaaagcccttgatttttccaatacgtcatactactctctcagtagctcctcttatattgaggtttctcatcaacgtgatggcctagcagctagtacttaggagagctgttgaaactaatggagaaggctggaggcaaggggatcatttaggagatgctgactggaggctctttggggcctaagctaggcttttatgtgggaggagattatgccttgaaactctcttggggccccggggtgtgtgctttgagacagtttttatgaggcacctgggatatgtctgcgtgagggaagtctgattaaagaaatgcagcagcgtcttatgttttttattttttggaaaaagaggagagtatatttattggggccaagagtgaactagaacttaccactgtatcaaagtttctctgttgagctgtgtgggacacttaaatcagaagaagtgagaaaatacacgtgaaagcactttgttaattataaattgaactacagattcaaagtattattaccactaagatctttctactaaggcaacagattttgtagctggaaaaggctggcattttagaacacctttatagatgaaaaatagttttgaactgctgaacggggtattttctgactcagaacagcaaaagtcaggccactccctctgtgagtcagtcaagtaaaatttaatttgaacgaaccaaatttataggcagaaaccatttacaacatcattgaactttgtagcactaggaagagtaaatgtttgaatacttttgtgtatagctttaaaaaacagtatgagagccccatatatagttgacttgaaaaaagtttcaaacaaggtaaattggatttatttttctttagaattaactttttattcattttgtcctataaaggtagtatttccttatgcagtaattaaggaacactttacaattttcagacacaaagttgaaatttmgtagggatttattttacaggatttgactatactttttcctttttgttgtaatgtgggggttggtaaccactgaagcctagaaaacgaatgtatttacaaataagatggagaggagcaggtgcatacatttttagctgttgctcttggtcttggaagaatgaagcttaagtttttgtgaaactaagtttggttgatttatttgggtgctattccatcaactatatttgttgaatagaagatgggatctttaaaattttgcttaagaatcaggatccatagtcttttttgtttgttttggttttttttaagacggagttttgcccttgttgcccaggctggagtgcagtggtgcaatcttggctcactgcagcctgcgcctcctgggttcaagcgattctcctgcctcagcctcctgagtagctggattaccggcacacgccaccacgcccagctaattttttgtrtttttagtggagatgaggtttcataatgttggccaggctggtcttgaactcctgacttcaggtgatctacctgcctcggcctcccaaagtgcagggattacaggcatgagccaccgcgcggcccaggatccatagttttaacatggtggacttagttatgtttatcgaatagggtgatggtagagatcttggggtactggtaaagttcaatattaccctttcagggtttaggtttccacattcctttcttacgccaaatcatgtattgtctcatttgaaactcaataatcctgtaagtagtattcttttagctttacagataaggaaatttatttatagattgattgttgttgggttttgttttattttgttttcttccagacagagtcttactctgttgcccaggctggagtgcagtggtgcaacctcagctcactgcagcctccacctcctaggtttaagcgattgtcctgcctcagctggtattataggcgtgcgccaccacgcccagctaatttttgtatttttagtagagacagggtttcgctatgttgcccaggctggtcccgaacccctgagctcaggcgytgagttgctggcctcagcctcccaaagtactgggatttgattattaaatcccaggttttagaatctaagttaaagattatcaataaatagatagcagtgaataattttttttttccttttaggsgcttaaagtacttaaatctctgttgaacagtggataccaccagttataattactttgggagatggtgatttgagtctcttaatctgtgaaatattagaaaagtcttggctaggcacagtggctcattctgggaggcagacacgggaggatcacttgaggccaggagttcgagaccagcctgggcaacatagagacaacatckctacaaaaaatacaaaaactagccaggcatagtggtatgaacctgtagttccagctactcaggaggctgaagtggaaggatcactggagcctgggaggtcaaggctgaagtgagccgagactatgccactgcagtctagcctgggagacagagggagaccctgtctcaaaaaaaaaaaagaaaaaatcttttcaccattttcatcttttgaactattaactacgtatagaggtgtcagttagctttctctcattatcctttgttttattggctgaacctcattctatgggctcccttgactccctggccactgtcktggcacttgaagccttttaggttgcttagtgtagagctgaagtgcatattgtgtgaaaatctttttgctctttggagtggtagaggtctaggctcaaccagaaactgtcactaccctagcacctccatgaaagaagctgcacagcaatactagctgtctgctttccacagttccccattgtggagttaccaggacttaggtgagagaatgactcgtttcctgcactgtttgttcagtcagtgtagatttacaggacacagaaatctttcccagaaaaatgactgtgaggagttgacagattatacagatattttttatgtgacttgaatgtagacggtttttgtttgcctatactgattttcttgcccacaggttatgttaacacagcatccacttcattttaagtggcctaaactaaatttcatcatttgaatataaatttaccttacacaatgttggctttttaaattcttgagaattttaagattaggcttttttgtgaccctttctttgctagttgagcctggtttgaaaaaatattttgaacatttagaacagtctttacctttagagaagtggtgyatttaattcctctcatagtattttttatttgaacttttagtcttctcaagacattaattcttttggcataaaatgtacacatgatatatttgttttagcagatcagataaattactttatatttttatttctgcagtggccagatatgttggctgttaactaatgtattgtttgacaggaattcaaattcacaatcaggtctgttttcttccagttgtcctttagtttttgtttaaatttgaccaactttttattttccccaccgttttacaggaaacattcactaggttgtatcaccacagtatttgtaaattggatttatatacaaatgttgatatttgttgtttttagtagcagaacaaattgttgtgtattgtattttccattattggtgaaaagcctttcattaggggatggagtgactggttagtgcagaaggatatgagtcaccagcaggatttgtcagcaaatagagaaggatatgatggagaaacaatagattctagtgacattattttcattccacatgtgtggttacaaacaagtttcctttggtgattagtttaaattatgcaaattgggtctttctgggtgaaaagtactttaaatataagtcacaggctatattctcaattgttttcttagattggatcttcatttggaggtcatcaacaggtagaatttagttaaactcgttatctgttgactatgatttagtaagttgaaagaaaatttttgttaagctttttggtaattacggagctgcttgctcagtagatcaggggaggcccataaatatggcaatatttgctctttttctcagtgagcaaagagttgctctcttaccactactctgctttgaaattcctaagagcttttattgcatttgaattggtctgaaattctcagcccggtcaaggcttctccagagttatctaaccaaagactaagcacctttctcaagtcacactaccatggttccttcrctgtttctaccagttttctattataaaagttttacctttcttcagaagtcttaatcctactccattcttctcacgcttactttgtatctttaaaatttgtggtggtaatatgaaaacttaataccaatcaagcatttttcacccacgttgattcttctaggagcttgatcctggatagtgtttgtatgatgtgcacacgtctctgcaaatgcttgtttgaagattggctgtgctgcattttggtataattgggaggtgacatattgtcccttatctcagtaaacatttggaggaagaggacgagaaagattgaattttgcattctttaattgggaagaaaaggaaggtgaatccatgttgagctgagctagtgagtaaagaataacttcttgacatggcattatagagttatttcaccatttttatttcacgttaatatgtagtatgaaatatttactttcactgtgtggtttttaaagatcgtaatgttactgtgttttgtgaaaggatgccattattggacaattagtggatagacagtacattttaaaaggccaccagcagcttcaaatagaatgatttggattcttgactgtttatcttgtattgtactcagtacacaaacatatgtctgtgaactataatgtaatttataaaaagcaagtttaggagaggaagtgaagtgtaacttacccagttataggggaaacttggatcagagtgcctgaacagcagaaacatttctggggctcaaacaaaataatttatgttgacaagatgtattttgggatgtttttattctgtgtcttgtccatagagagtttccctcactctctttggggattaatactggaacaggacctttaaatacgctcaatacatttgacaaaatggggaaatgaaaagagttaagttgacccataaactactaagttctgagatatggtattttttattttttttttgagatggagtctcactgtcgcccaggttggagtgcagtggcacaatctcggctcactgcaggttccgcccccccggggttcacgccattctcctgcctcagcctccctagtagctggaactacaggcgcccgccacctcgcccggctaattttttgtatttttagtagagacggggtttcaccgtgttagccaggatggtctcgatctgctgacctcgtgatccgcccgccttggcctcccaaagtgctgggattacaggcgtgagccaccacgcccggcccgagatggtatattttaggtaatgtgaacagtagccggaaagtttttgctttgcatgctactcctgtgctgtaggttattttgaaaggtgattcaaataacctttcccaagtatctattttgcaacctcagggaacttgcagctgttacagccattttaactgtcctgatatagctcagaaaacatttcaatgtggtgttgacaggctgactccaggtgttcttttggatttttactactgaatttgctttattacaattgaagttcagaatcttaaattatttattaatgaaattattgattcaatggttcttgggttaatgtacatacagtgatgttggaaactaaattaaaatgattaagacttaaattgttctctggaaaaattagccttttgagattaaagaaggaaggatgggaggaggaaataaaacaaatgttaggatttaactttctggggaagcaactgaattggagatagttcctattcttaagaaggttaccaaagttatttaggaaaagaatgtgcttaaactttataataaaggggcttgggagtcttaaaatgcacataaactgaagtctttaaacataaaccccatagaaaagatagccatgatacttttgtcacaaaagtatggatgaatagaatccatttagtaaaactatttaatgtaatttttaaaagattaactgaaaacaattagattaatactcaatataaggattgtgctgttaggattttttaatgttattaccagtgctattccaatactttttaaagagaaagtcggcgttggccatagtgctgttaacctgcatttaaattttatttatgaaaggaaaaataccaattttagataagagattcattttgagaattggaaatctttagaggaaaaatggagtacaaaattgtaaagtaaatatttttaagtgtggcctgaaaatatttaatgcaatttttgtcttatagttatttgtagaggtagaaattactagaaaaggacaaccgttaatcaccggggtacatgcacatctaaaaccactcccttttcattttggtgggaacagggcccacaggacttcagtgaataactgtcactgttctcagaagcaggtgcgattgttgactaattgcttcccttatctttctgagtggctggccatgtatcttctactggttttgaaatgttaagacattttcccaccatcaaggtcatgatttctttttatagaactgattattgatttctgtactgggacttgagtctcaagttccctccttaaatgaggaagtggaaaagtgggaataaccaagggagtaactatgaaattttttttttttttttttttttttgagacagagtttcactctgtcacccaggctggagtacagtggcacgatcttggctcactgcaacttccgcctcccaggttcaagcaattctcctgcttcagccacctgagctgggactacagccatgcgccacaatacctggctagtttttgtatttttggtagagacagggttttgccatgttggccaggctggtcttgaactcctgacctcaggtgatccgcccatcttggccttccaaagtgctgggattacaggcgtaagccatcgcgcccggccaaaaaattttttttaacagtaaaaaaagcatcttatttttggcttattcactgacattttggatccttatttgtgtagaattgaattgatacctctttatcaccttcctaggactgtagttattgtgggtaaggagggatattaatattaatattatattgkatataattatattatgctatatattatattattatatttatrtattataatatataaatatatgttataatatatatttgttatatataatataatattaatttaaatctaagtttcaaggactagattattttagtttgataaatggaacagtagagggataaacaaaggtaggtagtgcagaggatagatagaactgttgttctatctacttgatttgggagtaggttataagagatgaataaattttcagtttgagaccagttaatcagaagatgcgtgtttactaattaaacgctttactaattaaaggtgaggttttttagtttacaagttttcagacacttttttcccccaagtggtcaaaatacaataggtacagtagcattttacagaggactttccctactactttgatggttgagaagattttacaatctattgtctgaatagcctctgaatattaagttggactccacaagttctgtagttactcagagccttgactgtttttcataaactctatatccagtctgtggacaaatcccacgtcaaagtgtatcttgaaactgaccccttcttatcttccctactgctgttaccctggtctaagctaccattatatctacttgtctccttgcttccacccttaccatttttgtaatgtttccacatagcagatagagtgatcctttgtaaaacctaagttatcactctttttttctctcctttttcagcttttatgttaggttcagtgtgtacatgtgcaggtttgttacgtgggtaaattgaatgtcgctcgggtttggcgtacaaatgattttgtcacctcgtcaccagttagcaagcatagtacctgataagtagtttttcaagccccactctcctctcaccctccaccctcaagtggtccccagtgtctgttgttcccctctttgagtctatgtgtactcagtgtttagctcccacttataagtgagaacatgcggtatttggttttctgttcctgcgttaattcgcttaggataatggcctccagctgcatccatgttgctgcaaaggacatgatttcattattttttatggctttgagttgtcactcttgagtgaaacccttcattggcttcatttggagaggcatcattttctgaataaaagtcaaatgcttttagtggcctataaggctctcttttatttctctgactctattcattccattgtcctctctgttccagtagcattggttcccttgttcctagcatactctaagcttgtccccacctcataacctttgcagcagttaatcctctgcctaaaatgctccccaaatacctgtttggctcacactctcagctcttggataaaaagtcacttttttcagtgaggcctttcctgttagccttatttaaaattggaacccccctccctctggcactgctaattcccctacttctaatttttctccagagcagtgacatttttatttctttttttctgcccagtaaagtgtaagatccatcccaacagaaatttttgttttgcttattgctcttgcacctgtaagagtatgtgacccatagtacatgttctgtaaatatttgaattaatgaaagaatttgaggaaaatgcctagctcttcaggaggataaattctttactgttgacagattagattttttatacttattttaaggggaaataaaagtggctattgacatgaagggaatttgctttaggaaaaaaatgttgcaaggtgttagttgtatattacattattaggctttcatgttgactgattgttgaaaccaagctgactcaaatttgcattacttcctgtaaaatttctggtaagaaaagtagcagtaaatatatgcatactcgttttttttagacctttgcttttagactgtatttcctwaaatctagaattcttttattgtacctttayattttaatgtgctgttttaatttggtgaatactggcgtagctcaccaaattagagggtttattgtatcatttaatttggaaatgtaaagggatgatttcttagaaatcctgatgtgagtggattgataggagagataaatatatatatatatatatatttttttttttttttaattttttgaaacggaatctagctctgtggccaggctggagtgcagtggcgcaatctcagttcactgcaacctccgcctcctgggttgaagcgattctcttgcctcagcctcccgagtagctgggattacaggcatgcgccgccacgcccagctaatttttgtatttttagtagagatgggccagtatggcttcgatctcctgacttcgtgatccactcaccgtggcctcccagagtgctgggattacaggcatgagccactgtgcccgccaattgataggaattttaaaaggatgcccggtaaaattgggttaaattaaatgaggctgcttttataaaattcccttatacttctaaattcaccttttttttttttgagatggagtcttgctctgtcgcccaggctggggtgcagtggtgcgatcttgggtcactgcaagctctgcctcccgggttcacgccattctcctgcctcagcctgccaagtagctgggaccacaggcgcccaccaccacacccgactaatttttttgtatttttagtggagacggggtttcaccgtgttagccaggatggtctcttatctcctgacctcgttcgtgatctgcccaactcggcctcccaaagtgctgggattataggcgtgagccacggcgcccggcctctaaattcactttatttgtagttagaattacagttgccaaggcaggacgtgaattttactcatttagcctctttaacaggaaagaaaacactttatggaattgtgtaggtacagacctgcctgggacagaggactagccctctggagcctctttctaatcctatgattatagaactgttaagaacgtagtttgattgtaaatcattatagggttcttatcaccttagaattttttttaaaggtaataccatatgtacatgggaaaagttaaaacagttcaaaaggtatatgttaagatgtagtaaatcgtgctgttgacctccagccttcagtcctgtgttcctggccctgccccaaccctaggaaaccactgttatctcttatctttgtaatcttccagatatcccatgtgcatgaatgcatacagtactcacacatatttctaagcacactgttgatactgtcatgtactgtgcctttttttacttattagtgtcttttagctgtcatttcatatcagttcatacagatgttttctttttaacctctggatagttttttctttttttttatcccttatctccctcctttcttaatttaaaaggacttctctgtcacagactatcctttctcatccttcattgaagttgtattcttttgttaaaaatggaaatgttgcctaggaaatggaaatatcccaaattcaacattttaaaagttaggttttatgataaaattaaatggagagrgagtatttgggtgtatatttgaatttaccactgttatatgtcaagtaaactagcctttttcatcacttggtaagttaaaacaataatttatttaagtagatagagcagaattaatgtcagagagacaactttaggagaattttcctgtatggtgtacatgcactgaatttatgttaaaacatagggttctgcaacttttgagtactttctagctgtgataggttgtttatgattttttacacactgtttgctttgcattcctaagtgtgtcacaggaattaacattagtttatctgaattgacaggtgcaaaaatgtaactgttgatgtgtagttgaactcttgatggagggggagggaacagaagcttgtttttatcatgtatctgttaaaagtgctagaacatactgtttcttttggcagaaattcctttgctgggttctcagtattaagaattgaaaatcttaataatgaattatctttattcctggaaatggtctttccaaaatgaggttgggagagtaagatgggataaagcttgttctgtttgctgagcagacacacactggagactaggtagaaaacttaatgctggagctgtagcctttaagcctggctgtcactacaatgcaggtctttcagtgcctttactcagctgacacacatttgcagtgataacgtcattgaaccaaagggattcaaataggttagaatttccttgtgttttgctctgcattgcatgcaaactattgttctttgagtagttactttaataaactccacccagtctcccaccttattttaaggtcgcagagttggagatgaacatccaagcagatatttggaaaaaaaattatacttgtatggaagattgcaacttgaaaaatatgtggggctggacttagtggctcacgaggcctgtaatccctgtgctttaggaggccaaagctggaggatcgcttgagcccaggagttttagaccagcctgggcaacatagcaaggcccccgtctctccaaaaatactttaaaaatattagctgggcgcagtggcatgcacctgtagtcccagctactcaagaggttgaggcaggctgggcgcggtggctcacgcctgtaatcccagcactttgggaggccgaggcgggcggatcacgaggtcaggagatcgagaccatcctggctaacacggtgaaaccccgtctctactaaaaatacaaaaaattagccgggcgtggtagcgggcgcctgtagtcccagctactcgggaggctgaggcaggagaatggcgtgaacccgggaggcggagcttgcagtgagccgagatcgcgccactgcactccagcctgggcgacagagcaagactccgtctcaaaaaaaaaaaaaaaaaaaaaaagaggttgaggcagaaggatcacttgtgcccagaagtttgaggttgccgtgagctatgattgcaccactgcattccagcctgggcgatagagcaagaccctgtctctgaaaagaaaagaagaggctgggtgtggtggctcacgtctgtaatcccagcactttgggaggccaaggtgggcagatcacgaggtcaggccttcaagaccagcctggcctttggtgaaaccctgtctctactaaaaatacaaaaatatgcctgtaatcacagctacttgggaggctgaggcaggagaattgcttgaacccaggaggcggaggttgcagtgagctgagattgtgccacttaactccagcctgggcaacagagtaagactctctctcaaaaaaaaaaaaagataaaaagtatttgggccgggcacggtgactcatgcctgtaatcccaagactttgggaggccgaggcaggaggttggttttcatccaggaattcgagatcagcctgggcagcatagtgaaaccttgttgctacagaaaatcaaaaattagcctggtggtgtgcacctgtgttcccagctcctcaggagcctgaggtgggaggatcgcttgagacaggaggttgaggctgcggtgagccatgatcgcgccactgcactcagcctgggtgacagagtgaaaacctgtctcaaaataaataaaagaaagaaagaaagaaagaaagaaagaaagaaagaaagaaagaaagaaacaaacctgggtttttgttcttaagctgctaccagttagcagtgcgatcatacttaagccattttaacctctctgagccccaaactttgttttaaattttttttttgacagagtttctctcttgttgcccaggctggagtgcagtggcacaatcttggctccctgcaacctctgtctcccaggttcaagcaattctcctgcctcagcctcccgagtaggtgggaatacaggcatgtgccaccacgcccaactaattttgtatttttagtagagatggggtttctccatgttgatcaggctggtcttgaactcctgacctcaggtgatctgcctgccttggcctaccaaagtgctgagatacaggcgtgagccatcacgcccggccaacttttttattttttaaaaggtcagggtagttgatgtttctgttggttctaaaatttcttgactgtacaaggagtactttatgaaatgttttcctctgtaatctaaggtggctatgttttggggttacagttagaattttgaggtaggaagagcgatggaatgtatttttgtttttagttttgagggtagacattttgtgtttttactgtagcgagtaactcattctgctgtagtattattgaagttcttagaatgccattttgaatttcatttgtgtcttttatattattttagttttatgtttgtgtcmgtggttatataatcacaagtatgcaatttacacaataaaatgccataagagtatcataaaaaaagcttgaggatagatgaatagtgttgaagctttgtaggcctagctacttacctatatatttcagtttcttcctgaaaatggttccgtagtcattatctttcatacctatttctgtctggttacagctattttttagagacttctaaataagcctttattggtaacttagggaaaaggcaagtgaaagaacttaagctttgtccctttttccagaggaatttatgattatgttgatgttctctgactgagccagctgtaaagattactgtgtttcaaagcagcaggcctaaaaataataataaaaattctgtcacttcttgctttgtttttttggtagggattaatgtttggggagaagtgtgtgtgaatcagtgaccttcaaataattttgtattcttgaggcaattattatgtgacaaataataaaaaggtaaactgaaatagaaaggagaggatgaggtttatacattagttgagtcaggaggcatttgtggtacattggaaaaaacgggactaacagaagacttgggtttgaatttgggctcagttaaaaacttccattgtgtgatgttaggcaagtcacttcatttttctgatcttctttcctcattccttatatgttgtaacaactactcaagacttgtgaggaaaaggggaaatgatttttaaaaaatcaattctttatttacgtaacaagttggttatgtccactgcattgtgtgaaacattacagtatcatataggaaagtactgtcagtacagtgttggatcacaggattttttgagagtgccttatgagttagtctcatcattgagggccaacacatatactttggatagaaagaataaaatcctcaaagtgaaattttgattaatatcctctacccatttataggtacaccttattttaaccaaagagtatatgtgaaggacctaaccatcaaagcagaaaaataaggagatctttgtgaagtttatgaagagttcatgggccaggcgcagtagttcacgcctgtaatcccagcactttgggaggcctaggcaagcgaatcacctgaggtcaggagttcgagatgagcctggtcaacgtggtgaagccccgtctctaccaaaaatacaaaaattagccaggtgtggtggtgggcacctgtaatcccagctacttgggaggctgaggcaggaaaatagcttgaacctggggggcggaggttgcagtgagctgagatctcgccattgcacttcagcctgggtgacagagcaaggctccgtctcaaaaaaaaaaaaaaaaaaagttcatggaagttttaagtatctagtaatcatttaaaaattatttgagttaaaagtaatcgagtctctgattttttttgtttttttgttttttgagacagagttttgttctcattgtccagactggagtgcagtggcacaatctcagctcactgcaacctccacctcccaggttcaagcaattctcctgcctcagcctcccaagtagctgggattacaggcatgcgccaccatgcctggctaattttgtatttttagtagagacggggtttctccatgttggccaggctggtcttgaactcccgacctcaggtgatctgcccgcctcagcctcccaaagtgctaggattacaggcatcagccaccacacctggctcaagtctctgattttttttttttttttttttttttgaggcagagttttgctcttgttgcccaggctggagtgcaatggtgccatcttggctcatcacaacctctacctcccgggttcaagcgattctcctgcctcagcttcctgagtagctgggattacaggcatgcaccaccacacctggctaattgtgtatttttagtagcgacggggtttctccatgttgatcaggctggtctcaaactcccgacctcaggtgatctgcctgcctcagcctcccaaagtgctaggattacaggcatcagccaccacacccggctcgagtctctgatttttaaaactcttcataatacccctttatccaattcttcatagatggtaataacgtataattggtgacatttcacatcgctttgggcttataaagaatgtattttgacttcaggcatttgtgtttactgtgccatcagcctctagttcattttacttattcttttcttctccaggtttttcgttggaatatacgttgcacatttatggcgattctgagtgtgagggcagacttctgccaggctcagcacagcattttcgctgacaagtgagcttggaggttctatgtgccataattaacattgccttgaagactcctggacaccgagactggcctcagaaatagttggctttttttttttttaattgcaagcatatttcttttaatgactccagtaaaattaagcatcaagtaaacaagtggaaagtgacctacacttttaacttgtctcactagtgcctaaatgtagtaaaggctgcttaagttttgtatgtagttgkattttttggagtccgaaggtatccatctgcagaaattgaggcccaaattgaatttggattcaagtggattctaaatactttgcttatcttgaagagagaagcttcataaggaataaacaagttgaatagagaaaacactgattgataataggcattttagtggtctttttaatgttttctgctgtgaaacatttcaagatttattgatttttttttttcactttccccatcacactcacacgcacgctcacactttttatttgccataatgaaccgtccagcccctgtggagatctcctatgagaacatgcgttttctgataactcacaaccctaccaatgctactctcaacaagttcacagaggtaagattgtggcatggtctactttttggattgatttckaggtaaaatcccattaaaaaattctcttagcacaaagccatttattctgtatttggagtcatcctgccaatcctggtttgaattgggttgggttagttacagcagattttttcaagaacattttgtgaaatttggggactgtagagatatctagtactgttttctctgtgttctttctacatttattgacaggtttttttggtcaaacattcagtaatgataattaacatttattgaccacgatatgcacttagcattataacaaacaatgttacacattatgcaacgagcagtgtttgtgcttaaggtcacaaatacaaaaaccctatgaggtgtagctaccattatttccctcttaccaatgaggaaacaggttcagagccatttagtaatttgcctaatggcacatagtatgtggtggaactaatgtacttgcctaggtgtctgacactaaaaaccattctgtatgtacttcagatattctaaccacctttgatgaaaaggcacccccagactacttcgttgtaataatcgtatacaagggtccagaaacttgggtgaaggaaaggtggtagaggtagtatttttatgtcagatccttaatattttttctattggtaggagaaaaaactctttgtacttctttgagcaagcatttgaacataagtttttttttttttttgggagatggagtctcgctcttcgccaggctggagtgcagtggcactatctcggctcactgcaagttccccctcccgggttcacgccattctcctgcctcagcctccctgatagctgggactacaggcacctgccaccactcccggctaattttttgtatttctagtagagacgggatttcaccatgttagccaggatggtcttgatctcctgaccttgtgatctgtcacctcggcctcccaaagtgctgggattacaggcatgagccaccgtgcccagcccttttttttttttttttttttgagacggagtgcagtggcacgatcttggctcactgcaacctgcacctcccaggtttaagcgattctcctgcctcagctcccaagtagctgggactacaggcgcgcgccaccacacccagctaatttttgtatttttagtagagacgaagtttcaccgtgttggccaggatggtcttgatctcttgacctcgtgatccgccttcctcggcctcccaaaatgctgggattacaggcgtgagccactgtgcctgaccagaacataagctttttaatcattcttgggttgttgagtttaaatgatttttcttgctgtatttatggagtagagttagaaaggtgggtgaactcttagtgattttcattttatagatgggaaaactgagaccaaaagaggatttgacttgcttaaggtcacaaataccataaaaaattttatcgcaacttttcaatgaatggctattacagagtttattttaatgggattttatttgtattttgaaacatttttaaaattcctgacaatacttctacctttcttgagtctgtattataagaaggcctttttgtgaaaaatgaagtcctttagcaattaaaataattttacactttagataactaaatgatggacccttcttataggatatcactgtgcctgcttatttatacttataattccctgagcttcttaactttgtatacacagcgtacaagttgattctacgcctgtatgccctcagattgttcagtcacctttaagcctggctgaattatgtggtactattttcaacctgtggattccttggccatagtctccagaagtggcacaggccactgtcctcctgcaactataaaaaagatattggtagccccttgaagataggtagtcactgggttagggattcaccgtagggagagttttaaaggagcaaggcttctggctataactgcattagctgtctttttaatataccactttttttcttaatttcagaattttatttctttaaaaaaagcatgtttatttcataaaaatataaagatacagataagcaaaaagaatttaacaacatttaattgttaataactggcttctagatgtttttctctgcatatatctgtgtgtattcataaatacacatacagataggatcacactatatattttttaaaatctttccccatcttccttggtattgtttttatagctgtcatagtgttcactatatggatgtgccatacttctttaatcattcccttatttttggaccattaatgtggtttctaatttttcaccattccagtttgtggtgaatgtgctgttacctaaatatttgtatatgtctttaattatttcttttgtataaactcccagaagtagaatttttaggttgcagtgtatgtgaacttttgtgtaagttttcacgttatgctaccaaactgccctttagaaaggtgagtctcacactgccactgagatttcatgagtgtccattgaatatataaccacagtgagaacaattctgatctttgtctaaaaatgatatctcattgttttaatttataatagtagatttctttttttttttttttttttttttttttggagacggagtctcgctctgtcgcccaggctggagtgcagtggcacgatctcggctcactgcaatatctgcctcctgggttcaagcgattctcctgcctcagcctcctgagtagctgggattacaggcccgcaccaccacactcagctgatctttgtatttttaatagagacggggtttcactatgttggtcaggctggtctcgaactccttaccttgtgatatgcccgcctcaggcctcccmaagtgctgggattataggcgtgaaccaccccgcccggcctataatagtacatttctacatttttggctgtaggtttcaaaaacaagttccattataattttttttttttttaaaggaacttaagaagtatggagtgacgactttggttcgagtttgtgatgctacatatgataaagctccagttgaaaaagaaggaatccacgttctagtgagtgtgtagtatttaaatttttcaaaacaagttgtatctttcaaacataaatatttataaaactaggccaggtgcactggctcacacctataatcccaatattgtgggaagatcacttgaacccaggagttcaagaccagcctgggcaatgtggcgagatctcatctgtacagataattaaaaaactggtggggcatgttggtgcacacctgtggtcccagctacttgggtttttgaggtgagggaatcacttgagcccaggtggttgagactgcagtgagctgtggccacaccaccacattccagcctgggtgacagagggaaaccccgtctcaaaaaaaaaaaaaaaaaaaaattaaaaacttggtattaggtgggcacggtggcacacatttgtagtcccagctacttgggaggctgaagtgagaggatcgcctgagcctgggaggtcaaggttgcagtgagccttgattatgccactgcactccagcctggatgagagtaagaccttgtctcaaaaacaaaaacaaaaaaaccctggcagtaatacttttggatttttttaaggttgtagtggaaaatacattattgatagcaatctttcaaattcttttggattaacaaattggcagttttgttcatttgtgctcttaaagcctacaaatcatagtattttcaactaataaaaagcaaaatttagtgtgctcttattttaacaacatgtaaatttgcaagttttattttttaggaaattaatacaatatttagcttttgtttctaggctactaatttgaatataatgaaagtaatttccatcagacattcttaagtccatatggaactctgccactttgcaagtacaagattagttacttaatattttgtggataacttgtaggaggcaaaaaggtgggataagaggatgaggagaggtagaaggcatcctcctccagagtaatcagcatagtttctgatactttttgttaggtttctgaggagctttagtatgattagattttttgtctagctcaatttgagcacaaagtgattggaattattttaaattaagttcctttttagcatcaaaataggctgtttccttatagcaaatgggagcatcagattagttaacattttattctttcttccctaagtagttgtctaagttgtaggagcagcttttaggagcacgtaatgaaatgatcttgtaattttagatgtctttgagctgttggtttgattgtgggaaggttatgtagtaggaagagaactggagattttataagtagttaggaagaacgtaacaaggaagatactggtttaaggttatgttcctgcttcttattgagaggtagttctgtagtctttattatattggtcagtggttgggaaggcagttgatgcaaaaagaataatgacctattggtaaggcagtcctcttatatctgatccatagtttcctcatgtccattttggtgaaaataaaaactaaatagccaaatgtgttttaaaaaaatgtgttttagggccctgtgtggtggctcatgcctgttcccaccactctgggaggccaaggtaggtggatcacttgagtccaggagttccaagactagtggggcaacatggtgaaaccctgtctctccgaaaaatacaaaaattagctggacgtgatggcatgcacctatagtcctagctacttgggaggttgaggtgggaggatcacctgaacccgagaggtcaaggctgcagtgagccatgattgtgctgctgtgctccagcttgggtgacagagaccttgtcagtcaatcagtcaataatgtgttttaatagtttggcatggtaataatttgcttgcagtcaaatttctaaatgactttactgtccactgctggaaatcactgggaatgagtgtaaacatgtcaaatgcagccctgtgtttaaaaagtagtaataaaatttaaacttccgaaaataagctgcatacaagtttattttgctgcattatgaatatgttctctagtgagcaaaaatcaacttgttttgacagatggcagagtgagaaaatgactggattgaccatagtctgtttgagtcagtaatgttggtaaacatctttgtgaaatagawatgaactaaagaacttgaactagtttgaggaagataatggtaggcctaagatttattccaggcctttaaatttaggtttttgttttgttttaaatagctgtgatctgggaaatgcaaatcaaaagcacaatatgataccaccttactcctgtaagaatggccgtaatcaaaaaattaaaaaaaaaaatagatgttgtcagggatgtggtgaaaagggaacacttgtacactgctggtgggaatgtaaactagtacaaccactatagaaaacagcgtggagattccttaaagaactaaaagtagaactatcatttgatccagcaatcccattactgggtatctacccagaggaaaataagtcattaaaaacaaacaaacaaacaaataaataaatagctatgatcagataaaatgaaaggtttaacttacacttgaaaaaacaagggcatttagccttaagcttggaatttccttttcccagacagagattttaagagttaatctaattttgctaggtgaggagggttttggaacatttcatggtaagaggatatccccaaataaggcctgtcagtcctctgaatgctcttgcaaaccagacacacattggaatagactaatggtggttttagctgtatcaatttgaggttcagatgtttctaaatgattaatgatttttttaaaaatagacactacttatatgagtaagtgaagcatgttttatattgtttcttaactaggtgcattttagggagtattagaggaagtaagctcttgactaaggtactggttttattgctatttacagttaaactctctagtgacatttataataacacagtcctttaattatggggcgtagttgtcaactcaatcatgtactgttttggctaatgggctacatgaagtgttctagtggtgccaataatgaatgcagaatcaatttaatgctctgtcacttttctctttttcctcccctaatatcttaaagtgtccttatccaatctcattagaatagccttatgtttttaaaaaaattcctaacagtgtttttgcatttctatctttgaagcttagatggcaggagggaaggcttgtaaaatgtcagcccccagtccccctcctccactccccatttgtgttggtttcttaggacctcttgctaagtagtgaggaagataaacccctgcctatactgtgaatgctcgtgggattagtcttaattgaaagatagcccaaataggtgaatacagaaagagaaagggatacttgacaaaatggtctccatttgcccaggaccctgtcatgcagccctgtccttgttaaatggggacatatataatttagtaagcactttaaaaatactcactgcttgccttttaataagcacaaagatggtagtttgtttctgttatgatttactaactattggagatttcttatcagataacctttctctaaagatgtcataacttagttatcttgaattataatcttcaattatctgtagagaccaatgagacaccagttggtatgctttgccagagtggacttttaaatcatgttgacatgtgctgtgtcctctgttactttgtcttggctttaattacagttttgtctattatgtctaattactactctattcagatatcatttttgggagaacactagctcttatgactctgatagagatttctgtaagtttttgtaaattcagatgtgtgcgacactgcattgagaagggtaatttatttggcaaactttaatttcaatcctggatcattttacagcaatgatcagaattgtgttaacaataggtatatatagtgcagttagttcagttaggcctgccgtgtgtactgtgtgcaggtattctgtattaggatgttaatcatggagaaaatatcaatttaatgtaaaaggtcatttcttttcaggattggccatttgatgatggagctccaccccctaatcagatagtagatgattggttaaacctgttaaaaaccaaatttcgtgaagagccaggttgctgtgttgcagtgcattgtgttgcaggattgggaaggtaaactcttacctttattaccctttttgtctgaattcattaccatgcctaagttagttgaaagtttcactttggtagacatttgcatatattatactaaataacattaaattacctgaaaggaaaggaaatgagaggaaaaactagtgtaatgatttctcaaaagagcctgttcatttcatctggttgtctgattctgatgccagcctggattgtgggtgttttatttttctccctatttcaagtaatcaaaagttcaggtcactgaaattggcaacaaaattaaaataattttagagtttgatgaatctatacatggttaattttggactgagatgaatgggaagttaatagatagcagatatctgaactttaaactcttgaaagaagatgtatggacaagaattgactttgatcttaaaaccttttcccctgagcattgcttagaatggtgttgcaacgctgtcatcagcagcagattaaatgccaatttaggatgcacactttgactcaaaacattagtgtaggctgccattgcctcaaggtggtgattactcaagctgttagttctgctctgcccttttgtttgctatttccttttttgtagtgtggtactgtttgttcataaggttagaagttttagtccttatcctgaaggttgaagataatgttgtaacgtgagttggcagttttataactagtagctatcctagttttaggtagcccaaaattggtgccctgtaatgggctttataaaaacatcatttcctttgttaaatttttttaaaaagatagaacttcttctagtcatcaattcttgggcattttcctagctcwtcaaaaggattttcttgaaaacgtctagcacctttttagcatttgataaggaaatattaaaatcaattggtaatgaaaattctgacacattggagataagtaatatgtttggtcatttattttactgtgataatggctaaaggccaatgaaggatttttgatcatatctagtgatgagagaatttaatatataatgtgatgttttaaagagtaaagatttcttaaggtttagaatttagtgctttactaaaagtagataatcaggctgggcgctatggttcacgcctgtaatcccagcactttgggaggcggaggcaggcagattgcttgagcctaggagttcaagagcagactgggtaacacggagaaaccccgtctctactaactattaaaaatcaaaaattagctgggcatggtggcgggcacctatagtccgagctatttgaggaactgaggcaggaggatcacctgagctttgggaggttgaggctgcggtgagccgtgattgtgccactgcactctggcctgggtgatagagcgagaccctgtcccctgccccgccaaaaaaaaaaatcatagaattaatgatgatgagatatatttactgtattaggcagataccagctactttagtatacaggaaaaagaaagctcatgcgtkgcatkggtaatatgcagttacaggtttttaaaaatcctttcactccaagacttatggatacttacatacaggtttctttctgcagggcacctgtgctggttgcacttgctttgattgaatgtggaatgaagtacgaagatgcagttcagtttataagacagtgagtatgaagtttttgtgttcagaaacacagaaagcaagatcatgcatgaggaaggaattatggaagggatattcatttatagyatgggataatttgctttttttggcttgaagtattatttgaagatgtaaaaaatttagagcaagtgatagagactcagtacagctggtttccagattcaaaagttttctaatttggacattatagactgtgtccagtatattgttttgagtatctaggaatctcaaaaatgccccttttaatagattccaaataccttccaaatataattctctgttaggaggaggcaagaagaatgtgtagaggagcagttaatcacctgagactcttttttttttttttgagatggagtctcgctctgttgctcaagctggagtgcagtggctcaatctcggctcactgcaacctctgcctcctgggttcaagcgattctactgcctcagcctctcaagtagctgggactacaggcacgcaccaccacgcccagctaatttttgtatttttagtagacggggtttcaccatgttggccaggatgatctcaatctcctgatctcgtgatccgcccacctcggcctcccaaagtgctgggattacaggcgtgagccaccacgcctggcctcacctgggactcttaagtgatctattcagggacaaaatcaggatggtagtgcacagacaggatcttgacattgatctggaataacgaatcatgctattttgttatccagaattctttgacaatttttgtcttgccctttccctttcaacccttcctttaaaaaaagaaaacgaaagtagaaactattctgatctttattaaatggttaatagactataatgacagtcagcaagaaaaatttttctattccttctaggagggcttagaaagttcatgttgcaacttagctctttaagaattgttgtagtatgggaaatatgctggttttcagctgtgtggaattagaaaggctttaggatgtaaataatgcatttcagtgaatcagacagctctttttttacatgataaagtttgccattcttgtattttcagaaaaagaaggggagcgttcaattccaaacagctgctttatttggagaaataccgacctaagatgcgattacgcttcagagataccaatgggcattgctgtgttcagtagaaggaaatgtaaacgaaggctgacttgattgtgccatttagagggaactcttggtacctggaaatgtgaatctggaatattacctgtgtcatcaaagtagtgatggattcagtactcctcaaccactctcctaatgattggaacaaaagcaaacaaaaaagaaatctctctataaaatgaataaaatgtttaagaaaagagaaagagaaaaggaattaattcagtgaaggatgattttgctcctagttttggagtttgaatttctgccaggattgaattattttgaaatctcctgtctttttaaactttttcaaaataggtctctaaggaaaaccagcagaacattagcctgtgcaaaaccatctgtttggggagcacactcttccattatgcttggcacatagatctccctgtggtgggattttttttttccctttttttgtgggggagggttggtggtatatttttcccctcttttttccttcctctcctacatctcccttttcccccgatccaagttgtagatggaatagaagcccttgttgctgtagatgtgcgtgcagtctggcagccttaagcccacctgggcacttttagataaaaaaaaaaaaaaaacaaaaaacaacaccaaaaaaacagcagtgatatatatattccaggtggtttttagtctttactgatgaaagggtgttcatgttagtttcttcaaaaccctatctaatactaggcaaagtagccaagagccttttgttttgtttttattttgataaattagtggagaaatggcattttaagaggagtctcttctcaacttacctgagagtcgaattcttctcttccctaaccaatgaagctaagtggttatcccagaaacttgtcttctaaaagggaggactccaggccatcaataaagatgtccaggcagtgagcgtactttttacaccctgtagaattgtgggctgtagcgttactctgattttctgtctagtatcagagaatgctggtagcttaaaatttttattttaggacttgtactctgaattttcaggaaccgtcaaaggagcagcagcaaattcacatattttcgacttgagaaatgcttgtggtatgtgttttccaaactgccccctatatgtaaagttcagtttaaccactgattgccttgttattactaggttttttgagattaaaaaaaaaaaatccctggtttaaaaccaacaatgatgcctagtgagtatgtgtccacaggccataacagggtagaagagagacatcgtgcaacccaatgagtagtgaagggactgtgttgcttgtgaagcggtgtagtagcatttttgcagattcttggctgggtttagtgtactgatctagaaaagctgtttttctgctcctttgtggaaggcagttatgatcaggctgcatggacaaagcaggtagaggggcmccatcaggggctcttgcactattttcacctctaaatattacrtactcagtagtgccctgcttctagggctctgaatacgggcttaaagtcatcttgtcctgctggaatttgctgtgcagagccataagcctcccattttgttagcgtcagctaggccaataggaacagaccgggaccttgtctcacactgatgatacctcacatgttgaccggctatgtgaactgcctatttcctatgctggagttttgatttttaactaaacgcaaatctgtagattctctcctctcccatcccagaaaacaaaacaaaataatgcttttcgaaattgtttctaggactttaaaacataatggtatatccaaaattctttatttcagaatgcaacaatagattccattaatatagactcaagatcaaaacagcatacctgctaagctaagatagatggtgttgattccactgggttttgatcaatacaataacaaacctttttcctttgacatactctgaattttgttgtttggggggagggkkgtgtgtgtgtgtgtgtgtgtgtgtgtgtrtatgtgtgtgtgtgtgtgtgcacgcgcagtgtccatcagtatcagtgcctgcctgagttaggaaaattacattcctggttctgtattgaggagaaggatgtataaagcaacatgaaacattagccctccttttattttaaagactaatgttaattgttcttaaaactggattttttttccttaaagcaatttttttcttttcgatttaatgaagtattrctagctgaagccagtttgacatagagagatgtcagattgatttgaaaggtgtgcagcctgatttaaaaccaaaccctgaacccttttaaagaacaataaaacatattttacaygctctttgtgcatttttttcctccatcctcaagagtttatgtctgtgcttataaagcggagtttaagctgggtgcagtggctcatgcctataatcccagcacttcggaaggccaaggcaggcggatcacttgagccccaggagttcaagaccagcctgggtaatgtgttgagtccatctctacaaaaaaaaaatgtttaataattagctgggcatggtggtgtgtgcttgcagtctcagctacttgggaggctgaggtgagaggaacacttgagcccaagaggttgaggctgtagtgagctgtgatcatgccactatactccagccttggtgacagacaccctgtcccaaaacaacaacaacaaaaccaaaatttcacttacatctgttcccctttctttgcctgctattttcaaggactgttttgggtcctgctagtttactgcaaggaggtaaaatagaggcttggaaattcaaagattttatgtcactgaggtgttcaggaagagccaacttaaccatagctgggatacatctagtacattttctggttcagttcttgtatacaaccctgtaggaattcagcatcttgtcaaaggcttggtttataccatagattattattttttagagacagagtcgtgtagtgcttcccaggctggagtgcagtggctattcacagagtcaataatcgcatatactatggccattctgagtagtctctcactgcacccagcttatttataccataggttttggtgaagcattgcaactttgtacttgaattcgtattaaagaacaatgaggaagtaacagctctgtattaatatatcaggatttgggagtgtggaatttccctttcactatgggtaagcatccatccacccaggtaacaacatgctcagatactaggaaaagatacgacactcatttcactttggagtacctcagtctggagggggtgtcagatatgtagacataaaacagttacagtgggtggttatagtactatttatagatcattgatccacagcctgggcaacatggccaaaccccaacttgacaaaaaatacaaaaagtaactgggtgtcgtggcgcactaccatctggactacagtcccagctactcgggaggctgaagtgagaggattgcttgaacatgggaggctgaggttgcagtgacctgatactgtgccactgcacttcatcctgggtgacagcgagacgagtctcagaattcattgatcctgccacttctcttcacctcttttcacttcttcatgtccttcattacctagcttaggttctgtgatgcactgtgacaatcagcttttcagccttgccccatctcttgttgcattgtacttccctggctaaaatccatttttggttaagttcagtactccactttctgtgcacttaagtacttacacaactgaacatgctgattcagtctctctaaggtcatgacctccccgggccaggtggtacgcgcctattaagtctcagttactcaggaggctgaggcaagagaatcacttgagcccaggagttttgaggctacattgtgaaatgattgtgcccgtgaacagccactgcactccatcctgggcaacatagtgagaccctgtcttgaaaactaaagctatgacctcacatgagcctcaaaacctctcaatcctagtacatttctctatcccatttacactttctcttaaatttttaacacctttgccatcctctcagcttatgactttttaaaacttagaaataaaattttcacaagctcctcccatcacatctactcacccacctgcatctgtgctactgtcttttagttactataggcagactgtccttgcccaatttttttttttttttttttgagactgagtcttgctctgtcacccaggctggagtacagtggcgcaatctcagctcactgcaacttccgcctcccgggagcaagcgattctcctgcctcagcatcctgagtagcagggattacaggcacatgccaccaagcccagctaaattttgtatttttagtagagacggggtttcaccatattggtcaggctggtctcaaactcctgacctcatgatctgcctaccttggcctcccaaagtgctgggattacaggcatgagccactgcccggcctgtccttgccctatttaaggcaagctcttccacttgtgtgctaaattccatcccttaacctgttcaaagggcccagaggtgtagccattttccttctctgtcctgctcattaacttttccccctactagatcattcccatgagcttataaacatgctagtattccatattttaaaaaaatccttgtttgaccccgcatctgccccttcagctgtcatcccgcttctttgctcttctctagtacaagttgagaattatctatctatgctctctacttctctcctttgagcttgcaccaatgaggattttgactccacagaacagcccgtgttaaagatcgccagaggctgggtgcagtggctcatgcctgcactttgggaggccaaggcagacagatcacatgaggccaggagttcaagaccagcctcccaacatggtgaaaccccgtctctactgaaaatacaaaattagctggatgtggtggcacacgcctgtaatcccagctactctgggtggctgaggcacgagaatcgcttgaacctgggaggcagaggttgcagtgagccaaaattatgcttctgtgctcctacctggtcaacagagtaagactgtctaaaaaaaaaaaaaaaaaaaaaaaaaaaaggatcaccccgatcgatggtcaattctcataacttttttttgagggtcttgttttgtcacccaggctggagtgtagtggcatgatcatagctcaccgtaaccttgaactcgggctcaaacgatcctacctcagcctcctgagtagctaggactacacgtgcatgtcactgtgcccagctaattaaaattttttggttgggtgtggtggctcacatctgtaatcccagcacttcgggaggccgaggcgggcggatcacctgaggccaggggttcgagaccagcctggccaacatggcgaaaccccgtctcttctaaaaatacaaaattagccaggcagggtgatgcatgcctgtagtcccagctactcgggaggctgaggcaggagaatcgtgccattgcactccagcctgggtgacgagcgaaactctgtctcaaaaaaaaaaatttttttttttttttttttttggagagacatagtcttcatagcctttatttatttatttatttaggacatggagtcttgctctgtggcccaggctggagtgcagtggcgcgatctcggctcactgcaatctctacctcctgggtttaagcaattctcctgcctcagcctcccaagtagctgggactacaggcacgtgccaccacgcccagctaatttttgtatttttagtagagatggagtttcaccatgttggccaggctggtcttgaactcctgacctcaagtgatccctccacttcggcctcccaaagtgctgggattacaggcgtgagctaccgtgcctggccaaaacatagtctttttatgttgcccaggctggtcttgagctcctggtctcaaatgatccccctgcctccgcttcccagagcgctgagatgatgagcatgagccactgtgcccaccttcataacttctttgacatgtcagcatatggtacagttgaccacttcctctttgaaatgcttcatttgcatgtaggaaaataatgcccttctcccctaaccccccctcaaatgtccaggttctaaatccctggaacctgtgaatgttatcctacatgtcaaagggactttgtgggtgtgattaagttcggaattttgagatgggaagaatatcttggattatcttggtaggcctgatctaatagcatggatccgaaaagcagagaacctttcctagctgaggtcagagggagatgtgtctaggatagaaggatcagagatttatttgaaggtggagggaaggggccaggagccaaggagtgacggcagcctcgaacctggagaaggcaaggaaacagattcgcccaacagcctccaagaaggaacttagcctgctaacaccttgattttggttgcatgtaggatttctacagaactgtagggtaaatctgtgttgttttcagccacaatgtttgagataatttattatagcaccaatagaaaacgaatacaggtttttgcctctagaacactacactcctgagttttcacctagtttagttgccacacctcagtttcggtttctggttcctcattagcttctacacttctgttctatctccctggactctattctctggattctagacccatatccaatacctccctctcatctctcactgatgtgtcatagtggaaacttaactttaattcttgctcaaatgttagcttgagtgaagctttccatggccaccctatttgtcccactaagctttagtgtcctctgtaatacttaccaccatctcacaagcttcttttttttttttttttttttttttttaaagtttcactcttgttgcccaggctggagtgtgatggtgccatcttggcttactgcaaactccgcctcctgggttcaagcaattctcatgcctcagcctcccaagtagctgggattacaggcatgtgccaccacgtccagctaattttgtatttttagtagagacagggtttctccatgttgatcaggccggtctcaaactcccaacctcaggtgatacgcctgcctcggcctcccaaagtgctgggattgcagacaggtgtgagccactgcacccggcctcgaccttttaattatttgtttcccccaccaaaatataagctcaacaaaggcatagctgttttttgttttgtgtttcgttcaccgtatcttcagcacctcaaatagtgcttggcatgcagcaggtgctcagtggatactgaatgaatgggtatggatagagacatagacgaattatggtactgtgatactagggggtaactaaaactgccctggagcacatcaggagatgctgcagtgggcatgtttgagctggattttgaaggatgagatagaaaaggttgatacacaatgagatagcatgttccatccatcagaatggctatcataaaaaagatggaccataacaagtcttgggaagggtatgaagaagttggaacctttatacattgctggtaataatataaagcgatggtgcagtcacttttgaaaaacagtttggcagtttctcaaaaagttaaacacttgccatatgacccagcaattccaatatgtacaattttcaattctacatatatacaagggaaatgaagacattacggttacatgggctagggcggggacagggtttctttctgtggtgataaaagtgttctgggattagacagtggtgatggttgcataacagtgtgactgcattaaatgctgctaagttgtacacttacaaaaaaaggttgatgtggggacagtacatttcaggttgaggaaataatacaaggcagtggaagtatgaaagagcatggtatttttgggagaaggggcaagatttggtctctctggagggtttggatttgtgctaggcaggtttggttgtcatcagagtagaagaggtactagacaccccttccttgtacctccccgtctacccccgaggccatagatgattggatcagggatagacagttgactcaactgctgacattggccagcagattctcgtttttttttttttttgagatgtagtgttgctctgctgcccaggtgggagtgcagtggtgtgatctctgctcactgcaacctctgcctcccgggttcaagcgattctcctgcctcagcctcccaagtagctgggactacaggtgtatgccacgaggcctggctaatttttgtatttttagtagagatgaagtttcaccatgt

SEQ ID NO: 96093 - DNA, 53543 bp, Homo sapiens
taatacctctgtgtgctcctccttggtgcctggcctggcacacatcaggagttcaataaatgtctgttgatgactgttgtacatctctttgctgtccactctttgtgggtgggcagtgggggttaagaaaatggtaattaggtcaccctgagttggggtgaaagatgggatgagtggatgtctggaggctctgcagaccccttcaaatgggacagtgctcctcacccctccccaaaggattcagggtgactcctacctggaatcccttagggaatgggtgcgtcaaaggaccttcctccccattataaaagggcaacagcattttttactgattcaagggctatatttgacctcagattttgtttttttaaggctagtcaaatgaagcrgcgggaatggaggaggaacaaataaatctgtaactatcctcagatttttttttttttttgagactgggtctcactttttcatccaggctggagtgcagtcgcatgatcacggctcactgtagcctcaacctctccagctcaaatgctcctcctgtctcagcctcccgagtacctgggactactttcttgaggccaggaattcaagaacagagtaagatcctggtctccaaaaaaagttttaaaaaaatcaaacacacttagccgagcatagtagctcatgcttgtagtcccagcagatcaggaggctgaggcatgaggattgcttgagatatgattgtgccactgtggcactccagagtaggcgacgaagggagatcctgtctcaaaaaaaaaaaaaaaaaaaaagggaaggcttcattgagaaggtaggtggcttttgagcaaagattccaaggtgaaggagtgagccttgtatggaggaggggaggagcagtcagccagagggaacagggtgaggcaggcgtttaccgggcatgctctgagagagggggatagatcctacaggcctggggccttgtggcctctgcagaagccattttgaggaaactttgcaggaatctctgcaaagctgatatgatctgaattacattttattttatttatttatttttgaaataaataatgaaattatttatttattttttcttgctctgtcgcccaggctggagtgcagtggcgcgatctcggctcactgcaagctctgcctcccgggttcatgccattctcctgcctcagtctcccgagtagctgggactacaggcgtccaccaccaagcctgggtaatttttttgtatttttagtagagatggggtttcaccgtgttagccaggatggtctggatctcctgaccttgtgatccgcctgcctcggcctcccaaagtgctgggattacaggyrtgagccaccacacccggcctcttttttttatttttaattgagatggggtctcactctgtcacccaggctggagaacaaaggtgaaatctcggctccctgcagcctctgcctcctgggctcaaacaatcctcccacctcagcctcctcagtagctgggaccacaggcatacaccaacactcccggctaattttttgtattttcggtggagacggggtttcaccatgttgcccaggctgatctcaaactcctaagctcaagtgatccatgttcctcagcctcccaaagtgctgggattataggcgtgagccatagcgtccagccctgacttacattttaaaaggatggctcttgctgctgtcttgaaaatagactgagttagtcagtttataaaactggggagattttgcataaaactccagatttctgccttctcttgaaaaataggggctaggtgcgttggctcactcctataatcccagcattttggaaggccaaggtgggcagattgcttgagcccaggagtttaagaccagactggacaacatggcaaaaccctgtctctaccaaaaaaaaaaaaaaattagcagggtgtggtggtgcacacctgcagtcccagctactcaggaggcaagcttgtattcctagctacttaggaggatagtttgagcccaggaagtcaaggctgcagtgagcatgatcctgccattgcactccagccagagcaaaaaagagagcgaaaccccatctcaaaaaaaagggaagatttagctatgttggacttacctgtcctcatggagctgaataatggccacccctccaggtagggcctgaactctacctttgccagagtcccctccactccctgttggtcttagacaatgaaactgagtgttagtagctatttaccaccaagctcatgcttgttgttcttataataaagataaatggtttaataaatggtatgataaagaaaattatattatggtattataccatttaataaatggtataataaagaaaatggttttttgcacccacatttccattaaaaagtgagaaaattaaagatacctgaggatggcagagtgtttgatgaaagatagggaaatgttggccaggcaccgtggctcacacctgtaatcccagcagtttaggaggccggggcaggcggatcacaaggtcaggagttcaagatcagcctggccaacatagtgaaaccccgtctctactaaaaatacaaaaaattagccgggagtggtggcaggtgcctacaatcccagctactcggaaggctgaatggcgcgatctcagctcattgcaacctctgcctcccaggttcaagccattcttctgccttagcctccctagtagctgggattacaggcgcctgccaccatgcctagctaatttttatatttttagtagacgtggggtttcgccatgttggccaggctggtctcaaactcctgaccttgggtgatctgcccgcctcggtctcccaaactgctgggattacaggagtgagccacagtgcccggcctctaatttttatttttaatttttttaatttttatttttttaatttttattttatttattttttgtaatttttaaaatatacaaaaaaagggccgggtgtggtggctcacgcctgtaatcccagcactttttgggaggctgaggtgggtggatcacgaggtcaggagatcgagaccatcctggctaacatggtgaaaccctgtctctactaaaaatataaaaaaattagccgggcctggtggcaggtgcctgtagtcccagctactcgggaggctgagacaggagaatggcgtgaactcgagaggtggagcttgcagtgagccaagatcgcaccactacactccagcctgggcgacagagtgagacttcatctcaaaaaaaaaaaaaattatatatatatatatacatatatatatgcaaacaaagagcatctgagtcataataatgtaaatctatcacctgactgacctgctgccacacctcatgatctcatctgatccccacactccttctctttgggatactgtgtacagccatagcgtgggtgaactttgtattcctatcctccccatttttgttattttattttatttcttatttatttgagacagagtctcactctgtcatccagactgtaatgcagtggcctgatctcggctcactgcaacctccacctcccggtttcaagcgaatctcctgcctcagcctcctaagtagctgggacctacaggcacacaccaccacgcccagctaatttttgcatttttaatagagacggggtttcaccgtgctgggcaggctggtctcgaactcctgacctcaggtgatttgcccacctcagccttccaaattgttaggattacaggcatgagtcactgtgcccggcctcctccccattttataacaagggaaatggaggcccagaatggttaagtaaacccacccagggctagctgagaattagcaacagagaactgggagtagaatttgttccctggccctttgctgtttctattataagccacccagtcttagattttctgttaccttataattaatgactcaaatgcagtttctgagtgagaaacacaagtcccaaacactctttaaagaggcataaagatgtatcttgttgttttcttttgtttgagacaaggcctggctctattgcccaggctggagtgtggtgacatgatcttggctcactgcaacatctgtctcctgggctcaagccatcatcccacctcagcctcctgagtagctggaactacaggagcgcgcccccacacctgggtaatttttctattttttgtagagatggggttttgccatgttgcccaggctggtctcgaactcctgagctcaagtgatccacccatcttggcctcccaaagtgctgggattacaggcgtgagccactgtgcccagcctcttgttgactgtaggaccacaagttggcggctaacttagagcaatgtttggcacacaggaagcactcattaaatattgacattattgtagttattttaatagcccagcattgcacttttaggtctttcagctttcagtgatgatcagttgataattgatgatctggtggagtggttcttaatggtagagttgggggcaattttacactcccttacaccccactaatcttccccccaacccaatggtaaagctattgcacagtacttggcaatgtctagagacaattttggttgtcacagcctggggggaaggtgctactggcatctagtgggtagaggctaaggatgctgcttaattttttttttttttgagacaagagtttcactctagttgcccaggcacagaacagcttcacagaagctgttaatgcacagaatagcttcctacaaaaaagcattacctggcccaaaatgtcattagctaccaggctgagaaacctgccctcctaggccgggcgctgtggctcacgcccgtaatctcagcatattgggaggccgaggtgggcggatcctgaggtcaggagttcgagaccacctggaccaacacggagaaacccagtctctaccaaaaatacaaaattagccgggcatggtggcacatgcttgtaatcccagctactcgggaggctgaggcaggagaaccgcttgaacacagaggcagagattgtggtgagccgagatcacaccattgcactccagcctgggcaactagagcgaaactcttgtctcaaaaaaaaaaaaaaaaaaaaaaacagggaaagaaaagaaaggaaacctgccctcctatcataggataatcccatttcctcctgtctaaagagacgcctacttagtcatcctgggtgactgcatcagggaggtagattttggagtctgaaaggctgggttctgtcactttgttacagtgcctctggtgcaaagaaagcattttaaaaaccctgtacaattaaaaaattgaatttaattactttgtgtaactttgaataattcacagaagtctgaacttctttatcctgtcctgtaaaatggaggtaaaaagcccttggccgagagctgttttgaggaaaaactgaaataacattggtaaagtgtcgcacagtacttggcacacagcagcccctcgacaaacattagctttctttccctttcttgtcggtttcttcctctccaaacccgcgtgttgcttttctttttaattatttttctgtagccctcctttgcggccacaaactcgctttctaacccaggttcagcccttttattggctgagtgaccttgtgcaagtcacttttcccctgtaggcctcggtttattctccgtaaaatcagaaagttggcctccgatctccaagcacgcttttcacgacgaagtgggactgttaagtttacagagctgctttcctcccccgggactgatggtacggtccccgggcggctccccacccatctgtcgcagaccttggtacaggcccagggggccctcggcggcctctccgggctgcccttgccccctgccgagttccgggcccgtgtctgcgcaagctgattggctggagcggtgcccgggctgcgcggctataggtgagcccaggaggggacgggcggggcgggccggaggcccgccccctcccccctgggtcggacgctgagcggagccgcgggcgggagggcggacggaccgactgacggtagggacgggaggcgagcaagatggcgcagacgcagggcacccggaggaaagtctgttactactacgacggtgagcaccgtcctcgcggcgggggcggggccaggccgggccggaccgggaacctggaggctgaggctggagcgccgatgggaggctgcgggaggctgaggcgctggggagaggctcggagaggaggctgcgagggggaagtcgaggctgagggaggaggctgcgaggaagggagatcgaggctgagaccaagaggggatcgcgtgggggaagcgtgaggtaatcttgatgggaagattctgaggaagtctgatgtggagagtttgagtgggactcctagaggggagggtgcgtcggagcggggaggctgaatctgatggagacggctgcaaggatacattttcttgccgagaacccaaagctcttccctgccccgtcccttcctcatcttttctgggggaagagtcctgcacgactggttgcccgcctcccctcccccagcctctgagcggggcctgcggttgctactgcgacgtggggcgccaggggttgcaaggagaaggatgcaacctgttaaaacagacttctcacttaatctctcaagcaggttactgtgttcgaggaagtgttgaggggctggggccgtggggttgatcgggtcacccttcccagtgaccgaagttctctccgtgtcagagctcagagtgttaggggagcacagagaagaggcaccgaactccacctgaggagtcagcgaaggaggggacatcttagttaggacctgaagaacaggagttcttagccaggcacagggaaggcaaagataacagcaagtttcagaggcaagagagaggacaggacctttgaaaaacaggcatttggccgggcgtggtggctcacgcctgtaatcccagcactttgggaggccgaggctggtggatcacctgaggtcaggagttcgagaccagcctggccaacatggtgaaaccccgtctctactaaaaatacaaaattagccgcgcatggtggtgtgcgcctgtaatcccagctactctggagcctaaggcaggagaatcccttagaacccgggaggcagaggttgcagtgagctgagatcgtgccactgcactccagcttggacaacagagcgaggctctgtcttaaaaaaaaaaaaaaaaaaagatgtaaatagggaccggaccatgaagggctgggcatgctgtcccaaggaagttggactttattgagggcacttgtgagtgattcaagttttatgcaggttattgacatcatcaggtttataccttagaaattaaagtaatgggggccaggtgcagtggctcacacctctctaatcccagtactttgggaggctgaggcaggcagatcactcggggccaggagttcaggaccagcctggccaacacggtgaaaccccatctctactaaaaatacaaaatttaggctgggcacggtggctcacgcctgtaatcccggcactttgggaggctgaggcgggcggatcatgaggtcaggagttcaagaccagcctgaccaacatggtgaaaccctgtctctactaaaaatacaaaaattacccgggtgtggtggtgcgcacctgtaatcccagctactcaggaggctgaggcaggagagtcgcttgaacccaggaggcagaggttgcagtgagccaagattgcaccgctgcactccagcctgggcaacagggtgagactccatctcaaaaaaaaaaaaaaaaattagcgaggtgtggtggcacatgcctgtagtcccagctactcaggaggctgaggtgcgagagttgtttgaacctgggaggcagaggttgcagtgggctgagatctcaccactgcactccgtcctgggcaacagagcgagacttcgtctcaaaaaaaaaaaaaacaaaaaaattcagattgtaggggtaaggaagaaggcatggatcccaagttcctggtgtgggcagtattttttattttttgagatgatgtctagctctgtcacccaggctggagtgcagtggcttgatctcggctcactgcaactgcaacctccacctcccagattcaagggattctcctgcctcagcctcctgagtagctgggattacaggcgtgcgccaccatgcctggctagtttttgtatttttattagagatggggtttcacgatgttggccaggctggtctcaaactgacctccagtgctccatctgcctcagcctcccaaagtgctgggattataggcatgagccacacttcctggcctctgatgtgggcaatttgatggtgagtgtttggaggtttggagaatgccatgtcagttgataacttttttttttttttttttttgagatggagtctcgctctgtcgcccaggctggagtgcagtggcgcaatctcggctcactgctgcaagctccacctcccgggtccatgccattctcctgcctcagcctctccagtagctgggactacaggcgcccgccaccacactgggctgattttttgtatttttagtagagacagggtttcaccgtgttagccaggatggtctggatctcctgacctcatgatccgcccgcctcggcctcccaaagtgctgggattacaggtgtgagccaccgcacccggccccaactttttttttttttttttaaacttctagagatggggtctcaatatgttgcctgggcttgtcttgaactcctgtgcctggcctcaagcaatcctgccaccttggcctcccaaagtgctgggattacaggcctaagccactgttttttttgttgttgttgtttgtttgtttagaaataactattgataactgttaagatgtttaggggacatccaagtagaggcatccagtaggcagtttagaagatagaaattttttggtagtcatcagtatcttagtctgctataacagaacactgtttataaagaacagaaattgctgaatgtggtggctcacgcctataatcccagtactttggtaggctggggcggatggttctcttgagcccaggagtttgagaccagcctgggcaacttagggagactctgtctctacaaaaagtaaaaaaattagctgggcatgatggcatgtgcctgtagagaggctgaagtgggaggatcacttgatcctgggaggtcgactctgcagtgagccatgatcgcaccagtgcactccagcctgggggacagagtgagaccttgtgtcaaaaaaaaaaaaagaacataaatgtatttctcatagttctggaggctgagaagtccaaggctagaaagtccaagatcagggtgccagcatttggtgtctggtgagggtctggtctctacttccaatatggtgctttgaattcagtgttttcatatgacagaaggtggaaaggcaaaaaaggataaactctgtttttttatatggccattaatgtattagtgaggatggtagagcccttgagacctaaacacctcccaaaaggctccacttccaaacactgttggcattggggaatatgtttccaacacatgaattttgggggacacattcagaccataacaatcagcatatggatagtkattttatttgtttgtttgtttgtttgtttgttgtagagatgttgtcttgccatgttgtccaggctggccttgaagtcctgggctcagcctcccaaagtgttgggattataggcatgacccaccattcctggctgctagcaattttaattgtagtaaatttagtcataaaggatgcagtcacccaataagttatatagaattccagggtggaattctaaggaagtggattgaggaaaagtttagtgcccctcatgctgtgtactcccccgtgatagtatttgtcactgtgtagaggaattgcccatttacttggtcatatttcttgtagagaggaggctctttagggaaaggggccgtgccttgtctacctctgtatccccagcaccaaaaacaatgcctagctcatggtaggttctcaataaatatttgttgattaaatgtataatgatagagagtgaggggccggagaggtaggtgaaccagaaagtactgggttgcagaagctaaagaagggagggattgggcaagtgttggcggcaactggggcagaagctagattgtggtagattgcagtacatggatggctaactgaagaggagacatcaggttgaaccctttttttggagacagggcctcactctgtcactcaggctggagtgcagtggcatgatcctggctcactaccacctctgcctcccaggctcaagcagtcctcccacctcagccttccaagtagctggaaccacaggtgtgcaccctttttgtattttttgtttagaagacaaacggttgtcttttgtttagagacaggatttcgccatgttgcccaggctggtctcaaactcctgagctcaagtcatctacccgcctcagcctcccaaagtgctgggtttacaggcgtgagccatcatgcccagctggttgaacccttttaaagggaagcttgtgtgaggtagggagagaggattgttgataagggagatggagatgtagtggctaaaagttgagcatattgaaataattcttatggaaaatagccagaagagagggagaggctgaagatacaggaaagggactagtagtgatggagcttcctgaggagaccaggggagatggaaaccggagcccagctagagacactaaccttcaacaaattcctttgtgatgcgagggtaaatgtcaaggaaaagttcaaatggaggtaagtttgaagaggagaagataaggagaaagttgagggagttctcaagatcaggaaagagaatattccttttcctgagggtggggtagggcagttggtggagcaggaatcttgaagagaggagatttaaatagcttttgcaaaagtggggggctagggaaagaaatttggaaggattgctggcagtgataagaatcattttgaggctggaacctgtgatttttgtagtcatatcattttgcacagttttatgataacattttatgataacattgtcagtttaaaagaagaaaaaaatgggctgggcatggtggttcacgcctgtaatcccagtagtttgggaggccaaggcggaaggatcacttgagaccaggcgttcaagaccagcctgggcaacaaaatgagacctcccccagctctacaaaacaacacaaaaaaataagctgggtgtggtggcacttgcctgtaatcgcagctacttgggaggttgaggtgggagactgaggcaggtggatggtttgagcccaggtggagcctgcagtgacccataatggcaccactgcactcagcttgagtgacaaagcaagaccctgcctcaaaaaaagaaaaagaaaaagtacaaagacctcagtctttagataagggaatagacttctttttttgcgggggggacggagtcttgctctgtcgcccaggctggagtgcagtggcgccatctcggctcactgcaagctctgcctccagggttcatgccattctcctgcctcagcctcccgaggagctgggactggaggcgcatgacactacgcctggctaattttttttttttttttttttttttttttttgagatggagtcttgctctttcacccaggctggagcgcagtggcgcgatctcggctcactgcaacctccacctcccaggttcacgccattctcctgcctcagcctcccgagtaactggtactacaggcgcctaccaccacacctggccaattttttgtatttttagtagagacggggtttcaccgtgttagccaggatggtctccatctcctgaccttgtgattcgcccgcctcggcctcccaaagtggtgggattacaggcgtgagccagcgcgcccggccttttttttttttttttgagaccaagttttgctcttgttgcccaggctggagcgcagtggcgcaatctcaactcactgcaacctccgcctcccaggtttaagcgattctcctgcctcagccttcctgagtagctgggattacaggcatatgccaccacgcccggctaattttgtatttttagtagagacggggtttctccatgttggtcaggctggtcttgaactctcgacctcagatgatcgcctgcctcggcctcccaaagtgttgggattacaggcgtcaggcaccgcgcccggccattttttgtatttttagtagagacgggtttcaccgtgttagccaggatgttcttgatctccttacctcatgatccacccgcctcggcccaaagtgctgggattacaggcgtgagccactaggcccagccgggaatagacttcttacttgagaaactgagttttgcagtgaggtcattactttgggattcagatttggctctgccattgagaagctttgtaatatcaggcaagtcaccttacatttcagatttctctcctataaaatcaaaatgataggagttcctattatgagaacaatgatgggaaagctctttaagagtttaaagtatggctggcgccatggctcacgtctgtaatcccagcactttgagaggccgaggtgggcggatcacttgaggtcaggagttcaagacaagcctgggcaacatggtgaaaccctgactctactaaaaatacaaaacttagccaggcgtggtggcacatgtctgtaatcccagctactcaggaggctgaggcaggagaattgtttgaacctgggaggcagaggttgcagtgagcctgagatcgcaccactgcactccagcctgggtgacagagtgagactctgtctccaaaaataaaaattaaaattaagtagtacctaaataaaaaggaccatttcttttaaagtctctcagcaacctgattaagatatagagatatatctttattttaattacagtaaatttaatcataaaggatgcagtcacccaagaagttatatagaagaggatccagggtggaattctaaggaagtggacagtgtccctcatgctgtgtgctcccctgtcatagcatttgtcaatgtgtataggaatacacacagcacgggttggcaaactaattaaaaactgttaagaaaaggatggttggcctgcactgttggaggctcacatctgtaatcccagcactttagaaggctgatcaggagtttgaaaccagcctgggcaacaaagcaagatgccatctctacaaacaaacaaacaaaaacatcaaacaaaaaaaaacataaaaagaaaaggatgctgtctcagagccccaccctcactaccctcacctcagatactcccttaaccttctggataagatatcttagtcccccaggtctgagccttggctggatctaggcttgataggcaagggagttgctagggatcaaggctcatgcctttttttcactgggtgcctagagctctgcctcatcctaataaatctctaaggagagatctttgggtgtgtagttcacttgattttgcaacattgttcaaggaattttctatcaggtagacttatagagccctctagattaagtgcaaactgaagtaggtacctgagaagcccaatgtagggcctggcacggtggctcacacctgtaatcccagcactttgggaggccgaggtggacggatcacgaggtcaggagatcaagaccatcctggttaacacggtgaaaccccgtctttactaaaagtacaaaaaaaattagccgggcttgatggcaggcatctgtagtcccagctgcttgggaggctgaggcaggagaatggcgtgaaccctggaggcggagcttgcagtgagccgagatcgcaccactgcactccagcctgggcgacagagcgagactctgtctcaaaaaaaaagaaaaaaggaaaatccaatgtagcttttagcatattggatttggagtccgaagagtggactccagatcagtcattagctgtgtgatcttgagcaggcacttaacttctctgagtctcaattcaattcattgaatctttattgagcctctgtgatatacaaggcatattaatccttgccttcaaggggtacccagtcttgtggatatagtcatgtaaataattcagatataaaacaatcctagcactttgggaggctgaggtgggcatatcacttgaggtgaggagttccagaccagccaggccaacatagtgaaaccccacctctactaaatatgaaaattagctggatttggtggcacgcacctgtaatcccagcaatttaggaggctgaggcaggagaactgcttgaacctgggaggcagaggttgcactgagccgccgagatagtaccattgcactccagcctaggcgacagagtgagactccgtctcaagaaataaaaaaaaaaagaaaagaaaactaatgaagtgctgtatacaaattgcatgtagaggaaaagaccatttattttgatcaagaaagggtttggagcttgaggtgggctttgtagtatgagcatcatcaaagaaaggaggacatttcaggtcaaaggaatagtctgcacagaggatactgtggtgtgaaggtgaatgtcatgttcaggatactgatcataatctggtgtgtctggagcacaggttggcaaactttttctatatagggccagatagtaaatattttaggctttattttgccatatgcttgggtgtctgtggcaactaaactgctcagctctgccactgtagtgtgaaaacagccatagaggaactgtaaacggatgggcatggctgtgttccaataaaattttatttaccaaaacaggcaactagttgtatttgtcccaagggccatagtttgcctactccagtctagagcaaagagagagagagagtgagtgtgtgtgtgttgtgggaaagggtggtagcaggagatgaagctggaaaggcaggttaagaaagtccttggatgaagctggaaaggcagattaagaaagtccttggccgggcgcggtggctcatgcctgtaatcccagcactttgggaggccgaggcgggcagatcacaaggtcaggagatcaagaccatcctggctaacacaatgaaaccccgtctgtactaaaaatacaaaaaattagctgggcatggtggcaggcgcctgtagtcccagctactcgggaggctgaggcaggagaatggcgtgaaccctggaggcggagcttgcagtgagctgagatcgcgccactgcactccagcctgggcaacacagcgagactctgtctcaaaaaaataaataaataaagtaaaagaaagtccttgaatgctggccaggcgcggtggctcacacctgtaatcccggcactttgggaggccgaggtgagtggatcaactgaggttaggagtttgagaccagcctgaccaacaaggtgaaaccccttctctactaaaaatacaaaaattagccaggcatggtagcacatgcctgtgatgccagctacttgagaggctgaggcaggagaattgtttgaacccaggaggcgaaggttgcagtgagctgagattgcaccactgcactccagcttgggcaacagatcgagacttgtctcaaaaaaaagaaagtccttgaatgccagtcttctgaagttattattattaaatgttgagacccagcctggtcttgaactcctgggctcaagtgattttcctgcctcagcctccagagtaactgggattacaggctcatgccaccatgcctatctctattaaagttattctttactctttatcctgtaggggatggggagccataaggattttttgagcgaaggagtgatgttatcagaattgtggattaggaaaataactctggtgacagtgtggcaggtagtgtgaattgaaggtagagggaccaattagaaggctagtgttatagattaagcatgtgataagttttagttttcttatctgtaaggtgagaataataataccccctgtcctacccatgttactgtgaggatccagtaagaaaacgaagtgaatgtgctttgacaccataagtgttacaatatgtaggaggtgaattgtggcttctaataattctgagtagcgatggttatttttctgttgtgggagggaattccttggaggtatagtgaggtgaatcatttcactggctgttgttccccagtagctttggaatgaacccctcttgctatgtagtgcctgtgggttccagaagaaagtgagctagactgaaccttaaatgttcacctcaccagggtccctgcttttttttttttttttcttttggagttacccttcaaaaggtgggagagaatcttggaaactagaaatgagccagaaagaatttgactgggagttcgctgtaaaaattcctgggttctcctggtagtgtatgcctaactgtgttagtgaagctgtcactctctcttcttcaggggatgttggaaattactattatggacaaggccacccaatgaagcctcaccgaatccgcatgactcataatttgctgctcaactatggtctctaccgaaaaatggaaatctatgtgagttaccagaggtgctaccgctccctaacctcatctgctctggttccccatatgccattcattatctcattttctccaccactcattcactcattcatcaaatgcatgttgactgctgttacaaggcaggtactgtaaatgataaagatttttggctgggcatggtggctcacgcctgtaatcacagcacttcaggaggtgaaggcaagaggatcacttgagcctaggagttctaggccagcctgggcaacatagggagaccctgtctctacaacaaaatttaaaaattagctggccatggtggcatgtgcctgtggtcccagatacttgggaggctaaggtgggaagactgctagagcctgggaggtcgaggctgtagtgagctatgattgtgccactgcattccagcttggggggcagagcaagactctgtcttaaaaaaacaaagccaggtgcggtggctcatgcctgtcatcctagcactttgggaggctgagatgggcagattgcttgagcccaggagttcgagaccatccgggtcaacatggcaagacctcatctctacaaaaaattagccaggcatggtggcacatgcctgtagtcccggctacttaggagcctaagctaggaggatcattttgagtctgggaagcagaggttacagtgagccgtgattgcaccactgtgctccagcctgagcgacagagtgagaccctgtctcaaaaaaacaaaacaaaacaaaaaaaccaaaaatttaatgcctaaataagagtgattgggaccatgttgaagcagatgccaaatctctagttattagagagtatagacggtctaacctgtagattcagctacaggtgatttgtcactgatctttgagtttttaaagagaagctggaaatccagattattatgtaaaatctcctaggtttaaaatgttatcccaagaaaccttgtctgtacaaaaaatatgaaaaaaattagctggtatcctggcctgcacctgtagtcccagctatctggraggctgaggtgggaggaccacttgagcctgggaggtcaaggctgcggtgagctgtgattgcaccactgcactccagcctagatgacagaatgagattttgtctcaaaaaaaaagttaacccagagtttttgctttttggtttttattttaagcatgtatacaaaccaaacacattagtacatctgtagaccaaataggtccaatggttcccagttttaacctctctggagacagtgaggaggaacaagtgaagggttttaaatgaaagagagataggaacgggcatgcattttagaagcagggaggctaggtaagtggctgttacaagagtccaaatgagaaaataaagaggggctggaggtgatgttgccttactacataagaatctgtggttaaagtctgtttctacagcttgagtaaactaccaacagtggtatttttgtcaccattccagagactgaaaggagatgagtgttctttcctagatggccttgtcatgtctctggagccagtggaggcaactggggaagcaaggaaggaaagtagaggagaagacagaccttgggactacggagcttttttaggtgtgaaggcagctgggaatgaaaaacagaaaaggcagaagatatttttaggtactctagggagcagactatctctgctcccgagagctctgctccctgcaggctggagtgcagtggtgtgatcatagctcactacagccttgaactcctgggctcaagttatcttcccacatcaacctcccaagtagctaggactacaggcaggcaccaccatgcctggctttattttatttttttcttttttttgagacagggtctcactctgtcacccagactagagtgcagtggtgcaatcttggctcactgcaacctctgctttctgggctcaagtgattctccagcctcagcctgccaagtagctgggattaaaggtgtaagccaccacgcctggctaattttttggtagaaatggggtttcaccattttgcccaggctggtcttaaattcctgagctcaaagcaatccgcctgcctcggcctcccaaagtgctgggattacaggcatgagccaccatacccagcctctcttggctaattcagaaaaatttttttgtagaaacagggtcttgctgttttgtccaggctggtgtcaaacccctggcctcaagagatcttcttactttggtctcccaaagtgctgagattataagcatcagccaccatgcctgtattcttttttaaaaattataaaaatgatttttattttttacctgcagttccaagcacagtatgttttagttttacatgtttgattgttatatagatggagccatacagtatttattatgtgactgactttttttgctaaacatgttcttgagactcacccatgttgatacctgtagctgtatttatttttactgtatttcattgaaataaatgtattctagtctgttatctctttgatgagcatttgatttgcttctggggtttgactattgcaaatactgctgctatgaactttcttgaacatgtctcttgatgcatatatgctaaagtttcactaaaggatatactaggattagaattgggtcaggacatatgcacatattcacctgtgttagataaagccaaaatggtttccaattgccagctatgtaggagaattgcagttgctctgagtccttgccaacacttgattttgtcagatttcaattttgttgctaatttaggtagacatgaaatgttatcttactattattttaatttatattcccctactgaaattcctattcaacctttttgcccattttcccattggttgtcttttttttttttttttttccctgagacaatgtctcactctggcactcaggctgcagtgcactggtgcgatctcggctcactgcaacctctgcctcccaggctcaagccatctttctacctcagcctcctgagtagctgggaccacaggtgcatgtcaccacactcggctaatttttatatttttgtagagatggggttttgctgtgttaaccaggctggtctgaaactcctaggctcaagtgatctgtccaccttggcctccctaagtgctgagattacaggcgtgagccacagtgcctgacccatttcttttatatattaaatgtccatttttattcattcattgcatatatactcatcaagcacctactttgtgccaggcaatatgtgtgtgtctggttttgggctctctgttcggttgacttggtctgtttattgacccatatgccaataccacagtggcttaattacagtagctttatattatagtaagtcttgttatctggtagcacagtcctcccactttgttcttctgaaaaagtgatttggctatttgccctttcacttttttttctttttctttttctttttttttttttttgagacagagttttgctcttgttgcccaggctggagtgcaatggcgcgatcttggctcactgcaatctccgcctccctagtagctgggattacaggcatgcgccaccacggccagctaattttgtatttttggtagagatggggtttctccacgttggtcaggctggtctcgaactcccaacctcaggtgatccgcccgccttggcctcgcaaagtcctgggattacatgtgtgagccatggcgcccggcctctttttctctcttttagagacagggttttactctgttgcctgggctagagtgcagtggcacagtcatagctcattgcagcctcaagctcctggactcaagtaatcctccctcctcagcctcctgagtagcacttctttttaatttaattacgattttgatatacatttcactaattcaccaaggtctatgtagatctgattctgttgtttgttgttgtttctgtaggatcctggactgtgtttcctgtgtattttgtgatttttgactgtgggataatgcagtaggccactcttatctgaggggggatactttctagtatgcccagtagattcctgaaaccatggatagtactgtatcctatatatgttatattttttctaatacatacatacctctgataaagcttaatttataaattaggtacagtaagaaattaacaataataaactaggacaattatagcaataagccgtttacagtttcatgcatagaagattcattcctggccgggcgtggtggctcatgtctgtaatcccagcactttgggaggccaaagccggtggatcatctgaggtcaggagttcgagaccaccttgattaacatggtgaaaccccatctctactaaaaatacaaaattagccagacgtggtggtgcatacctgtagtcccagctactcaggaggctgagacaggagaatcatttgaacctgggaggcagaggttgcagtgagctgagatctcaccattgcactctagcgtgggcaacaagagtgaaactccttcccaaaaataaaaaaaaagaagattcattcctactgtagatcttagctcttagcgacttcagcacaggatttttttctttccttatattgagaacttcaaccttttcatgtaaaggaagcacagcacagcttctctttggcatatcaaaattgccagcatcactactcgtggactttggggccattattaagtaaaacaagggcttcttgaatacaaacagtgtgataccttgataatcgatctgattactgagagggctactaagtgactcacaggtgggtagtatacagtgtggatatgccagataaagggatgattcacacccaggggacagagctggatgttacaaaatttcataacaaatggttcacaatttgaaacttatgaattgcttgtttctggcatttttcatgtaatatttttggacagtgattgtgtgtaactggaactgtagaaaccaaaactgaggataagagggcactgctgtattctttggaactttgagtcctgggatgaagatggattgttagaaggtgatttgcttttactttgtaaaagaggtggcatttgagatgagccctttccttcagagatttgggataagggatgaatttcaaataataggaagaacatgagcacggacactgttgaaaagctctatacctctctagatcttaaggaagagttgtttggagtataatatttgtgaaagagagcaggggcaattaaattgggaaaggaaccttgtaaagtttcttgattgctatatcaaagagcttagagtctttacttcgggccgggcgcagtggctcacgcctgtaatcccagcactttgggaggccaaggtgggcggatcacctgaggtcgggagtttgagaccagcctgaccaacatggagaaaccccatctctactaaaaatacaaaattagctgggcatggtggcacatgcctgtaatcccagctactagggaggctgaggcagaagaatagcttgaacctgggaggcagaggttgcagtgagccgagatcgtgccattgcactccagcctgggcaacaagagtgaaactccgtctcaaaaaaaagaatatttacttcgtcaacagggtgtcattgaatgagagcagtactttaacgttttaagatttttgtgataccaatatggaagatggaagatgataaggctggatagaaataggaccaattaggaggccaaaaatactccaagtgagatttaatttgtgtatgggttttgttttgttttgtttttttaatttttatttatttattttctgggacggagtcttgatctgtcacccaggctggagtgcagtggcgcaatctcggcccactgcaagctccacctcttgggttcatgccattctcctgcctcagcctcccgagtagctgggactacaggcacctgccaccacgcctggctaattttttgtatttttagtagagacggggtttccccgtgttagtcaggatggtctcgatctcctgacctcgtgatctgcctgcctcagcctcccaaagtgctgggattacaggcgtgagccacggcgcctggcccgttttatttttttagatagggtgttgctctgtcatccaggctggagtgcagtgatgtgatcacatctcactgcagcctcaccctcctgggctcaagtgatcctcccacctcagcttcctgagtagctggaactacactgtgtgctactatacctggctaatttttgtattttttatagagatggggtttcaccttgttgcccaagctggtctcaaagtgctgggcccaagcagtctgccccccttagcctcccaaagcgttaggattataggcatgagccaccacgcccagccaagagttcatttgttaggtcaacagttattcattgagcaggtgctatatgtcaggcaccatgcttgttgcttcaaataaaggtagaacctgctcctggcctcccagagtagaccaagcaaacatgcaatttatatgcagtttggtgagtgtaatgataagggaagtacaggcttctcagggtagcatttcagagagttacttaactgagattctgagaggtcaaggacagctttttgggggaattggcttttcttctctttctctctctctctcttttttaagagacagccttggctgggtgccgtggctcacgcctgcaatcccagcactttgggaggccgaggcaggcggatcacctgagatcaggagttcaagacaaacctggccaacatggtgaaaccctctctctactaaaaatacaaaaattagctgggcatggtggtggatgcctgtaatcccgactactcaggaggctgaggcaggaaaatcgcttgaacctgggtggcggagattgcagtgagctgaggtcgtgccactgtactccagcctgggcaacagagcgagtctcaaaaaaaaaaaaaaaaaaaaaacaagccttgctctgttgcccaggatggaatgcagtggctattcctaggtgagattataatgcactatagcctcaaactcctgtctgtgctcaagtgattctcctgcctcagcctcccaagtagttgagactacaagtgtgtgcctgggttgacttttcatttgcaacctaaaggttgagtagagggtgtgaagagaacagtgttgtaggtcatagcatgtataaaggcctaaatgtgagagagatggcccttggggaagtgcaagcaaaatggtgcttggcagattggcacagtgaatgagatcaattcagtctctcaaacatgttttatttaactcaaagtattttaagggcattaggttagtggccaacctttaaaaaatgaaattgtccagaaaggatctggcagttgggcccaaattccctcatggcagccatcagctagagctatgtaaataaagattgtcctctgctcaccagtgttttgtttatgtttgttttaagctagctaaactgactggcgcttatgagtgatttgagtttggtgttccctggcatacagcacaaaatatttaggtgagtgtaagggggtgagcagggatcagattattctggttttccaagccaggttaaagagtttgaacttgatattttgagtaatgatgcctttgaagtgtttttagaggggagtgacatgattcagtttgcattttaagactgataactctataacaggcacagtgacacacgcttgtaatcccagctactagcaaggctaaggcaagaagatcacttgagcccaggagttcgagaccagcctgggcaacacagggagattctgtctctaaataaaaaagaaaaagacaggccgggcgcagtggctcacgcttgtagtcccagcactttgggaggctgaggcggatggatcacctgaggtcagcagtttgagaccagcctggccaacatggtgaaaccccatctctactaaaaatacaaaaattagccgggagtggtggtgggagcctgtaatcccagctactcgggaggctggggcaagagaattgcttgaatctgggaggcggaggttgcagtgagccaagattgtgccattgcactgcagctgggtgacaagagtgaaagtcggtgaaaaaaagaaaaaaaaaatagagagacagaaagaaacagggagagggagggagagagagaaagacaaagaaggaaggaagaaaggaaggaaagaagagagaaaagaaaaaaaaagaaagagagacagaaaactctgcctgtagtattcagcataaattaacaatggttaagaaggaggctagtataccagttaggagattgttgccagaatccaagtcaaaaaaagtggtagcccaggatggaagtggacagatttgacagataatacattggtggtagtttcaagagaagttgaatgtagcggatgaaaaaagaagaatcaaagatgattcttgcctggtgtggtgtggtggctcatgcctgtaaccctggcgctttgggaagccaaggccagcagatcacctgaggtcaggagtttgagactagcctggccaacatggtgaaaccctatctctactaaaaatacaaaaattagccgggcgtggtcgcgggtgcctgtaatcccagctactcaggagtctgagacgggagaatcgctgaacttgggcagcagaagttgcaatgagccgagatcgtgccattacactccagcctgggtgacagagtgagactctgtctcgaaaaaaaaacaaagatgataccctggcttcgatcttgaacaactaggtggttggtgctgagaataggaaacccgggaaagaaggacataggaaaaatagggtagtagatgcaatcaatattatggaggcataatgagagagattggcaatggattgaaacaggaaggcaaaaaaggacagagtttaaaatgacacttaggttttcagcctgagtggatgttggtatcattaacaaaaataatgaaagagaacttttggaagttaagtggaatttgagtgcttctaggctctcaacaacaaattgttgagtccagttgaatttgaagtgcctttagggtttgtgggtggagcagactgagaagctatttgaactgtgaatctggagctcagaactaagatcaaaatggagtttgtgcagtcatctgtgtagaagggatagccagaccaaagttttgatgacattaggaagagagtaaagggcttagtatagtaaaaaaacaacttggtatttggagctaagtcttttttctttcactgtgggtgttttggtttgcctttttagaaacagggtctcactgtgtttgcccaggctggccttgaactcctgggctcaagtgatccttacatcttagattcctgagcagctgggactacggtgcatgccactgcatctggcttcactatggctgtttttgataaaacagtatctgtcgttcagtcttattatgcctcattaaattaagtgaggattaaatgagagagtcaaagtacccagagccagatctctggattccttccagtttaccagctgtgtaaccccaggcaaattacttaacctctctcttctatagtttcctccctgtgaaataaggataataatagtatgaattttttatttttattttttctttgtgatgtagtttcactctgttgcccaggctggagtgcagtggcatgacctaagctcactgcaacctctgcctcctggatttaagcgatgctttgcctcagcctcccgagtagctgggtttacaggcgcccgccaccacactcagctaattttttatatttttagtagagatggggttttaccatgttagccagactggtctcgaactcctgacttcaagtgatctgccccgctcagcctctcaaagtgctgggattacaggcgtgagccactgtgcctggctatgaacttttttttgtttgtttgcttgttttttgagacagagtctcgctctgtcgcccaggctggagtgcagtggcacaatctgggctcactgcaacctctgcctcctaagttcaagtgattctcatgctgcagcctcctgagtagctgggattacaggagcctgccaccacgcccagctaatttttgtattttttgcagagatgggatttcgccatgttggccagactggtttgaaactcctggcctcaagcaatcctcccacctcggcctcccaaaatgctgggattataggcgtgagccaccgcacctggccatgaactttaaaaggtgtttttttgttttgttttgtttttcagagatggggtcttaggaatctgaacacattctggcctggagagattgcccaataacttattttattttatttatttatttatttatttatttattwgagatggagtctcgctttgttgcccaggctggaacgcagtggcatgatctcagctcaatgcagcctctgcctccgagttcaagcaattctcctgcctcagcctcctgagtagctgggattccaggcacctgccatgacgcccggctaatttttgtatttttattggagatggggtttcgctgtgttggccagggtggtcttgaactcctggcctcaggtgagccacccacctcggcctcccaaagtgctgggattacaggtgtgagccactgcgcctggccccgataattattttaaaaaagagaaaaagacagggtctcactatgttgtccaggctagccttgaagtcctaggctcaagcgatcctccagggcttagatctttaaaaggttgttgtaagaatcatatgagatagcgtttaaagtgcctgaaagagtgactgtcacagaggaaacaataaatgttggctgtgtattgaaaatgctttataaactgcagaaaatatggcaggttctcaaataacatcacttcgctcagcatcatttagttataacgttgaggagaaaaataactgattcctggcatggccactatctgtatggtgtttgcatattctccccatgtctgtgtaggttttctccgggtactccatttttctcccacatcccaaagatgtgcatgtgaggtgagttggcatgtttccatggtcctagtctgagcaagtgtggatatgggtgtgagtgcaccctgtgatggaatggcgtcctgtccaaggttggttccttgtgttgagctgcgggacaggctctggccacccttggaaatgaatgattgaattcaaattattgtcaagtaaaaattcataaagtagacaataatcatacagatgcacaacaataaaagatgtgatacagaaacactcagcgagcctgccatatttgttattgttcgtttttgaactgcatgatggtagaaggttctccttgcaattttaactttgcatacatttattatttgatttaacccaccaccacaacaaccgccatcactcactgattcaccaaaaattgggtaaataataatgtatatattttttgagacggggtcttgctctgttgcccagactgtagtgcagtggcaagatcacagctcactgcagcctggacttccctgggctcaggtgatcctcccaccttagcctcttgagtagttaggactataggcaagtgccaccacagccagctaattttttatatttttgtagagacagggtttcaccacgttgcccaggctggtctcaaactcctgggttcaagtgatccacctgcctcagcctcccgaagtactgggattttaggcatgagccactgcacccagcccaataatgatcttccttatttttataaatatttcttaaatatagagatatttcgccgggcaaggtggctcatgcctgtaatcccagcactttgggaggccgaggcgggtggatcacgaggtcaggagatcgagaccatcctggctaacatggtgaaaccccatctctactaaatgtacaaaaaattagccaggtgtgatggcrggcgcctgtagtcccagctacttgggaggctgaggcaggagaatggtgtgaacctgggagacagagcttgcagtgagccgagatcgcgccactgcactccagcctgggcgacagagcgagactccgtctcaaaaaaaaaaaaaaaaaagggatatttcacatttatttcagtatttgatgtttgaagtgttttgggtctttatttagaattttagtgatgtttttgtgacagaaatatgctgtaggagcttaagttcttgtttatatcaattagcctatggtaaaattggtttctttatacattgttttgcctatagtcacaatttccaagaacctgtggatgacattaagtgaggacttttgttgtattggtaattagagaggcagagggtcatgtttgaagaagacctacctttaagggatgggaggaaaaggaaataattttaaaaagggaaggaggagtcagaatgttgggataaccaggaaattagcttgtcaaggaagtgttagtggggaggatgtgatcaaaattgttgatgtgatgacttataaaggatttcccatctgtttcagttttcattagatacccttttttcgtgaactcttggagccattttgtccataattttataatacgtatatatacatatatattttttttaatttatttttttgagaggaagtttcactcttgttgcccaggatggagtgcagtggcacaatctcagctcactgcaacctccacctcccaggttcaagcgattctcctgtctcagcctcctgagtagttgggattacaggtgcatgccaccacgtccagctaatttttgtatttttagtagagaccagatttcatcatattggtcaggatggtctcgaacttctaacctcaggtgatccacccgcctcagcctcccaaagtgctgggattacaggcgtgagccactgcactcggccagttttatataataataagtaataattttgtaggccgggcgcagtggctcatgcctgtaatccagcactttgggaggccgaggagggcggatcacctgaggtcaggagttcgagaccatcctgaccaacatggtaaaaccccatctctactaaaaatacaaaaattagccagcgtcgtggtgggcgcctgtaatcccaactactcgggaggctgaggcaggagaatcgcttgaacccaggaggcgaaggttgcagtgagtcgagatcatgccattgcactccagcctgggtgacagagtgagactccgcctcaaaacaaacaaacaaacaaaaaaaaacgaaaaaaaaggtcgggcttggtggctcatgcctgtaatctcagcactttggaaggccgaggcgggcggatcacgaggtcaggagatcaagaccatcctagctaacacggtgaaaccctgtctctactaaaaatacaaaaaaaattagccgggcgtggtggtgggcgtctgtagtcccagctacttggaaggctgaggcaggagaatggcgtgaagccgggaggcggagcttgcagtgagccgagattgcgccactgcactctagcctgggagacagagcgagactccgtctcaaaaaaaaaaagtaataattttgtaaagcaccttacagtttacaaagagatttaacaacctcttccaattctctcaacttccctgtgtggtctatgttgtccctgtttagtaaatgaggaaatggaggttcaagagacagtaacttgcctaagcaacagagcttgagctgctgtaggtcttctgatactctgtctcctttgataatcttgtttgcctagttagattgtaaatttcttgaagcctgaatctaaccagttatttctttttattctttatagcacctagctccatgctgcgcaggaaatataaatattcaaactagattgactggactggccgtggtcaaaaataacttgcccyttctcccttctgccctctagcgccctcacaaagccaatgctgaggagatgaccaagtaccacagcgatgactacattaaattcttgcgctccatccgtccagataacatgtcggagtacagcaagcagatgcagagatgtaagtccattctgttccctcacactctgaagccgccagttgcatctccctttccactgtagaggcccattctgccgtcctcgcacctcccattcagtggacacctgatttcccctacctcctaaaggtgccagagtgctttttcccctcaagtcggatttttcatgtttcctgatttgtaaacgatagaggtagtactttttctggttatgttcacaacactgtcccaagagtactgtaattattgtagtggaaaaagcactgacctgggacggggagacaatagatacagtaaaatttaactctaactctcagctgagtgggcaagtcacttcccctcagattcttcttttgtaaagtgggctgggccacatgatctctgatttctgtccaactgtaactgttttgacttagtgggtattaattgagaatttagaggccactcaggacagattctagatggtgtaatctttgagatgaggtgatgctgcccctgatcccttggacttgaacttcagagcaggtcccatcttggaagccacgcttagtttgtaggaatcgtgggaattattttagctgtgagggggaaaaaaaaagtattcaaatttgggacaaaactatcatacctgacttcccccttgtgttattttagaaattatctcttagcacctaagacttcatatagtataacagcactgtccagaagaagttttgattaacttatgacagcttatatggaagtgtcagaaaatatgcggcacttgtttgttgctgctgaccacaaggtagtcttactcccaaggaagaaagttatttataactattattacaactaataataactgtacagtggtattgatggcagaaccacagagaccttccttgaagcattaagcttctttgctaccgacaactccaggagctgccagctgctgtgagtgaggtgtttgctctctgaattgcagggtcttatttccctccaagatgaggcaaattcatgcctttcctgtagatggctttagaggtttccataacccatttaggccaaggatcaggctctactctcagcacagtgggctctcactagaggagcaacttgctattaaagtaagaaaataagctttcatgtcttagtttgaatccttggtttcctagcccctctggtgttatttcccgcccctgccacttttttttgagacagagtttcgctcttgttgcccaggctggagtgcaatggggcgatctctactcaccacaacctccgtctcccggcttcaagcgattatcctgcctcagcctccygagtagctgggattacagggatgtgccaccacgcccggctaattttgtatttttaggtttctccatgttagtcaggctggtctcaaactcccgacctcaggtgatatgccagcctcggcttccccaagtgctgggattataggcctgagccactgtgcccgacctgttttccctctttaagaggaagacaggacaggcacagcggttcatgcctgtaatcctagcactttgggagcccaaggtgggaggattgcttgagcccagccaggagtttgagaccagcctgggcaacatagtgagaccctcatctctacaaaaaaataaaaaaattagctgggcatggcggtgcacacctgtggtcccagctactcaggaggttgaggagggaggatcttttgagcctggaaggtcgaggctgcagtgagccatgattgtactactgcactccagcctgggcaacagagcgagaccaaaaaaaaaaagacattagtgcctatttcatagtcaaggatgggggaataagtgaagataatatatttaaatatatataatatgtctaccctcaatgaattgcttttgctatttttgctattgcataatcacttttgctattatgacttactatttttattatttacaaacttatcaaggcagacaaaatgctatgccctgaggagtgtgcaggttctgctctggtgcgccaatttttccgaatccagcattctaaagttgtacattaaaaaattcagtctggctgggtgtggtggcttacgcctgtaatcccagcastttgggaggctgaggcaagcagatcacctggggtcgggagttyragaccagcctggccaacatrgtgaaaccccatctctactaaaaatacaaaaattagcttggtttggtggtacatgcctgtaattccagctactcaggaggctgaggcaggagaattgcttgaacccaggaggcagaggttgcagtgagccaagatcgcgccactgcactccagcctgggcgacagagcgagactccgtctcaaaaaaaaaaaattcagtctgggtgcctatagtctcagctacttaggaggctgaagcaggaagatttcttgagcccaggagttcaaggccagtctgggtaatatagtgagacctggtctctaaaaaaaatttttctaattaaaataattaggtcttggatttttctgtcatcagaaatgggggcaggaagaataagcctctctaagaacttcagagtacctcactgagttgatttgtagggttatggagggtcagagtagacagagactttagatgtcacttaacacagtgctttataacctggggtatctaccaagacagtaatgagccctttttaaaaaaagaattatttttatttttattcttgtttttagagatggggtcttgctttgtcatccagggtacagtacagtggcaagatcatagctcactgcagcctcaaattccttaatccttaacttgcccttttagaatatgtaccaatatctaacctaggcgctggacatggtagcatgcacctgtaatgccagtgctttgaagggcaaggcaggagggatagcttgaggccaggagttcaagaccagcctgggcagcatagtgagacccccatctcttattttatcttaaaaaaataaaaataaaaaattagttgtgtatggtggcacatgcctgtgattctggctactcaggagcctgaggcaggaggatcccttgagcccagttcagggctgcattgaggtatggtctcatttcgccaccacactccagcctgggcaacatagcaagaactcgtctcaataaaaaaaaaacacacatggccaggcgtggtggctcatgcctgtaatcccagcactttgggaggccgaggtgggcggatcacgaggtcagtacatcgagacaccatcctggctaacacggtgaaaccccgtctccactaaaaatttacaaaaaattagccggacgtggtggcaggcgcttgtggtcccagctactcgggaggctgaggcaccagaatggtgtgaacccgacaggcggagcttgcagtgagccgagatcacgccactgtactccagcttgggcgacagagcgagactccttctcaaaaagaaaaaaaaaaaaacccacacacacacaaaaacatcccacacacctaatctaggaagttatgcttatgataagatcgagtaaatcaggtttccttgcttgtggctgaaatgtaataaaccctttctggtcactttgagagccttgaccagaagttctgacctaatatttagcaagtgaaaatgggaacacaaataaatgcatttagggggcttttggtgaaaacatgayaaaagggattggtaaaaaattgggagacattctcatccattttacagacatgtaaactttcccagtcacacagcaaggtgatggtagaatgcagaatggaactctagtcccccaattctgtagttttaaaaaatatagtgtatataaaatattttagatacacaggccaggcagggtagctcatgcctgtaatcccagcactttgggaggctgaggcaggtggatcacttgaggccaggagtttgagaccagcctggccagcgtggtgaaaccctgtctccaccaaaagtacaaaaattagccatgtgtggtggtatatgcctgtaatcccagctactcgggaggctgaggcatgagaattgtttgaacctggagggcagaggttgcagtgagccaagatcgcgccactgcactccagcctgggcgacagagcaagactccatctcaaaaaaaaaaaaaaaaaaaaaaaacagaaaaagaaaaaaacatattttagacacacacaaaaagcatcaaaaaataatataatgcactttgggaggccgaggcgggcagatcacgaggtcaggagatcaagaccatcctggctaacacagtgaaaccccatctctactaaaaatacaaaaaattagccgggtgtggtggtgggtgcctgtagtcccagctacttgggaggctgaggcaggagaatggtgtgaacccaggaggcggagcttgcagtgagctgacattgcgccactgcactccaggctgggcaacagagcaagactctgtctcaaaaaaaaaaaaataataataataatataatgaacatccatgtgtgcccaatacccagcctgagaaagaaaacattatcaatacagttgatgcccccttgggcatctttccttgatcacataccctttctctcccactcccccagccccccaccccattaccagcactgccaaggtataagcactatcctgaggttagtgtttaatcttcccatctctttgcaatgagcatttgactgccttctctgcctacgtctgcttccacctctcacccagtattgcttccctttagtctaaagctagtgtgagaatgagaaaagcgtttatagcagaaagagagaaaacccatggaaaagtcttccctaccctcacagattagctcacatgagtatctgctcttccatttgccccctttccatctctaatcacatagcttattgactaggaataaaagggctggtcatttgagctacatgttggtttggtgcctgaagaaaaatatttttttttttctcacgtccaaaacacccattccttcccatggaggctccatatcccaaataagagtataaacaaagctttggaaacgcaggcaggccaaactctgtgcaggaggaagtggccagagagggaaatcagttgccaatggataaacagccggggcccagggaccaaagttcttatttacacagcctcccagtgtttacccaggaagtgaggaagagacccacccgctgcacactccctcatgcagccatgcttcttcctcagagcaccggatcttggcaccctccaagtttagtgcagaaccagagctggtaactcttgtggttattgtagatcttgagcttcaactgtgtcttgagattttaccagcacaatccaaactgagctcttctgctctcaccccagggctgctccttcctctacttttggaaatcttgataacagtgggtacagtagaaggctgggcaagagaataagtatgcagccccacacctcctgcctctgacttcctgtagctcattgatgtctcagcagttactttttttttttttttctcctgagatggagtctcgccctgtcacccaggctggaatgcaggggtgcaatcttggctcactgcaacctccacgttttgggttcaagtgattctcctgcctcagcctcctgagtagctgggattacaggcacatgcctggctaatttttgtatttttagtagagacggggtttctccatgttggccaggctagtcttgaactcgtgacctcaagtgatccacctgccttggcctcccaaagtgctgggattacaggtgtgagccaccgcgcccggccagtagttaccttttctgtaagaggagatttggagctataaagttcctctaggtctgtgagtctacagcctccaggtgtgctttccttcctgttttcatttcatttgccttattgtttgcatatgtttccacattatgtactacttggtacttttaccccattaggcccgaaataactttactccacttgtcactgtgaatgtagcagtaagacactgggctacgggagtcaagacaccgggaccctgattctggttctgctactgcctggttttataaccttgggcaaatcacttaacttctcggtatctgtttgttcctccgcacagtggggttgatatctggcttgtccagctcatagagttgttgtgaggatcaaatgaggttgtatatgtgaaaggacttggaaaagggccgggatatattttcacaggcttttaagacagacaggctggctgggcacggtggcttatgcctgtaatcccagcactttgggaggccgaggcgggcggatcacagggtcaggagtttgagaccagcctggccaacatggtgaaaccccgtctctactaagaatgcggaaatcagccaggtgtggtggcaggtacctgtaatcccagctactcgggaggctgaggcaggagaatggcttgaaactggagggcagagattacagtgagccaagatcacttcactatactccagcctgggcaacaagagcaaaactccgtctcaaaaaaaaaacagacaaaccaaagcttgaggcttgcatactgcttctgccatttactaacagctcacctctctgaacctgtttccctacttatttatttatttatttttttgagacagggtctcactcttgtctcgcccaggctggagtgcagttgcgcgatctcagctcactgcaacctctgcctcccgggttcaagtggttcttgtgcctcagcctcccaagtagccgggattacaggcagctgccaccacacctggctaatttttatgtttttggtagagatggggtttctccatgttgcccaggctggtcttgaactcctggcctcaagtggtcctcctgccttagcctcccgaagtgctgggattacaggtgtgagccactgtgccaggccttgtttccctacttataagatgggaccaaatcttacctcagaagcttgtgtgaagatgaatgatctcgggtatttaacgcatgtagcgcagtgtctggcgtgttgtacgtgcgcagtgaacgatagttctctgggtctctgttcttgccccttgtttgtcagctggcgtgagggccagaggataagtttttctccctcaagaaacgaaccaacattttccaagttgctaactgcttctccatattagatttttgttaattttctgaccagtgggtgaggtgggatatcagttttgcttgttatagataatgggctaagaccaggtgtgatggcacatgcctattgggaggccaaggcaagaagactgcatgaggcctagggaacatagtgaggctctgtctctaaaaaaaaaaaaaagaaaaaaaaattagctgggtatagtggcatgcacctgtagtccaaagtacttgggagactgaggtggaaggattgcttgagcccaggaggtgagggtcaaagctgctgcacatgagccatgtttgtgccactgcactccagcatgggcaacagagcaagcccctggctctaaaaaataaaaaaataataatgggctaaagctcaaagatgttaaacaacttgatgcagtcatacagccaggaagtagagcctggactagaacccacacctcctgaatttaaattctgtgtttttttccatcagctcataaatatgtaaactaaaggaaattgtggaaactaaccttttgcttatttctttcaagtcaacgttggtgaggactgtccagtattcgatggcctgtttgagttctgtcagttgtctactggtggttctgtgggtaaggaatattcatcttctccccaggggtagactgggttgttctagtgaggtctgccttttaggctgctatcctagttggctgatctgaaaccatgtagaatggtcctgtggtttttactgaagtctctaaaatggctggtgtagtgtctcacacctgtaatcccagcactttgagaggctgaggaggaggattgcttgaggtcaggagttcaagaccagcccaggcaacatagaccctcctgtctataaaaaaataaaataagtaaaaacaattagccgggcatggtgactcgtgcctgtagtcccagctactcaggaggctgaggcttaaacccagtaggttgaggctgcagtgagtcgtggtcacaccactacactctagcctgggcaacaaagcaagaccctgcctccaaaaaaaaaatttaaaaagcctctaaaatgtccctctggttcagtcccagcccaggttcaatctctgacatggtactgacaggtgtccttgactgtcctttcctactaagagatcttatgtacaggcgttccccgcagacctcctggggttgttaagatgctgtacgtaaaagcaatttgtgaactgcaaagtgctataaaaatggaagtgtcatcatctgtgaatctgtcctatgaaaaagtatggtaattacctttagaggtcagaaatactcctcatgtatctcccacttccatttgcaacttttgggttatctccaggattactctaaacgctttcttaacaaatatttattttcctgtgatcccccaccaatataatcattgtgtccatccccgctgccccaccaatataatcacagaaaacaaagaagtgcacagaaaaaaacacaatcacccacagtcacagggttggtggataacctctgttaccatgttggtgtttgtatggccattcttttgtgtgtgtgtttatatctgtgtcacacatatacaacatctatattttacaaaagtgggttatatacatatcacatatatatggttttatgcctgcatttcctacttaacgaaattgtctgtagttttctacagcttgctttcttgtggctctatgattattccatgttgtggatttacttgagttgatataatctgtccctcttcttgataatttggatcaatctatgcttttattgctgttaaaatcaacactgcagctggacacggtggcacatgcctgtaatctcagcactttgggaggctgaagagggtggatcacctgaggtcaggagtttgagaccagcctgaccaacatggtgaaaccccatctatactaaaaaatacaaaaattagccgggcgtggtggtgtgtgcctgtaatcccagctacttgggaggctgaggcaggagaattgcttgaacctgggaggcggaggttgcagtgagccgagatcgcgccactgcacttcagcctgggtgacagagtgagactccatctcaaaaaacaacaacaaattaacactgccacaaatgcacttgcacacatgggtgtgtatttatcttttacttcttctgggacctattcgtgctagtgctttttgacctagtgtatcagcactatctttggtaatttttctttttctttttttttgaaatagagtctccctccatcacccaggctggagtgcagtggcgtgatcttggctcactgcaacctccgcctcctgggttcaagcgattctcctgcctcagcctccccaggtagctgggactacaagtgtatgtcaccacgcccagctaaattttttcgtatttttaatagagatgaggtttaaccatgttggccaggctggtatcgaactcttgacctcaggtgatgtgcccgccttggcctcccaaacttctgggattacaggtgtgagccaccgcgcatggcctatctttggtattttttcaaagttccttgaccatgagccatagtaagaaataaatttacacatgcaatccaggatacatataacatatgcatgcatgcacacactcactcactctgaagccagagttttacaaaagagcagttacccttactgttactctgatatttttttctatgctatttcattaaaaaaatatatatatatatacacacacacactaatcatgatgtactaaatcaattttaaggcctgctaatgggttactaccctcagtttggaaaatcgttttttacgagtagacagtatcatgtattccctgctgaagtagggtgggagggaggggactggtctatgaattgcacaatacagctgttgaataggcaggtcttaacctttcactaggttccctgggcttcttggaggaaggggagagtggcttagtaacaggcttatgttctcttttctcatgcccagcaagtgctgtgaaacttaataagcagcagacggacatcgctgtgaattgggctgggggcctgcaccatgcaaagaagtccgaggcatctggcttctgttacgtcaatgatatcgtcttggccatcctggaactgctaaagtatgcctgcctggccttgtctcttggaagagcaccttaggccaggttcccatttccctcttcccctgggcttgcctccctagtttgcttttcctaccgatgtgctggctaggatgtgctcggtgagtgtctctggccatcatctccttgatggggtcttggtttgatctgagccacggcatgatcaggggcagatgctgctcagatcctgcctccagagtgtccctgtgtggctggagttgaccctggctgtagagtaggaagatcggacttggtcggcttggtcaggcctctggagacacccggccgctcttccaccttccttcagccagtttccacgtctctggtgcttagagatacctgagggaggcagccagcccggtaagctgggagctagcgcccttggcacgtcccatccccaaagagcccccagacccctgacccccttctgatcctaggtatcaccagagggtgctgtacattgacattgatattcaccatggtgacggcgtggaagaggccttctacaccacggaccgggtcatgactgtgtcctttcataagtatggagagtacttcccaggaactggggacctacgggtgagaacgccctttaggagccaaccggcttaccctcagctggcagctctacttctctctcctatctcatgccactaaaaattgcttcttgcctcttctgccaatcagaataccacatcccaatctgaagcacttgccctgatctctttcccttccttattctggaggaagggaatgatgggacataaagggccagagaaagaagaggggtctcctgactcactgtactttcctcctggccacagctgggttgcatcacactattcttatgtctcataagccttgagtttgggggtaggaattgggactctgaaggacatctcaagtgttcttcatgtttttgggtcactttcccctttagccttttgactgaaaactatggactgtctctccagaaaagtacatgagattttacatctgatatagaatagttaatagacaagtccccttactgaagcccatccatgaaccttaggataagaatccttggaagctacttcgttgaactgttccatctgcttctattagcatgaatgtggtgaaatcagctgctttgccatgcctggtagcccttgggtaaaaaagtggcactaattcagttgtttgccatggcaagcgttagaataaatgagcattcactttttttttttttttgagacagtctctctctgtcacccagcctggagtgcagtggcgtgatctcggttcactgcagcctccgcctcccgcctccaggcgatcttgtgcctcagcctccgaatagccgggatttagctgggattataagtgcgtgcaactatgcccggctaatttttgtatttttaaaagagatggggttttgccatgttggccaggctggtctcgaactcctgacctcaagattcacccgcctcagcctcccaaagtgctggacttaaataggcgcactcactattttgaggttactgggaaggactttcttacctctctccttccctccacaacaccctagagagggagcatgggggaagaggagtgagcattagagctctctggagtggaaagggttgtcaagggtggctgtcacttctgtgactcacctgccagccagctctaacccaatcccaaggtagaaatcttgtgctatagggtaggctattcaatctctggtcccatcaagagctctcagtctgggggtaggcttaatgctatgtccagagatgatttgccagtgaagctagatttgccagtgaagagaatggtactaacaaggtacctctgttctgtcctggcccacatcatgggcctagcttgtctctcttgaacctcttcctttatccctccagcccctatccttgaccttccttcaagcttcatccttcagttttactttaatggcctttttaattaggatatcggggctggcaaaggcaagtattatgctgttaactacccgctccgagacgggattgatgacgagtcctatgaggccattttcaagccggtaagtggctttatccaccccttgggctacaaacaggggattggttggcggtggaggggagcaaagcacccccaccatacctcaggaatctctccttactaaagctggtggggagatagaagtgtttgaaccctggattgctgtgtggtcagttaggggaacaaacacccatatttattggttccttctatgggtcaggtcttctgctggatacaaaaatatctaagacatgatctttgccctcacggactatggtggggaaggcaggcacatacccagtagtctatgattagtactgtttttgtatctccatttctttgggctgctgggagattattgtgttcttttggtagtggtatgtctccttggttttttgtgttcctcattgccttacattgatgtctgcacattagaagaagtagggacttactccagtctttgcagactggctttgtctgggaaagccctttgccagtcagcccatccagagattctggaaaggctgtgtggcatgttccatgggtaggctggcctagtgcctgtgtttttgagggatgatcagaggaatgagagacaaactactgcctgggctggcaggagggtagccagggatgatttcacagaggtgctgatgtttaagctggactttggaaaatgaggaggtgcccatgtgaagaaggaggtgatggcagtaagggtggcatttagtagaaggaatggcactagcagaagtgcagaggtgccagtgtggcagcatgtaggccagtgtggtgtatgggaggagtgctgaaggaggcggtgggaagtgtatgctgggctcagtatttcaaagggagccttgaatgccatgccaaggagttaaatcttcacttataaacagtaagaaactgcttaacctaataaggtcaggtagtcattcagcaaacactgactgcccactatgtgcctagtatttaataagggctacagaagtgggagttgtggtctcggtctcagtaacgttagactctgcttgtgagaataagataaactaaaagtgcttgctcataatgtaaggcttcaagtctgtaagaccgaatgagtagagtagatgcagctaaaggtcaggaaggcttcctggaggaagtggcactagagcttgggcaacagaagagacttagggagttgagagggaggccattctaggttcagtgttactagagtgttagaagggtcttagagaactttttaaattggaaaattgaaatcccaagtgggcaagcaagggctccagcctagcactcccttttctctcccacatagcatgagggagagtggaaaggtaggagtgggtgggaaagtgttgcacccagcctttccactccaaacctcgtattgctttcttgaggttggtggtgaccaggatgtatcattttaggtcatgtccaaagtaatggagatgttccagcctagtgcggtggtcttacagtgtggctcagactccctatctggggatcggttaggttgcttcaatctaactatcaaaggtgagaccaggtagcacaaggatgggtgggcggggtcctgcttggtgctcctgtaactcagcaccccttctcccaccaaaggacacgccaagtgtgtggaatttgtcaagagctttaacctgcctatgctgatgctgggaggcggtggttacaccattcgtaacgttgcccggtgctggacatatgagacagctgtggccctggatacggagatccctaatggtaatagctgcagggccaggttcggctgggctgggtgggagctggagctcatctgtccttaagtttataaccccttccccgttggtcatatgaccgctcctcttctgatactagtcactgagtctcctgcctgtcctcttgtgatcagcagaccataaccatcactttttccctagtcctttttagctctctcccctctccctcctgcttttggtctggacaaagttctcattggtaatttacagctttggaatttctactctgtagagtaactggagtagcgagtgaagggagcgctcataatgagcatggcctcaagtgtcctaaaccagggacatgggccttctcctagcgacatatacaccactggtacagacataggagagtgatgttaaaaagatggaaatcccataggtacccgtgtctcacagtgtcttggaggcattctcctctgtttggataaataggcccagagaaacctacaaatgctttagggtgcttacgtgcaaatggttagggtgcggtggccaggtctcttgacggtcttctctcctgccccaatcagagcttccatacaatgactactttgaatactttggaccagatttcaagctccacatcagtccttccaatatgactaaccagaacacgaatgagtacctggagaagatcaagtgagtatatcctccagccaccccttggttgaacattcctgactttggtttgtccctsaccagagccctgctactctctcccattggccacagacagcgactgtttgagaaccttagaatgctgccgcacgcacctggggtycaaatgcaggcgattcctgaggacgccatccctgaggagagtggcgatgaggacgaagacgaccctgacaagcgcatctcgagtgagacccagacctagagccctatgccttccattcaataggcagctcacacttccaccaccattcctggctgcacactccctccaagctccccacctgtagagaaatctgttttcgagttccagtgcctgtaggaacaggttagggagcccgagttcctccctcttctggttccctttcccttggtgtctcttggaggacacgcagggaagcactgggcatagatgctgagctaaatcagcacccgcctgccctctcacccatgcttcccactccctcccagtctgctcctctgacaaacgaattgcctgtgaggaagagttctccgattctgaagaggagggagaggggggccgcaagaactcttccaacttcaaaaaagccaagagagtcaaaacagaggatgaaaaagagaaagacccagaggagaagaaaggtgggtttgggttcagctgggacttgggtctcgagcctgagaggatgaatctatstagggcagtgggaggagggagtgactcaggccctgccagctcctgtggggctcttcctcagttccttgagcctttcagtggctcccagaagtggcagagcccacaaaacaatgaacctctactgcctgagcacggctctcacataccaccccagcccttttcccagcactgcaccccagtttcccagggggctgcctccgcccaccaggttctggctgtagcaggctgggaaaccrgtccaacctgttctcaacagggctcactgggaggaccagggatgggcttttctctctttatgtccagtgagctgtagtgttggggaaggggtctcagggtaaatgaagacctcatgggtcttcccagaggtgctgcccttggccatccctgtactcttgtgttctagaagtcaccgaagaggagaaaaccaaggaggagaagccagaagccaaagggtgaggaaggagctgcctgtggccatctccctggcattggagcaccagcccctttgtcccaccactctgaggaaaggcacagggacagctggtccagcttacaaaggcctctttcagggaccagtctgtccagctctgcagttctaggcagagctaggagccccagcccccagtagtcacctaggatcctrtggaagtcactgtctgcacttttgccctgaggctctgggctgggtcatctcatgccagtctctgctctctccacagggtcaaggaggaggtcaagttggcctgaatggacctctccagctctggcttcctgctgagtccctcacgtttcttccccaacccctcagattttatattttctatttctctgtgtatttatataaaaatttattaaatataaatatccccagggacagaaaccaaggccccgagctcagggcagctgtgctgggtgagctcttccaggagccaccttgccacccattcttcccgttcttaactttgaaccataaagggtgccaggtctgggtgaaagggatacttttatgcaaccataagacaaactcctgaaatgccaagtgcctgcttagtagctttggaaaggtgcccttattgaacattctagaaggggtggctgggtcttcaaggatctcctgtttttttcaggctcctaaagtaacatcagccatttttagattggttctgttttcgtaccttcccactggcctcaagtgagccaagaaacactgcctgccctctgtctgtcttctcctaattctgcaggtggaggttgctagtctagtttcctttttgagatactattttcatttttgtgagcctctttgtaataaaatggtacatttctatatcctcctgagcttgtttcctatgtgtccctgggttggtttcaactctacttccctgccgttctggtgtccatgagtattggggcaaccccctgaacaagaaaaccccataaacttacctgcctgccttaactcctcccttgaggtttgaggtaaactactttccaccaatcttctcaccctacccccagaagaccactcattaaagcaccactaaagggacgacatttattccttttccaaatgttacagtaaaaccaggtggaagagaatggttttagcagttagaaaaaaaaaaaaagtacaaatctggggtttggccattaaaagttatttacaacagtgggagaaaaaaagacaagaagttgtttcacattacagacctccccccaccccaaagcctaatacttgcttaccaagtcaaaaaagagacacagttgattcacaggctggaggtttgaacttgagtaagacatttataaaaacctagacggggcagtgtcctccccagcccaggtgccactaggcacagcacaagagactaaaaacaacaggggaaggctggacactcaaggtttgggagtataagcaccccacttctggctcagggatttggggagtagggtaaacaaaacctacttggaaaagaattggggaagaaaaccaacaactgccttatgcaggggtggggacagggaaggaggtagggccagggacaggagcatttcacatcactaacctaacttgggaagctgtaagggaccatcttcaactggccttaagaggagaaccagatggctgatgggagaatccacaggagggagaggaggaaagggaacgtggctgggaggaggcaatagccccttcctttctgggcacaggaaggcagccagggcaccaggtccaggcagtgacctcacaaggacagcacagtttttgcagcttagagatcacccacctgcccctacctagctactcattctgctcagcgctggctggtgtagggccactctcyggccccgagggagtggatggctctgtagcctggggccctgcctcttcttctgaggctgcactagcctctgcccccttggcctggggttcctggctctcaggggtggctgcggccttcccttcctgagcagtgccctcgtcgctgcaggcaccgatctccccctgctcctgctcttcctctgtgggtgaggaggcagaagaatcacccccaccctccttccgatttctcttgaaggacaggccgctcaatttgaaaggcttcttgaaagagaatttcttcttcttcttgggggtctccttgggggggacctcccccttggcctcagcaccctggctagggggtgctggctcgatggcatcgccagtggccccggctgcctcatctgttccgttcacagggggcgactccccttcacccttgggggataagtctccattgcttttcacgtggccattctcctgcagggcagagggaatagcaatgagggcaggggctccccctcccccagcccgcttctgatcccttctagaggaaggggtcctcgattcgattctactgcaacccgaaagtctggcttcagcctcacccacacccaggatcccgtcaaacacctccctctcgcccctcacgggcgcgcggggagcgagcgcgcagagggcgcgaccggcaggaggcgctggggtcccgtggcccccacccccgtcccccggggcgcgctctctattccgcgcggaaccgctccggatctgctgtgcggatcccgggcaggcgggcgagccgctctaggcgacattgggcgggaagccgccccggggcgctgtctctctgcacctggacggcctattttcccagcctcccgctttgtgtaagtggcccccacccaccccaggctctcccgcatctcggctcccccttaaaaaaaaaaagaccgtgggccaccgaggtcgggtcggcgggtggagtgcgctccccgccgggccccagctccgcggcccctgggcgcccccttggcgtggcccagcagcgcctttgttccccgcgcggcactcggggcggccggggggcagcgccggggaccggggccgcgaacaaagaaggcggcagggcccggccggcgccccctccccgcccctcccctcgcttcgcccgcgggggctgcggcgccgagaacaaagggaccgggcgggggagggggcgccgcgtgtcccgggccggacaaagcgcgcggccccggccccggccccgggccctagaaggggcgaggtgcgagaggaggggctggggccggccgggccaagcgtacccacctggccgttggccttcgcgggggaagcgcctgctgcctcctcggcggtcacgtcgccccggggagccttggagctctggctgcccatgatgggggtctgctggggggcgcttggagccgccccgggctcgcgccgcaggggatagtacggcggggtcggcccggccggcggaggggtggggctggcgcccgagggggaggggtgccgggggaagccgagctgcacctccgctccgcggccgacccgctagctgcgcccgccgccgctccgctccgcgccagaatgccgcccgccgcccgccgagctgcctatatataagcgcccggagctcggggcggggccggacatttaaatgcgcgcccaatcgaggggcggaggcggggttggctcgcaggccccacttgcgcagcaggcgacgctggcggtcgggtaccccccaccccacccgaatcccaggggcaggtagagtccggtgtgggcaggagcgaggccagtcctcccgcgagctgggcggggcggggcggggggcctggaggaaggagacgggcagtcattccatcctctccgctccacctctccggtgggcgcccccgcagcctggagcggcccccaacgccttggtcctgcagccgctggcagtctcccgcttgaacccttcgaagggctcacacgaccaggctcgtcagatggctggtcctgaattatactctagaaatgtggtcatagaagctgcagggcccctgcgctgggctcggcacccgctccggcctggagagcggtcagaggtcccacccacgtccctgcctgcctgccatggccagccggggagcggagggctctgccttgcctcggggtcactctggtcggactagtgaggcctttccctcattcctcctttcagtcccttggtggccagtcattctgagtggggacagacagattcgccttgagcccctcctgccctcagcctggacccactgcaaagtcccacgtgggggactttgtgaccttgaagggcatctccatccccattgaaaggccaaggctcagaggcattgacaacctgtctgacttggctctggtccttcctctttacctccacacacaactctgctcccctacatcagggtgccccaggccggcagaggaaccccagctggggactcaacaaacctcaaaacaccccagtttctgaaggggagggataggatgctaccaagggtcccttcaagggacagccccttgaggacagccctcaaagctgcccagcccagcttcccaccctgcctgagagcaagggagcccggaggtgctccgggctggagactccctagctttggtcctctgccacctctccttctgctggcctggataggctggtgggaaccccagaatcctggccggccccggatgtctgtgtccggctgccagccctcagcccccaggaggaaagggatgggggctggaaggaagcaaagtgttgcaaatgcaaggctgtgtcccagccagctcagcaagtccctcccctccctcctacggtgaagcctcctgggaggcctgaggctgtgaagtgtggagacaccccagggcctgagaaattgggaactccccagagatctgaccacagaggggcggggagggctgaggtggcttctgcattctgcactcactcctgtatcctccatccccacccccaccctgagactacagaataccctcagctatctcagcttcacttgccccccacccccgccccatttcacagactgggaccctgaggttcaggaagagaaagtgacatgcccaagggcacacagcagctaccagtagctgagggtgagaaaaggcttggagaggtttgataacatgggccaagggctgtaaggaatcccctggcagaattttctgttgagatctggggctgcctggtcagagtgggaggcaagggctagctttgggacggggagaggcactgtgcccccactgcagctcactgaaagtaccgtgacttctccacagcttgccactaagggaaggatgtcatgacctgctctctgtctcagccacaatagggaacccacaatgctgccaggcgctgccygcaccagctggctgggctcagagggacggagggtgtgtgagtcttgcacgggttggggtcagaggttaagagcagaacctaaggcttctgatccccaggcactgcctggcggggatgagaggcaaatcttcccaaggatcccaggaggggcatcgaagagcatcagggtaaaagaccccaagtccccagagccccagagggagcctgrtccccaggggatgccctgtatccccaccagacatcccaggaggctggggagggggcgcctgggagcctgatccctcagcaaatccaggtcccagcagaatctgacttctggaagaggcaagaggtttaggatgcttcagggtgggggtgggaggttacagcagccccatggcctcctcggtccacactgcagctccttcctccccagctgctgccaacccagacaatgcgcccattgttctgcgtctccgggagccagtgtgcaactgcgtgtatctgtttctctctgtgtgtgactgtgtgtattgctctgtgtctgtgtgtgtgagactttctggctgtgtgtgtgtgtgcgcgtgtgcccaggtgtgcacatttgtggttgcgtgcgtctggatctttgtttggccctgtatattcaagggtgaaggagagagcctggtgatcctggtaactgagacttgctgggtttgtgcctgcccttccttgagactgttggtgactgtgtctgactgggtgtgaaactgagtgtgtggctgtatgagagaatatcgatgggccgggcgtggtggcttctcgcctgtcatcccggtgctttgggaggctggggcgggaagactgcttaagcccagagttcgggaatatctgaatgtgtggagcaaagagcggctcctttatgtctgggtgagtgttcctgtggcggtggggagctgtgtgtgcctcagtgtgtcactgaggctgtggctgtggtggttagaacctttgagatgtgggcgtttgccaggatggagtgacagggaaaggaggaatgaggacagggtgacgctgggatggatgggggaatggaaggtgcagagaccagagaccccacgttcatacaactcctcatctgtcccagttctcctagtaagggctctggccctggccctggcctgagatgctcccggccccaccatgaatcaggcacggacagcaggggatgaatttccctggcaggcaacctggggcctctggagagacgcagggcaggggtgaagatgggagggggcagcagaaaccaatgccccatgaaggaggttgggggatactttaaggtctgtcaggccccggagccttgtgttgaggactggattagatgccaggggaggtgtgaatgggcaatatgtagtcagagatggaggcatgggccttcctagcggagggactggcatatgtaaaggccttgagatgggaagacacatcatcagaggtcccaacggaggccctagggaacagctacttggcacagccccagtccccatctccttctggggagcatcagctggacctggagacctcggttcttgccccaggttgggcacttcttgctgtca

SEQ ID NO: 96094 - DNA, 21594 bp, Homo sapiens
  misc_feature (1)...(21594): n = A,T,C or G
acagagtccaggctctccccctcctcatcctcctcgtcctcttcacccactgcctggaatttcagtagccccagggacatggcaggtttgaggtgagtgacagggcagggctgcagctctgagattagggaaaggctggcagtattgcccagggagaggtggcagaagttgagggtgagaagagcgtgccagggagtgtgtggtggtcaatgttcaaggtgggttaggggggctgaatgtgccagggtgagtgagcagatgggtgtgtgaggccaagtatgcaagggctgkaattttcctggactgctaacttgggagccacgtgatgcccatctgggtgggggccggaggaaccctgctcctctggccctttggatgaattttattgtctttgcccagaaggagacacccaattcccagaaaggaagttgctccaggatgagaaaagcatcattcataccagagtcttggccctcctcccaagactcatgttaagggagctgagatcaggaaggaggctgcctagccaccccttgtccttactcgtgacaccagcccttcaggaaaggactagcctccagggccctggcctgggagtcaggagacctgagttctagtgctggctctgcagaaccttgggcaagtcactgaccttctcagagctctgttgggacagatgaaggatttcaagctaatactctaaggagccctcaagggctgcctgcaggagaaggacagagctgtggatgggctccttgccttccatctccctgcccctcccagggcttcaaccagagcagttcccttttttaaactttgttttcaaacataacatacacacagaaggacaggtgcagtggctcacgcctgtaatccctgcactttgggaagccgaggtgggcggatcacgaagtcaggagtttaagaccatcctggctaacacggtgaaaccccgtctctactaaaaatacaaaaaattagccgagtgtggtagcatgcatctgtagtcccagctacttgggaggctgaggcaagagaatcgcttgaacccgggaggcagaggttgcagtgagccgagatcgagccattgcattccagcctgggtgacaaagcaagactctgtcaaaagaaagaaagaaggaaagagagagagagagagagagaagggagggagggaggaaggaaggaaggaaggaaggaaggggaaagaagtgtaacatacacacagaaaaactgtacatatcataaatgcatggagacacggtggctcacgcctgtaatcccaacattttgggaggctgaggcgggcagatcacctgaggtcaggagtttaagaccagcctggccaacatggtgaaaccctatctctactaaaaatacaaaatgagctgggcgtggtggtgcatgcctgtaatcccagctacccaggaggatgaggcaggagaatcactggagcctggaggcggaggttgcagtgagccaagatcacaccactgcactctagcctgggcaaaaagagcgaaactccatctcaaaaaataagtaaataagtaaataaatgaatgtatggctcgatgaattctcccaaactgaacacatccatgtaaccagcacccagatcaagcaacagagtattaccagcacccaggaaccgctgttagcctcccatgtgctcctggcctgtcactaatctaagggtaacaccaccctcattctaacagcatagttttctctgtttatatrccttctagtggttcacaaactttagcatgcatcagaatcacctagaaagcttgctaagatggctaggccccaccacccagagtttcagattcagtatgtatggggtggggcctggtaatctgcatttctaccaaattcccatcccagctgctgctgctggtctggaattttacaatttatgctttttttttttttcgagacagggtcttgctttgttgccaggctggagtgcagtggtgggattacagctcactgcaaccttgaactcttggactcaggtgattctcttgcttgacctcctcagtagctgggacttacagggccaagaccccacacccagctaattttttttttttttaagtttttgatagagatgaggtcttcctctgttgctcataatggttttgaactcagccaggcgcggtggttcacgcctgtaatcccagcactttgggaggccaaggtgggtggatcacgaggtcaggagatcgagaccatcctggctaacatggtgaaaccccatctctactaaaaaaatacaaaaaaattagctgggcatggtggcaggcacctgtagtcccagctacttgggaggctgaggcaggagaatggcgtgaacccgggaggcggagcttgcagtgagccgagattgcgccactgcactccagcctgggcaacagagtgagactccgtctcgccgggcgcggtggctcacgcctgtaatcccagcactttgggaggccgaggcgggcggatcacgaggtcaggagatcgagactccgtctcaaaaaaataaataaataaataacaggattgaaagaggatgagaaagaaaaaaaaattagggcatggtggcacatgcctgtgcccaactacctgggagactgagatggaaggattgcttgagcccagaagggcaaagctgctgcagtgagccctgatcacatcactacactccaggcctgggtgacagaggccgacctgtctcaaaataaaaaattaaaaaaaggcttctgtatctatgaagtaccattgttttattcctttattctttttttcttttcttctcttttttttttttttttttttttgagagaagtctcactcatcccccaggtttgagtgcaatggctcaatctcggctcattgcaacctccgcctcccgggttcaaaagattctcctgcctctgcctcccaagtagctgggattaagttgcctgccaccactaatttttgtatattttagtagagacggggtttcgccatgttggccaggctggtttcgaactcctgacctcaagtgatccacccacctcagcctcccaaagtgctgggattacaggcgtgagccactgcgcccagcctattcttttcttttttatttttttgagacggagtctcactttgtcgcccaggctggagtgcagtggtgcaatctaggcttactgcaagctccacctcctgggttcatgccattctcctgcctcagcctcccaagtagctgggactacaggtgcctgccaccatgccccgctaatttttttgtatttttagtagagacagggtttcaccgtgtcagccaggatggtcttgatctcttgacctcgtgatccgctcttcttggcctcccaaagtgctgggattacaggtgtgagccaccgtgcccggcctctttttttttttttttttttttaatgagacggggtctcactctgtcacccaagctggagtgcagtggtgcaatctcagctcactgcaacccccacctcccaggctcaagtgatcctcccacctcagcctcccaagtagctgggaccacaggcccatgccacacctggctaattttttgtgtttttggtagagttggggtttcaccatgttgcccaggctggtctcaaactcctgggctcaagtgatcctcctgcctcggtctcccaaagtgctaggattatggccatgagccaccactcctctccctattcctctattctttttctttcttttttcttttctttttttttttttttttgatacaagtctcactctattgcccaagctagagtgcagtggcgtgatctcagctcactgcaacatccacctcctgggttcaagcaattctcctgcctcagcctcccaagtagctaggactacaggtgcgagccaccatgcctgacaaatttttctatttttagtagagacagggtttcaccatattggccacgctggtcttgaactcctgacctcaagtgatccgcctgccttggactcccaaagtgctgggattacaggagtgagccaactcgcttggcttttttttttttttttttttttgaggcagagtcttgctctgttgcccaggctagagtgcagtggtgcgatctcagctcactgcagcctccgtttctcgggttcaagggactctcctgcctcagcttcccgagtagctgggactacaagcacataccaccatgcctggctaatttttgtatttttagtagagaccagatttagccatgttggccaggctgttcttgaacttctggcctcaaggtatccacccacctcagcctcccaaagggttgggattacaggggtaagccaccgcacccagccctattcctttattctcaattaaaaagaaagaaagaaaataaataaataaataaataaataaaataagctgggcatggtggctcatgcctgtaatcccagcactttgggaggccatgcagcaggagcattgcttgaggcttggagttgaagaccagcctgggcaaaacagggagacccccatctccacaaaaatatttacaaaagaaaaagaagacggatggatgaatagatgggtcctgtggtaaatcagctcagctctcgtcctgcaattttaccagcttaattgtgtctcttgccagactgaaaaccctgtgaacagaatcttccccagtcatccctgggccccagcaccaaacacagggcccagctaactcactgtacaggtaatacacacttgctgaaacgatggtggatagctgatggggttcttgaggtctggactcagccagaagtgggctgcacagagggcgccctcaggcagggacttccagctgcgaggtcgaggagggacgccagctacacagctgcagcatttaaggtggaccaaaggatttccccaacccaagtttcttatgtatgggaggaagtaggcagttcccagtttcacacccactttccagcccttccaccagggtatggtggaagagatagttatctttcttcctttccttccttccttccttccttctttctttccttccttccttccttccctccctccctccttccttcctttcttctttcttttctcttttttgacggagtttgctcttgttgcccaggctggagtgcaatggcgctatctcatctcactgcaaccttggtctcctgggttcaagcgattctcctgcctcagcctcccgagtagctgggattacaggcgcacgccaccatgcctagttagttttgtatttttagtggagacggggtttcattatgttggccacgatggtctcgatctcctgacctcgtgatcggcccgcctcggcctcccaaagtgctgggattacaggtgtgagccaccacgcctggccaattttttgtatttttagtagaaacagggtttcaccatgttagccagggtggtctcgaactcctgacctcaggtgatccgccccgcctcggtctcccaaagtgttgggattacaggcctgagccactgcgcccagtctttctttctttttaaagttagcagtagtgctagcacctcagggcttgaaaaaacaaaaatacaaaaatattgagtgtctcctgcaacccaggcacagggttaaggactttaggcaagattattctccccatttcacagacgatgacatggagatttgcttataacagtctctggccagggacctcgctaagaaatattggcaatatgaggggaaattcctgtgaaactgtgatcctttcctctgaggggcctccttaacagctgtccagacggcgtcgccagctgcccaggcagttcctatccctttcggagctccagcctgcccctcctgacgctctcagagtctggccttctgctgggccccgggtctctcactggcagaatggagttctcggagctgatccatacgggctgagcccaagcagagtttctacggggcccggaggcgcccccgcttcgcggcacggtgtgagtcaccgtccaccacctgctcctgtcgccagggcccgcgtcctctccggacctgtggctgctgctgttgcgtagcgtcgactccttcgaraagcagtgagacgtggcggggtgggggagggtccccggggttggggagcgcgcggcttggcggagtagggggcacggccagcgcagtcagagctggcgccctcctgcgtaagcccaatccgggaaactcgttgcccctctcctgggaaaggaacgtccctccccagggttgcgagtgactcgggcaccatcaccctgtgctgtaaagacctgcgagtgctgmagctggaaatagagggcgcggaagcgacgctgggcatcgcccgctccatcgaggtgtgccgagggagctcccgagccctttaagctctccctgtctcgcgtagaggggaataaaaaggtgcttctgttcaaagaggctccgcagccgcagctaaatggcagggggatgcagggtggtccggggtacttggagaggccgaagctgaagctacaggactgaggggctggaaagggcgcgggcgagacaattccgaccctccccagagcccctgacttccttctccggacgctgtcctccctggaatcagtcatcacctccttccctttattctaccgtcccaagggcctgagattgggcgactcctggcacttcctcccgcccgaactctactgcaagagagtagctcgcgaagtgggcgcggtcgtaggggcccgggaaggtggaagcgccgggcctggaagaggcgcggggacagggcactccctgggtgccctagacctggcctctctcctccctgcgctgcagaccaacgcgtggcggctgagcgaggtgaacgaggacttcagcttgtgccccagatacccccgtgcggtgatcgtgccatacttggtggacgatgatgccctggcgcgcagcgcccgcttccgtcagggaggtcgcttccyggtgctcagctaccacccggctcccagcggcagagggagcgcgccctccccacgctccgcccctgggtggctgcgtcctttctgggccttttctttttggcccggtcaattcgcggcgtagccgctgccccaactcctgccccattctggtcccgcccctctcccgccttttcgctgggaagggtatcacctttctctggccccgcccctgacggttccgggccccgcgaagcttagtcccttctttgtcaagccaggacccgcccacggtctattcatagggtcccaaaccactttggccacaacanccccagactggtccgaagcctcgtgagttcgccctggtcgttgcactccagcctgtcgctgtgcagacctggcttagaggacccctaaggctgaggsgtcacttccagaactgagtccggtccgcaggttctgctacgctccagccagcccctaactggtccccagaagcggcgctgckacagggaccaggagctgctgcgaactgcgctggcgggggctcgtccttgggcgcggggcttcatcatggacacgctctcggcccaggccgcgaaacaagcccgcgtgactggcggaggcacagagaccarggccgcttaacctggctggttgcactggtccctggagaggtaaggggcctcccaccctctcccaggccctctcctgcagggctctgtgaatgtacatgtgtgtgagtatgtgttggcgggaggcggggggtcctccaggaaccttgaagactcaagcctttcctggtgtcatccctccacatgagcaaccccacttgcacaccaccactgagagagctccttactctttaggcaccccaactttgcctgggaagaaaaagcacctctttacattaaactgaaatttgtcttcccggaacaacctccctgcacacacgcaccccctccctgagggctgcacctgcacagatgtgatctgttccctctgtctccaggcgatggcagtgccaagaagaggtcctgagggagttttgtgttttgaggagagtagactgcttccctatccaaaatacaaagctctgtttattcatttatttacccagcactgagcacaggggctgccacagtggccggctcagacatggcagagatcagcagagaatgggcaatcaggctcccctgagatgagcagcagcgcagaggaggtgcccctctcttactacaccaacttcaggtaatcagaggtttccttgagaataggatgctttagctgagacccaaaaatggaggagtgagccagaagaagaaagaccctgcatgtggagggaattgcaagtgtccaggtgcagagacagcctggtcatttgtcctgtttggggaactgccaagtacagtagtccccccttatcctcgggaagtatgttccaagatccccagtgaatgcctgaagcctcagatagtaccaaaccctacagacagtatgtttttccatacctatgataaagtttaatttattttattatttttatttattttattttatttttttgagacaagagtctcgctctgtcacccaagctggagtgcagtggcgctatcttggctcactgcaacctcctcctcccaggttcaagtgattctcctgcctcagcttcccaaatagccgggattacaggcacctgccaccacgcccagctaatttttttttttttttgtattttatcttattttattttatcataataattattttttaagatggagtcttgctttgtttcccaggctggagtgcagtagcgtgatcttggctctctgcaacctccatttcctgggttcaagtaactctcccatctcagcctcccaagtagctgggactacatgcacgtgccaccatgcctggctaattttcttttctgtattttattttattttattattttttgagacagagtctcactctgtcgcccaggctggagtgtgatggtgcgatctcagctccctgcaacctctgcctcccagatgcaagcaattctcatacctcagcctcccaagtagttgggactacaggagcctgccaccatgcccagctaattttttttttgtattttattttattattattatttttgagatagaatctctctttgttgcccagtctggagtgcagtggtgtgatcttggctcactgcaacctccattccccgggttcaagtgattctctcgcctcagtctcctgagtagctgggactacaggcgcgtgccaccaggcccggctaatttttgtatttttagcagagatggggttttgccatgttggccaggctagtctggaactcctcacctcaagtggtctgcccatctcagcctcccaaagtgttgggattacaggcatgagccaccacgcccagccttttttttgtattttagcagagatggggtttcatcatgtcactcagggtggtcttgaactcctgagctcgggcaatccacctgcttcagtctcccaaagtactaggattacaagcgtgagccactgcatccagccaagtttaatttatacagtaagcacaacaataactaataataaagtagaacaattacaataatatgctataataaaagttgtataggtcaggtgctgaggtaaaagataggtatttttggagatttagaagattgtggctgggcacagtgacttatgcctgtcatctcagcactttggcaggctgaggagggtggatcccttgagcccaagagtttgagaccagcctgggcaacatagggagaccctgtctctgtacaaaatacaaaaattggctgggtgtggtggctcatgctrgtaatcccagcattttgggaggctgaggcgggaagatcacctgaggtcaggagtttgagaccagcctgaccaacatggagaaacgccgtctctactaaaaatacaaaattagccgggcgtgatggcacatgcctttaatcccagctactcaggagactgaggcaggagaatcgcttgaacctgaaaggcagaggttgcagtgagctgagatagcaccattgcactccagcctaggcaacaagaatgaaactccatctcaaaaaaaaaaaaaaaaaaaaattagctacatgtggtggtgcacacctgtagtcccagcttctcaagaggctgaggtggatggcttgagcctgggaggcagaggttgcagtgagctgtaattgtgccactgcactccagcctgggtgagagcaagatcctgtcccaaaattagccaggcatggtggtgtgctcctgtaggcccagctactcaagaggctgaggtgggagatcactggagccccgggaggtggaggctgcagtgaactgtaatcacaccactgcactcgaggctggctgacagaatgagaccctgtctcaaaaaaaaaaacaaaaaaaaaatggccgggtgcggtggctcatgcctgtaatcctggcactttgggagaccaaggcgggtggatcacctgaggtcaggagttcgagactagcctggctaacatggtgaaaccccacttctactaaaaatacaaaaaattagccaggtgtggtgcgggcctgtaatcccagctatttgggaggctgaggcaggagaatcgcttgaaactgggaggtggaggttgcagtgagccgagatcacgccattacactccagcttgggcaacaagagtgaaactccaaaaaaaaaaagttgtatgaggccgggcatggtagctcacgcctgtaatcccagcactttgggaggccgagctaggtgggtcacgaggtcaggagatcgagaccatcctggctaacatggtgaaaccctgtctctactaaaaatacaaaaaaaattagccaggtgtggtgacgggctcctgtagtcccagctactcaggaggctgaggcaggagaatcgcttgaacccaggaggcagaggttgcagtgagctgagattgcgccactgcactccagcctgggtgacctagagtgagactcaatctaaaaaaaataaacagttgtatgaatgtgatctctttcttaaaatatcttattgtactatactcacccttcttgtgatgatgtgagatgcttaaatgcccatgtgatgagatgtggtgaatgacataggccttgtaatgcagccttaggctcctactgaccttgaacacaagcccactgcagtactgccacagtcactctgataaccaagacagctactaagtgactaatgggcagacagtgtgtgcagcatggatatgctggacaaagggatgactcctatccagcgagacagagcagggtgactcaagatttcgtcacaacattcagaagggcttacaatttaaaacttatgaattgtttatttctggaattttccatttaatattttcaggccacagttgaccatgggtaactgaaacctcagaaagtgaaaccatggatggggtcaactaatgtcctttggtatggtgggagtgtcgagtatgaaatgggaggacagatgaggctacagataagcttagactttatcctcaaggcagtgggcagccactgaaggcttttaaacagagctgagaagtcgctgttagattttctggcaggaggtcaccagtaaccttgaacagagcagtttctgggaggtaggagcagatgcagaattccaagagaactgtgtttttcttgtcagaccggggctccccagggaatgctatgttgctcccatcagactggtgtacatcaagggtgttgtgatacttccatcaaattggtggtttcccaggacattgtgtgtttccccagagggctatgtgacccttccccaggtactttctcaaagggtcttgagtctctcccatcagactgaggaatcctcaaagctaagaaaccattttaggctgggcgcggtggctcatgcctgtaatcccagcactttgggaggccgaggtgggcggatcacaaggtcaggagtccgagaccattctggccaacatggtgaaacctaacaatgcaaaaactagctgggtgtggtggcggtcgcctgtagtcccagctactctggaggctgaggcagaagaatcacttaaacccgggaggcggaggttgcagtgagctgagatcgcaccactgcactccagcctggagacagagcaagattccgtctcaaaaaaaaaaaaaaaccatttcatggacagaacgagacgctgtctcaaagattaggaactcctctgtgggtcgtgtgtgccgtgagactggactccctaaagggctctgtgtcccttttatcagatgggctctttacaggattctgtgtctccctcattggtcttgagcacttgctccctggctgtacttggcaagggcttgagctggaaaagatgaccagactcccaccgcccagagggcgtcccctgcaggagagcttcatgcgcctggtggaggcctgtggggactcggagcaaagcatggacaactggctgagtcggctggacggctgccgctgactgtaacatgtaaagcaggcactgagcaccacctgcctggcagtccaggrcatggagaggtaaggccccattgacatagagaatagggtgagatgggcagggctctcaacccctggatgcaaaactgtgattcagtaagcaaatatagcctagaactgggtccattctattcctggcctggtacatggggctgaaggmacagacagcaccctgcttgtgacttcactggcccaactcatcctggaccccttgagcaagaccatggctggattccaggaactggtggagtggaagtggatccaggaaagtaagtgaccacccaaccccagccttaccctccatccagaaacttgcttcctcgtgcccattgctctgccccctccccaggccagccaccccttccagctgcgctgtgcccattcagccttctcccatgcccaccccaagcatgaggcacccacctttctcctcttcctggactgcgtgtggcagctgggctgccggttcccactgtcattggagtttggggaagggctactgttggcgctgtttgggcacgcctatgcctcctcttttggcaccttcctctgcaacagcgaaaaggagaggtgagctgagggggtgttgaggtagcttaggggcaggcacaggaaagggttggatacctgtgccatcagtgccttacttccttttttttttttttttttgagatgaagtctcgctctgtcacctgtcgcctggtctggagcgcagtggcacgatctgggctcactgcaacctttgcctccctggttcaagctattctccagcctcagcctcccgagtagctgggattacaggaatgtgccaccacgtccggctaatttttatacttttagtatagatggagtttcaccatattggccagtctgatctcaaactcctgacctcaggtgatctgcccacctcggcctcctaaagtgctgggattacaagcgtgagtcactccgcccagccagcaccttacttccttaggagccatctttcccgaattcaagtgggtttgtcttttaggaaaactgagtgttctccttgccccacctccaaatctcatacttcctcctaacttctgcaaacccagagataaataggtccaaggccaatcctttagacagacctactctgtccatagccaattgcaagtgaacccctaccttgaaaacaaggattaaaggggaaatttgctgcaaaaataatttataaggctctctaccactttgcaaggtcgattgtttcaaagcaatagaacagaggttgaaagcagagtggaatcatttgggctcaaattccagtttcaccactcacctgctgggtgttcatagcaaacccgtctgagtctcaatctcrtcggtagcatgaaggggataagagcagccataatctggccgggcgcggtggctcacgcctgtaatcccagcactttgggagctgaggcaggcaggtcacctgagatcaggagtttgagaccagcctggccaacatggtaaaaccccatctctactaaaaatacaaaaaattaggcctggcacggtggctcacacctgtaatcccagcactttgggaggctgaggtgggcagatcacaaggtcaggagatcgagaccaccctggctaacatggtgaaaccccctgcctactaaaaatacaaaaaattagccgggcatgttggcacccgcctgtagtcccagctactcaggtggctgaggcaggagaatcacttgaacctgggagtcagaggttgcagtaagccaagatcccaccactgcactccagcctaggtgtcagagcaagactccatctcaaaaaaatataattagccgggcgtgttggcacatgcctgtaatcccagccacttgggaagctaaggcatgagaattgcttgcacctgggaagcagaggttgcagtgagccgagatcatgccattgcattccagcctaggcaacagggtgggactccattaaataaataaataaataaataagtaaataaaagaagtggtatttttattatttggttggcttgttgcatatgctgcctatcagtcccagatgccagctgtcttatgagattgagagatgcggggagggagggttcacctttccagggtgaagatcagatttagttatcttctgttgctcagtcttcctctataccccatcctgcttcactaaccccactagtcctggatcatctctatttacctccctctcccccatccttcatctttagtctttctcctaaaattgtctgagtttggtcctcccttgccagaaggccctccccccgtcttcatccacactggtctcttccatctggactctccggcagccgcctcactgttctctgcatcttcattgttatcaattttctttcaaaagctcctgggtccagacctatcaatattcacagtgggccctttcccgccttctttctttggctcatgccgttctccccatgttggctgttgctttgcacagtgggtatgctaggtctgttgagactcagctcaaacatcacattcttaattagccttctctgacattgaggcaaaactaaattggtttctccctttaaatagaactccttaagaagtaggactttgtcttgttccccttttattctagtgcctagtacaagatytgactagcaataatgtttgcaagaaaaaggagaaaagtaaaggttatcactgctccaaagtggctgtcaccctactaaccagggctgcccacccagactcccagagggcatacctggggctggaaactcactccctgcctttctgcagatgccgtgtgaagggaggactcagatgcactccctgtggtctgggctcaaccagccaaaagagcaacaaagactccagaacccactctacctcctcaatcccttggccatctgtggagccccagagcctgcggctgtggcaaggtgagctccacaccttctcccctgggtattacccctctgctcagcgtcctgacctgtcttcctcctcctcaggcctgtttctgcgctggacctgctcacctgagcctgcagaagctgcatgggggaagagtgtggcaaatagtgacaggaagggagaagacagaagcctctcagccaactgcttcagccgagcccctattctaagcactggctccttggatagcagctgagatgttcctgaaacctctgcaggccccttaggacctttacaccttggatgagggtgcctgcaacccaggttagccaaaagtactgagggtcttaagtttgaagtgtccaaagtatagggaggtctcaataataaaagtctccatgatcagcatcagcttgctggggtgtcagtgaaaaggaaaaatgatgaaacagacaccacaaaatatctgaccagaagccatttattaccaaaccaatttatttcttagagttcaaaaccttctgtgagaatcttctctggcctggttggagatccaccttcttcttttttttttttgagacggagttttgctcttgtggctcaggatggagtgcaatgaygtgatctcagctcactgcaacctctgcctcctgggttcaagtgattctcctgcctcagcctcctgagtagctgggactataggcgtgtgccaccatgcctggctaatttttgtatttttagtagagacgaggtttctccatgttggtcaggctggtcttaaactcctgacctcaggtgatccgcctgccttaaaaaaaaagtggtgggattacaggcatgagccaccacgcccggcaggagatccagcttcttaagcctcaaactcaaattcgaagtactgtgggtcgaagtaatggatacggacgtaaccatcttcgccgccgctgctgtagctggaaaaagatagccaggcaccagtcaggtgcttactctgggaaaggcagagacccaacccaggcttaggtcagctgcttcactggtaccctacctcttgccatcaggatggaaggcaacactgttgataggtccaaagtgacccttgactcttccaaactcttcttcaaaggccaaatggaagaacctggaggaaaagggacacaattaattcactttctatcttcttccaaaacactttggaggtggcactccccaaatgcaaattgttattattatttatttattttgagatggagtcttactctgtcacccagggtggagtacagtggcgcaatctcggttcactggaacctccccctcctgggttcaagcaattctcctgcctcagcctcctgagtggttgggattacagatgcctggctaatttttgtatttttagtagagatggggtttcaccatgttggccaggctggttacgaactcctggcctcaagccgccttccttagcctcccaatgtgctgggattacaggcatgagccaccatgcccagcctatcatgtgtatcgactttgattggtagttgcttgtagtgctggagaaggattctgaggttcattggaagtgagtgccaggaatgattagtacatctgccatggatacaatggaagaatggcagtatatctatgtctatgtatttgctgtgtgtaggtgaggtcttggtctttggtaactagttcagcactcaaagtggggacactcaggttgctgtcatccttttacagggttttaatctcttgggaagggccattggtcactcactgcatcctagcaactcccatccatgtccagnnnnnnnnnnnnnnnnnnnntggctcacgcctgtaatcccaacactttgggaggccgaggcgggtggatcacttgaggccaggagtttgagaccagcctggccaacatctcttctaaaaatacaaaaagcagccagggacggtggccatgtacctgtaatcccagctactcagaagctgaggtagaaggatcgcttgagcccaggaggttgcggtgagcagagatggtgccactgcactccagcctgggcaacagagtgagaccctgtctcaaaaaataataataataaagcagaaaaattgagataagaagtgaatgtgaacaaaataagatggaaattggtggctgcgtgccatggttcacgcctgtaatcccagcactttgggaggctgaggacagaggattgcttgagcccaggagttcgaggccagcctgggcaacatagtgagaccctgtctcttacttttttaacttttttattatatggggaagactggacccagatgtctgcctgaatacataactaatacttatagagtgcctactatgtgctgggcagtgcttaaagagcttaataaatattaactgaataatttaatctgcataattttatgttaagtatattgtcattgtctcattatacagtagaggaaatttagacatagagaaatataatgaaggctgggcacagtggctcatgcctgtaatcccagcactctggaaggccaaggtgggcggattacttaaggccaggagttcaagaccagcctggcaaacatggtgaaatcctgtctctactaaaaatacaaaaattagccaggcgtggtcatgggtgcctgtaatcccagccacccaggaggcagaggcaggataattgcttgaacccgggaagcagaggttgcagtgagcagagatcgcgccattgcactccagcctgggtgacagagcaagactccgtgtcaaaaaaaaaaaaaaaaaaaaaggctgggcacggtggctcatgcctgtaatcccagcactttgggaggctgaggcgggcgtatcacgaggtcaggagatcgagaccatccttgctaacacggtgaaaccccgtctctactaaaaatacaaaaagaaaattagccaggcatggtggtgggcgcctgggccgctgaggcaggagaatggcgtcaacccgggaggcagagcttgcagtgagcagagatcacgccactgcgctccagcctaggcgacagagcgagactccatctcaaaaacaaaaacaaacaaaaaaggtacaccacatgagattttaatttggaagagctctcttcttctttacctggcctcaaacttgccaatcctggtggaggttgtggttacatccatggcttcctgaccaccgcccaggaccacctgaatggaagaagaaactctagatgggaccaatggacaccaagtccattttgtgtttttctgctgccatatacatttttaacatctcacacggctcaatgggaggataccaaaggtaggggatgatcagacacttctgccacctcctgctggctgccctggggctattcaatccttccagctttgtcactcctctgggcatctcctctctgcctgacatcatttcccccacaatgttgtagcccaacttctggacaagcatctagaacttggaagcttcctgaggcttcagcaggaaggcaggtggggttctcttacatggtcatagttgggggagagggcagctgagttgacaggacgttctgtccggaaagtcttctgatgttcaagagttgtggagtcaaaaagctggagagagaaggcaggggggaaatctgtaaagagctttcctgggggaagtcgggcagggtgagctgtgcagccggagggagggagcagccctgccagaccgctgcccaggctcaccttggctgtgttgtccttggacgcggtcacaaacatggtcatgtccctggataactggatgtcgttgatctgccgggagtgctccttaacattcaccaacacctctccagactagggaaggaagaagagtgacactgaatgggcccaatccctactaatctcagctccccagaaacccaagcacccaaatgaaagctgagacagcatggactttgtgttttcctcaccccctctatcctatcagtcacccctaaatatcccttgactctgtccagtaatgtacatcctatgcctattggctagttcaggttcactctccaaacataaactgcaaaagctgttggaaggaaaatctggccattgataaccctttaaagattccctactgcctggaggaaagtcaaaactctttacctcctcacactgaaggacgtttaaaatctattccccgtcctctgtccccaagaccacaccccaagggtttctgaagactccatactttcttaactctgtgcctttgcctttgctgttccttttgcctgtgggatgttctttccttcctgcttgaagctccatttattctccagggtttaatgtacacgccacctccctgggagagtgcaccttccacacttggctgagacctctatggtggcacaattcacaatctgactcaggtgctagctgtttgcaagtctgtctccccatgggggaagggactgcatctgatttacttctttgttctaggagttcagcattatactcagcattatacagggcattatactcagtggtggcaaggaaatgctcatttgtgatccttaattatttttttgagacagggtcttgttctatcacccaggctggagtacagtggcacaatcatggctcactgcagcctcaatctcccagactcaagcaatctttcagcctcaacatcctgagtacctgggaccaaaggcacactccaccacacccagctaatttttaatttttttttgtagagacagggtcttcctatattgcccaggctgatctcaatctccgggtctcaagcaatcctgccacagcctcccaaagtgttgggattacaagtgtgagtcaccacacccggcctgtgatccttattaacatgtcctgagtactttgtgacaagtttttcaaacatgtgatatcatttgatccttgaaacattttacagataaacagggtcagagaagtcatgtaaattgcccaagatcacacagctagaaagtggtgaaatctacatttgaatctcacctctgctctttttaaaattttttattaacttttttttttttttttttttttttagagacagggtctcactgtcacccaggctggagtgcagtggtgcaatcatagctcactgcagccccaacccctgggctcaagagatcctcctgccttggcccccaaaggcactgggattacagatgtgagccacagcatacagccctgcccttgttctgaactagtgtgctatcaccaggacccgaggcaggtggatcatctgaggtcaggaggtcaggattcaagaccagcctggccaacatggagaaaccccatctctactaaaaatacaaaaattacccaggcatggtggcaggtgcctatagtcccagctactcaagaggctgaggcaggagaatggcttgaacccaggaggtggaggttgcagtgagccgagatcgtaccactgcactccagcctgggtgacagggtgatactctgtctcaaaaaaaaaaaaaaaaaaaaaaaaaggccacgagcggtggactgcctgaggtcaggagttcgtgaccagactgaccaacatggtgaaaccctgtctctactaaaaatacaaaaaaaattagccaggtgcggtggcatgcacctgtaatcccagctactcgggaggctaaggcaggggaattgcttgaaccagggaggtggaggtcgcagtgagccgagatggcgccactgcactccagcctgggcaacagagagagactctatcttaaaaaaaaaaaaaaaaattattctggtaggctcaggccccatgtggcctcttaccttggcactatactggttgagctctccactctcatggccagcgatgatgcactcccccaggggtccccaaacagcactggtgattttagagtcattgcaagggatcttcatgtagggctcattgttgtctgtgtggggcagtagatgttaggccctgggctcyagaactgtaccctttacctcaaccccagccctattcccagccctcaccaatctggctcggatcccgcaggtcaaaaaagctcacaaagcactggtagcccatctgcttgtccgtggagaacatgatgatgttgcccccaaagtcaaaaccgcaggtccggacagccgaattggtcttgagaagggccagctg

SEQ ID NO: 96095 - DNA, 156902 bp, Homo sapiens
  misc_feature (1)...(156902): n = A,T,C or G
agggtacgttggtgaagagtacaatggctactagtacatatcatatcactgccttgatttgtgataaagtgccaccagttttactaccactgcttttgcactattagtgcaaatgtcaacacagtaaaaaggcaaacaatttcttagtattattaaaatagtttttatttattttatatttatttatttattttgagatggagtctcactctgtcgcccaggctggagtgtagtagcgcaatttcggctcactgcaacctctgcctcctgggttcaagcgattctcctgcctcagcttcatgagtagctgggattacacacgcccgccaccatgcccagctaatttttgtatttttagtagagatggggcttcactatattggctaggctggtctcaaactcctgacctcaagtgayctgcctgcctcggcctcccaaagtgctgggattacaggtgtgagccaccactcctggcctatgaaaatagttttgacccaactagaaccctgaaaaagtctcaggaccctccagggacctgtggactatgctttgagaatcactgctctaggctcaatcagagttgaaattaccctctcctacagtagggttgcagtgtggtgtttggaaaatcccaggagacattgaatcacagcaacatgattcaactctaatttctgtctgacccgtggcaaattgttcctcaaagtctgaaaaccacagttactcctgtctgctagctggattgggagaccaaggagatgctgaagagattatgggctaattcacgcaaagtgcccactgaaatgagtgacatttagagttaagcagtattacccagtgttgggaagtctgcattttgggaggctgagggacccctgccttccaggggccctgcatgactttaggaagcctccaaccctcaatcagcattttcatctgtcttaggctatttcagagtccctgtgtagctggaataacattttcagctttgaagataggatggggagcaaggctgaaaggacagcaggaggaggaggagacggtcaggcgggtagaggacctcacatgagaaatagggcagcgagatgaagcgaggattggttccctctttccttgagtcagtgcacaaagctggggctttgtcttcagccaaagcacacaaggaacctgtgcactgctttggctttaaatggaatataaaacgttctcaaacccattaccttaaagaaccctaacatgcttcttttttctttttcttttctttctttcttttttttttttgagacagagtctcgctctgttgccaggctggagtgcagtggcgtgatctcggctcactgcaatctccacctcccaggctcaagcgattctcctgcctcagcctccagagtaactgggactacaggcgcgtgccaccacacccgactaatttttgtatttttagtagagacagggtttcatcatgttggccaggatggtctcgatctcctgacctcatgatccacccgcctctgcctcccaaagtgctgggattacaggcgtgagccacggagaccggccaacatgagttaagtaggttagtgattaccaccctagaaggcgatgaggaaactgacgcatagaaaagggaaaagagaagcagatatgaggaggcgacaagattcaaatttaagtctttagacacagaccagctttctattgagtctccttaggcccttcttcttgaggtgagttttcaaggccatgctgcagttttctctttcttatttataaataatttactaaagtctgtcttaaaggtaagcaagtgggcagcagtggtgatgaggtgtagtaatgaagttgacaagcatgaacttggagtcaaatcttctgggttcaaatcctgacctttacactttcttatgtgtaaaatggaggacagtaacaataccttcctatagtgttgttgtaaagattacattacctttaaattttattttattttatttatttctgagacagagtctcgctctgtcacccaggctggagtgcagaggcaccatcttggcttactgcaacctctgcctcccgggttcaagcaattttcctgagtaagcaattttcctccggagtagctgggattacaggcacctgccaccatgcctggctaatttttgtatttttagtagagatggggtttcaccatgttggccaggctggtctcgaactcctgacctcaggtgatctgcccgcctcggcctccccaagtgctgggattacaggtgtgagccaccgtgcccggcctaagattacattagatatacatgtaaagtgctcgtatagcgcccgccacaattgaaaggttcaatccagccagttgcagtggtgaatacctctagacccagtagggaagccgaggcaggagggttgctggagccggggagttggaagctgtagtgtgctgatatctggtcggtgaatagccactcactccaattcatgttagctattatgaaaatgagaaggtgcaaatagtgtgatttcatgggcatagagaaattcctcctatgtcccaaatactggttgaagattcaattgaagattatttagcccagattaaaaggcaaacacgatgacattccgtctaaaaagaggtcaaaattacaagccatctccttcgctctcccatggtgaattggggagctgtgggattggttgagtgtatgctgactgcctattggcagaactctttgccctgtgccttctcattggaagctaggtggcctatgggtgggctgtcctggagtcaggtgctagcttcagtccaatcagaggccaccaacctgtggcagttcgtcctatggcctttccctgagcagatgactggttaagggaatttccctgcgggggggcttaatggctgatgagaaccttggtttatcagacaatgggaaaaacaggttggaaagtcctttttttttttttcttaatttttaaagtttaaggctgggcgttgtggcttacccctgtaatcccagcactttgggaggcggaggcagatggatcgtttgaactcaggggtttgagaccagcctggggaacacggtgagacaccacccccaccccccgtctctatgagaaatacaaaagttagccaggtgtggtggagcacgcctgtagtcccagcttctcaagaggctgaggtgggaggatggctcgagccctgggaggtagaggttgcagtgagcagagatccagccactgcactccagcctggacaacagagtgagaccttgtctgaaaataaaataaaatataaaaataaaaagaggccgggcacggtggctcatgcctgtaatcccagcactttgggaggccgagactggtggatcacctgaggtcgggagttcgagaccagcctgaccaacatggagaaaccccgtccctactaaaaatacaaaaaattagccgggtgtggtggcgtatgcctgtaatcccagctactcgggaggctgaggcaggagagtcggttgaacccgggaggcagaggttgcagtgagccaagttcccgccattaccctccagcctgggcaacaagagtgaaactctgtctcaaaaataaaataaaataaaataaaataaaaaaactttaaatcattcatcaattttagtatttactgtttcttctcccattccattaagcctatagtcagtcatagaacagaaagggaaaatcagggcagccacatataaatacaggtgcaaagttgaggcaggagtggaccctcaagggccaagaagaggtcattgctgagcttcacatttagccctgggctttctggaagccagagtgaaaagagagacacaatcagatgcgtaacagttatcaaaaagcaggaagcacaccggtttttctggtagtaaagcaagggctttccaagcttttaactctaaagtaatttatttcgttctttcttttttctctctctgacacccagattggagtgcagtggcacaatcagggctcactgcaacctctgcctcccaggctcaagccattctcccacctcagcctctcaaatagctgggactacaggcgtgcaccaccacgcctggccagttttttggtattttttgtagagatgggatttcgccatgttgcctaggctggtctcgaactcctgagctcaagcaatccacctgcctcggcctcctaaagtgctgggatttcaggcatgagccactgcgcccggcctaaagtaatttcttacttgagattttatttcaggctactgtgtccatgcactgggcagtacagcctggtgggtaagacagcacagtattttttttttttttttgtctgctgggtttgaattttgttttaatacacgcaatttattctgtgcttcactttcttcatctgtaatatggagataatggcatctacctattaaagttgtgaagattcaattagatgagttgtatgaataaatgttagctgttagtttagtttcgtttttttgagacggagtcttgctctgtcgcccaggctggagtgcggtggcgcagtctcagctcactgcaacctccgcctcccgggttcaagttattctcctgcctcagcctcccaagtagctgggattacaggcgcccgccaccatgcccagctaacttttgtatttttagtagatccggggtttcaccaagttggccaggctggtatcgaacacctgagttcaggtgatccactcaccttggcctcccaaagtgctgggattacaggcgtgagcccccgcgcccagccagctgttagttaatcaagaaattcgactgcctactacttaacctgcacagttctaggtgctggggaaacagtgatgaacaagacaagatccttatcttcaagtagcttttacattttagtggagtaaaatgacagtaaacattgaaaataaatttcagaaagtgctgtggaaaaactttacaacagacgcaggaatagatttcatttgactagttctcccagtttccagaaaagtcaagggtagaatgttaaaaggcaactcagaggaggtgaatctgttagggcctacggtaatgcaatcctggtttgtggaattctgcaggctagtgtgggtaggttacaattttttgggggagttgttttttactttgtttgaaaactcacttcttcccgctgagcttttgattaggagctgaagttgaatcagtttgaaattgtattctggaccggatgcggtggttcatgcctgtaatcccagcgctttgggaggccgaggtgggtggattgcttcagcccaggagtttgagatcagcctggacaaaatggcagaaacctcatctctacaaaaaatacaaaatttagccgggcatgatgttgtgagtctgtagtctcagctactcaggaggctgaggtgtgaggatcgcttgagcccgggaggcagaggttgcagtgagccgagatgccactgcactccagcctgggcgacagagccagactctgtctcaaaaaaaaaaaaaaaaaaaaaaaaagaaaagaaaagaaaagaaattgtattctgaatacaacttctaaaacactatatttacttgcattatattaaactggttttatcctgaccacaattgcaggtggaagataccactattgttctatttttctggtaagtagagtgagccatgtcttgcccagggttacagagcttggaaaagacgcctcctaaaaatctgtaggaccacctttggttttcttccagatttttttttgtcatctcttttcctccacccatttcccatctgtctagccattcttgctccgctgggctttttcgcgagcctctccccagctgcagccccgcccatctcctggggcgtgaccacctgtccaggccccgcccccgtccaaccggcggagacccgccccctttcccggacaccgggctcagcgcccgagcgtgcgcgcgcgtcctcgctcgtcgcccggctcggcgtcgggagcgcgctctgtgtggccgctgccgccatgttgttgtggttgtgagaaggcggcggcggcggcggagtagcagccggacgagacgtcccagcggctcaggcgctgcccagcgccggccctggcagggagcctggtggggtggcggagggggagactgtgccgtggagggcctcgccatgtcctgctgcccggtaagaaccccatcccygtcctccgtctcctcggcgggtgaggaagagctggaggaggggccggcctcggccccggccctggccaggcggctgtcaccctctgaggaggcagcgccctgggagggctggggactgcgtgcggggcccggggaggggcgtccccggcggctgtcgccgccagggggaggcgctgggtgtgggagtgggaatgggagctcggcggccgagctcggcccggaccctagatgcgggggaggcggggtcccgggctcgggctgccttcccagacctggcggggatgggcccgtgcggctctgggtgtgggacgtaccctcggagcgcccggagttattcccacgaactcccgggaggtgggtgtgcgcccttcgccccctgccgggtctgtggcggtccatcgttgccggatactggaggtcaggggccatgggagccccggggcgaacggtgcgggcctgggccttgtggaaaggaggagtgaccgcccgatcgtgcagcagggcatccccctgacctggtagtacttaggtgggtaggatgattgggggcggttggcgtaactgagggaaccctggtcagactgctccgcaaatgattacagtgttatttctccggtagtaattttgcttgatgtatggcatttccggacccataagatgatactgtaggttgtattttggactggaaaacttatgtcaaaattatggggtagattttttggccacattaatagactcccctggaatttgataatctcacttgtgagttttggacatggactgctattacatattgrtgttcaaatgtcctttccagacccaggcctaaattcttactgttgtagtatcttgattctgacatctatttttccacaacccaaacaaacaaaacaaaacaaaacaaaacaaaaccccaaaaccatatacttttctagttaaggttcaactttctcatatgtgaatggtaatgccataagaggcctgggttgaattacaggagattattattatttttttcaatgtgaaatgtttgtgatttgtccatggagaggtggtggggaccttcccctttcagattcagggctgttcrgtaggacaggagacattgatggcatgcagaaagtcttccctttatagggcctatgacttgggtaggctagaagagcttacagaatgacactttttttttttttttttttttttttttttaagacagaatctctctctcccgcccaggccggagtgcagtagtgcgatctctgctcactgcaacctccgcctgccaggttctagcaatcctcccacctcagcctcccaagtagctgggattacaagtgtgcgccaccacggctggctaatttttgtatttttagtagagacggggatttcaccatgttggccaggctggcctggaactcttgacctcaagtgatccgcttgcgttggccttcgaaagtgttgggattataggcgtgagccactgccgccagccagaatgacactgttttgagtaaacccagtatagtatgtgatattaaattaaatttggaggattctagaattttagattggctgcctatgaatacctcttttggctccaattactccctcattttcaggtgactcagagaacttcaagtgaccagcacagtggtacagccccgcttgtcgttaatgaccagccataaaaaaccctgagtttctcagctcataggccaggttcttcagtggttgtctagtttaaggctggtcattagaaatattatggactacctaaattcctcgaactcatgcaggacctggtgaattaaaatctctgaggatagagcctggggatctgtccttacaaagctccgtgaatgattctggtcagcaaggcatgtgaacttttgctttaggttgggtattccaaagaagtcccattaattatgacttctcagggtgcttttgtttatagatctttaagaatttaagaggtggagaaggggaagcatgagaaacttaaagagatgcaaattgagcatctcttaaaatataatggatttatgtaggggaaacagatttgttgccaaaagttaatttgcaaacaagttattaggaacacacttgataaaattagatgctgattaattggagatatactgtatccagagatatattgaaggatccagaggaaataaacagagaaggagagggagtaagtcggcttctggctcataaaggggtccactgaagatgcttcccaccattatggttgctcctaaaccatctgactcagatttctagtggagggtaggatgggtgtgttagcaatcatttgakacccgggttgtgaaccaggaagggttactatgtattgtgaaaagttcttgagatttgccgcaggccrtgaggagtggtaaagtcagtttaaaaatctgctgtagttctagttaacacgttcacaccttcttcagtaaagtggaatgctgttaccaaaggaagtattcgtgttttagaggggggtgtggtgaaggttcttacaagtttggaagaggtggaagaaaatgttgttacaattgtgtagagtagtgaagggctttggtaaatatcctgtcaaatsatagagtagtatttttagagttgcacccagctgtccattagaagagccagaggccttgtctgttttgttccctggtgtccccagtatccagcgcagttatccgcatattctgtgccctcagatattttttaattaagtgaatactattgatatgggaaaaagaacagttatggtggtttatagcagtgttagttattaaaagctacctgatattttgcaatggattaaagagccaatttttgatcaaatagggctctgggtaggaaagaaaatgaaaatgaagagccagctttcagtgcttattgtttggaatttttgagattcctttaagaaattgttttctaaagactgtcatgaacattatcgagtcccctagtttttgagtcttaatgaatcttaagtgtttcagatgttagttacttttttaagagcacagtaagtgcaaaggtagtatagaatagtgggaagttctggattgacagacatatattctgattccatctgtgtcatttattgctgttgggaatgtcacttaacttctctgggcgtcagttttctcatatatacaattaagggcctatagtctttgacctcaagtagtttctctagcctgattctgcaaatttttaatcatttctaattatgttatttggtattcatctcatataggtagatgaacttttattatttaaaagaaacaagattctgtgttgggttctgcttttagcttatggattttagacattgtccaaaagtgcttccgatgttgaatgtatgttgcaagtgttatgtagaaagaacatgcttatgctgttgtaattggcttagtgwtgaaatcaaattgggttttacattgggaacttcataatttagtgtgaagtcatgagacttgagaatgrtttggggggagtttgtgcaatttatatagctagctgtttcttaccacctaattctgtaattttctatgatgaatatatagataaatttataatcagtgtaacattgatttaagttataagatgatatcagattcatactggattgaactagaactcccagtaactttagaggctaccaaattattaacatgtcattgctatwtttaatcttaattttgtgatatcaatactgatatgctttcatctttgcttttgtatctagaaacaatataccttttaagttcatatttgtatcagatattaaaaatgaaaattgtagcatgaaagtgggtagatagtaaatcttgggttcaagcctgggttgttattcttcattacccatgttgtttctggcaagctacataacccccctgagctccagttccctcattagtgaaaggaagaagagcaacttttctacttttctaacagactgtggatcaaacaatagtgtatatgaaaagcattctaaaaatgtaaggggctggtattagaatcgtattgtattagaatcctattttatgtctttgaagaattggcttgtggagcagtggtaaacctagtctgtattgtcaagtgcagaatttaccaatatcactgatatggcaacagagaaggtttctgcttctgtactctggctggagaaacctttcagcacatgtatcctgtctgccagtcggaatagtcacaatgttgcagggacttcagaggaacctgggatgtctcacatttatgccaaggtctctacttggaatagacttggctagatttcacccattttcttatgttggagcagtggtagaaggtggtaggagcaaggagttcagcacattctgtgtaaagttctaaggctgtgtttttaagtagcaggtggcagtgtcatagggtaatgaaatcaatgtacttatttaaaaaagcattttcagaaagagaatatatcagtacattgcataaagtaaaagtaaatatagacacagaggtattgtcttgatgctgatagctgcagatattcagaatgattctgttacaacagatggtagcaagcttttctgatttcacttatctggggtctaaatctaatttctttagtagttaatactgttttgttttgtttttttttttggacacagaatcttgctctgtttgcccaggctagagtgcagtggcacgatctcggctcactgtaacctctgcctcccgggttcaagatttgggaaacttttgtttctttttaaaagatatttttatgtatgtatacttggttgccgtgtaaaatgtattttttctttttaaaaattataattttcattttttgtagagacagggttttgctacgttgcccaggctggtcttgaactcctgggctcaaaggtagtcctcctgctttggcctcccaaagtgctgggattgtagacatgagccactgtgcctggcctaaaaggttgtttttttcttttgggttgtgataaaactttgtcgtcgttgtttggggacatagtacttgggcaatgtggatagaatgactgtctataaaatartaaggcatgaaactaacgaaaacaaaaagaaaattgtgaaggtgggttaccttaaagctattctgttagtggtgaaatacctcatagctatgttctgaactgttgatttaatgaacaaagcacatgaacttatgctgtaataatattcttaagtactcttttcccttaacatggagtatggagtactttaaccacagaggtattgtcttgatgctgataactacggatattcagaatgattctgttrtgacagatgatagcaagcttttctgatttcacttacctggggtcgaaatctaatttctttattagttaatacttttttttttttttttttttttttgagacagagtctcgctctgttgcccaggctggagtgcagtggcgcgatctcggctcactgtaacctccgcctcctgggttcaagtgattctccctgcctcagcctccccaagtcgttaatacttttataacttagttgcagaagagaaatataaatttatttagttttcagaattattcatagatttataatctggcaaaatataaggaaattataagtatattgataaatcatgacataactggcaagaattggtatraagacaagatggttataacttgaaatagggttgttatttattctatgcctatcatttttccatgagataaaccaaatatttaattgtttagactgattccacaaatgacatgggaaggcagagtgtttataaagagttttggaagtgatataggacactataatttggagttttaacttaatcttattttaaatttcaaaatgaaattatttctggttatgaaagctacggaacttttttttttttttttttttttagatggcgtctcgctctgtcactcaggctggaatgcagtggtgtgatctcagctcactgcaacctcagcctcctggttctagcaattctgctgccttagcctcctgagtagttgggattacaggtacctgccaccacgcctggctaatttttgtatttttagtagagacagggtttcaccatgttggccaggctggtttygaactcctgacctcaggtgatccgcctgccttcgcctcccaaagtggtgggattacaggcgtgagccactgcacctggcccagaacagttttagtgttttttwaaaaaaaaagtagagatgacctgtaatcccatctggatgtaatgtttggtatttttgttttttttcttatacatatctattgaaataattttaaaaagaacaactttccctgtaaaattgatattcccttaatgagcatttagtgtttataatatggatgcatcatagtttatagcagttctgtgttattaatggatattgtcaatttttctcttaaagcagtactgtgatgaactcgtttggacattgaattgcattgaattgttctattattttattatttccttaggataaattcttttttttttttttttttgagacagagtctcactttgtcgcccaggctggagtgcggtggtgcgatctaggctcactgcagcctctgcctcccgggttcaagcgattctcctgcctcagcctcctgagtagctgggcgtacaggcgcatgccaccacgcccggctaattttttgtatttttagtagagacagggtttcaccatgttgaccaggatggcctcgatctcctgacctcatgatccacctgcctccgcctcccaaagtgctgggattacaggcctgagccactgcacctggcccaggataaattcttaaaagtgggtttattacctgggcgtggtggctcatgcatgtaatcccagcactttgggaggccaaggcgggtggatcacctgaggtcagcagttcaagaccaggctggccaacatggtaaaaccccgtctctactaaaaatacaaaaatcagtcgggtgtggtggcgggcctctgtaattccagctacttggaaggctgaggcacagagaatcacttgaacccaggaggcagaggttgcagtgagccgagattaagctgctgcactctagcctgggccacagagtgagactcagtctcaaaagaaaaaaaaaagtgggattattaggtcaaacggtacgtgtgttttaaatttagatatactcaagatgccctttagataggatgtctatttcaaattcccatcaacagtgtattagtattcaattccatatattcttgctagtgatttgtcatctttagcttgttgggagtttaaagtagtttgaaacagttttctgtttctttttcagcatcaggacttacttccatagcttaactcttcggagggagctgataaaaatgaaagatcagtgacaagggagtggtgtagaccagtggtcttcaaactttttggttgcttaccccatcactaaaaaattttgagcattaagcaggtgcggtacatggttctgtggtcccatctacttagttggctgaggcaggagaatgtttgaggccaggagttcaaggctaaagttcactgtgattgtgcttatgaatatagccgctgtactctagcctggacaacatagcgagaccatctctttagaaaaaaaaaaaagatgagatgggaagaatgaagtcagaaaaaaaaaattgataggacttcgtgttgttgctttgagaaaagagaaaaagaaaaaaattgagcatcaattcttaatccttagatatttgatttacaaataatatatgtatagtaactgattattgtggactttataaaatacgaacaaaaaatcaacaaggatgataattaaaaataaagttcagatattttccttttttaccctggggtgtcttggttactcctggaggtatgcgtgtgcgtgtgtgtatgtatgtatgtgtgtgtgtgtatatatttaatatatatgtgtatacattgtatatgtgtatacataatatataatatatatgtgtatatataacwtatatatatgtgtatgtataatatgtatatattttttagacaagagtctttttctgttaccgaggctggtgtgcagtggtgcgatcttggctcactgcaacctctgcctcctgggttgaagtgattcttgcgcctcagccacttgagtagttgggattacaggtgtgtgccaccatgcctggctaatttttgtattttttactagagacgggattttgccatgttggccaggctgatctggaactcctggcttcaagtgaattgcctgccttggcctcccaaagtgctggtattacaggtgtgagccaccgtgcatatgttatacttgctttggatactactgctttagactcttaaggtttaatattgagcatttatagatgcttgtttttgggcatttcactagttttgctggtccagtttagttggatcatgaatacctttaaaatgtcccatgctaggctgggcgcggtggctcaggcctgtaatcctagcactttgggaggccaaggcagacggatcatgaggtcaggagatcgagaccatcctggctaacaccgtgaaacccgcctctactaaaaatacaaaaaattagcccagcgtggtggcacgcgcctgtagttccagctacttgggaggctgaggaaggataatctcttgaacccaggaggcggaggttgcagtgagctgagattgtgccactgcactgcagcctgggtgacagagcgagactccatctcaaaaaaaaaaaaatgtcccatgctcttgagagtcgtatctgcaataagggtaaaaataaatttaaaacatcagttcaatactttttgcattgttgaggtggctgaatttgaaaaggacaaatagtaggataagaagcaatgtaagtactctatttcttctagatatgaagaattaatattttgtagaacatattttaaaaaattatgttttttggaaagccgtttggctgtaatatgtatctccctgttttttaagagttaggtcctagagactgagtgaaggtatgaataattgctacttgctctcctttgctttcaaagtaccacaattaacctgtcactaactctgtttggattagcctgagcctataacaaactttccatgatgattcttagattaaaagataatttttttcttgagttagaataagttgcttttgatctgtggctgcctgccccccaacccctataaattatgacatcrggaaacaaggctttttgtattagaaaaaaatggggaaattaatttcagttatttcatgtgggtcattggcagagaaagataatactaaaatcttagagactgtgaaaagagattatattaagcaacttgagtgattacttttttgccagttaaaagaaatgagataatttatattgaagatgattgctatatacagtgctttrcacaaaaggccacatatctctttttaccttaggtaacatgatgtataagctactttcacatatatcttcttaggtcatcacaaggatttgagatcatcatttaatcaggactgttgtgacttgcttgagaccacatgcctagtgtttgacatcatatttcaagaggtagactgaaagttctgcagaaatagggactggtggctgttctctcccttactccctagcagttaatacattgcctggtacagagtaagctgtcaatatttgtggactatttaaactcctgcatatttatttacacatgtaaataagttatagcattgtaaaaccaacaggtatattttccgtagtgagattgttccttcatcttatgtgcacagaaaatattttcgtggaagaggtcttgaattttagatcaacctttcacatatccctttactttctcttaagatactttcatggtgacaaaaaaaatactcttaatgtcattcctttcactgtgtgtgtaactcctgtggcaagactgtatatttgtatgtatgtatttgtttatttagtaggctgctatttataaaggaaacatactcattagttggtctttgcgtacataatggttcccaaaacatggactccatggtttgctgtgagtgaatgaaaaagagcaggtatgattcccctcacctttgtcattctctccagtttcttgtacatatggttgacttactcagcagtaagtgtaactttacaatgaagaaaattagtcttccaaagaactagtatgctacttcccgcttgttctgcagtatttaaaatcctgtttggtaaatgaactaagacacttatatatagaagagaccctggatggccatgaatggaaatattagtagtgattaatttctgtcttggtgggataatgtggcttttttgcttcttattcttttagagtttcccatttttctacaacgagcatgtattacttttatacgtaggmaaaactgctattttattttattttttattttttaagacggagtctcactctgtcacccaggctggagtgcagtggcgtgatctcagctcactgcaacctccacctcttgggttcaagccattctcgtgtctcagcctcccaagtagctgagactacaggcagaagccaccacagccagctgattttttgtattttttagagatgggatttcgccatgttggccaggctggtcttgaactcctgaccgcaggtgacccgcccatcttgaccttccaaagtgctgggattacaggtgtgagccaccacgctcagccaaaaactgctattttaaagtctttatttttcactggatgtcttctgaaggtttatgtcgcactcaccattgagaaagtgggtggttaactggctccagttcctaagaggagtggcagcggtaggaagtagtatgggaggagtggggcaggtaagctgatttgaactttatcattgtgaactccactatgactaaagacattctgggatttgatcacaattaaacccaagaggactgagccatctagtttttttcttcttaataagctgattgagaattataaaagacaccttaagaaaaatcagtttctatgcactctgtaaacacagaactcagcccgaactcccaagttctgtatccgtgtgtgtgtgtgtgtgtgtgtgtgtgtgtgtgttgtggtatgttttaaatatcaaatggagttgtggcaactcagatgggatatggtttatattaatacatctaatatgaattggaagatgcttaggcaaacgatttttrttatgacagtataggcttattggagttttggtgttaatatacagctgggagttgagccgttctaagtttatatagccatctggtgatattttaggaagagctgtgtcacatatcctctagagtttaagtgattagagcttgttggcttttgctgttagtttactgcacacttgtagtgttttaaatgcttctgtgaatggataacataattcaaaaaggttagatttctgggttaagacatttgttattatcggcccttactttrttcttttaaagagtaagattaggctggatgcagtggctcgtgcctataataccagcactttgggaggccaaggtgggcaggtgaggtcaggagtttgagaccagcctggccaacatggcaaaaccccatctctactaaaaatacaaaaattaacggggcgcggtggtgggcatctgtaatcccagctactcaggaggctgaggcaggagaatcacttgaacctgggaggtggaggttgcagtgagctgagatcgtgccactgcactccagcctggttgacagagggagactccatctcaaaaaaaaaagttgaagagcagttgaaataataaatgtaggtactgttaggtgggtgcaaaattaattgtggttttggattgtgaattttaaatcattgtaactaggcccaaacagatcttcatttatcaaaataggaactgttacaatcaacacatttttaccgatgagaaataagtttgtttatacctgtagtrtaaaaatccatgctttgagattcgatgaactcttggaaagcattttctgcatmctgctggttgtggaagcattttccctgcaaaaaattttctagatgtttggaaaagtggtagtcggttggcgagtggttagttgaatatggtggatgaggcaaaacttcgtagcccaattcaacttttgaaatgttggttgtgcaacgtgttgtcgggtggttgtggagaagaattggaccctttctgtggaccagtgctggctgcaggcattgcagttttcagtgcatctcatcgatttgctgagcatacttctcagatgtattggttttactgggattcagaaagctgtagtggatcagaccaggagcagaccgccaaacagtgaccatgaccactttttggtgcaagttcggctttgggaagtgctttggagtgtcttctcggtccagccacttagctggtcatcactgttgttgtataaaatccactttttgtcgcacatcacaatccaaccaagaaatggttcgtcgtcgttacgtagaataagagaagacaacatttcaaatcgacaatttttaaaattttcggtcagctcatgaggcacccacttatcaagctttttcaccttttggctgggcgtggtagcccacgcctgtattcccagcactttgggaggcggaggtgggcagatcacttgaggccaggagttcaagaccagcctggccaacgtggtgaaaccccatgtctactaaaaatacaaaaattagttgggcatggtggcgggcatgtgtaatcccagcaactagggaggctgaggcacgagaatcgcttgaacacaggaagtagaggttgcagtgagcccagatcacaccactgcactccagcctaggtgatagagtgagactccatctcaaaaacaaacaaacaaaaaaaactttttcacctttccagttggcttcaattgcctgccaaacaagggtagaatggtcgacattgagttcttcggcaatttctcgtgtagttgtaagaggatcagcttcgatgattgctctcagttggtcattgccaacttctggccggccactacactcctcatcttcaaggctctcgtctcctttgcaacacttcttgaaccaccactgcacagtttctgggccagatgtgtagttgatgttgtgagttgtctccactgcttcacgacccattttgaactcaagaaaatcacttgaatttgctttttgtctaacataatttccatagtctaaaaaaaaagcaaaaaatacgttattagcaagaaaaggcaagaaatgtgcattaaaatgatgtataacataaccgtttatttaagagtgtattccagtattaaatggcaaatttcaacagtgcaaaaactgcaattacatttgcaccaaactaataatataatttttttttagttaaaaattttatagtacagaataacaggcttgtctcacacacacacacacacacacacacacacacacacacacacacacacatacacacacacaaatcccatatagaatctacaaagcctgtctgtctctgaattccacaaccttggcttatttttttaaagtaaaatttaaatatttaaaaaatttagaaaaatatggagaataagttaacaaacaccatgtactaattcagtagattttttttctttttctttttcttttttttcttttttttttgagttggagtctcgctctgtcgccaggctggagtgcagtggtggaattggctcactgtaacctctgcctcctgggttcaagcgattctctacctcagcttcccgagtagctgggactacaggtgcacgccaccatgcccagctaatttttgtatttttagtagagacagggtttcaccatgttggccaggatggtcttgatctcttgaccttgtgattggcctgccttggcctcccaaagtgctgggattacaggcgtaagccaccatgtccagcccattcagtagatttaatagatgctgacatcttgtcagatttgcttcaaaggtgtatttaagtatgtttttatttatttatttatttatttatttttgagacgggctctcactctgttgcccatactgatgtgcagtggcrcaatctctgctcactgcaccctccatctcccaggttcaagtgattcttgtgcctcrgccttttgagtagctgggattacaggagctcgtcaccatgccmggctaattttcttatttttagtagagacagggtttcactatgttggccaggctggttttgaactggcctcaagtgatctgcccatcttggccccccaaagggctgggattacaggggtgagccactgtgcctggcctgtatttgcttttaaaaattaaaatatgcatacggttggagtcccttttgtcatcctcttagatcgtattttcgtatgcagaagttatttatctttttagctcatgcacttatattcttcctacaaatatctatatatattttatgtagtattgggtttcaaatttatgtgatattttagtacatactttctataatttgaaaaatgacatgttgatatatgtgtattattattattattttttgaaacacaatcttgctctgtcacccaggctgtagtacagaggcacaatcttggctcactgcaacttccgtctcccaggttcaagtgattctcgagcctcagcctctcgagtagctgggattacaagtgtgagccactgcacttgccttacttcattaattttaatagctgtatagtattcagtcatatgartgaatagtacacaattttagtcctttattgatagttgttttcaacaaatatacaaaggtaaactttttcctcaaattgggtcaagctatatatattgttctaaattagctctttttctcccaataataatagtgtgcaggtttgttacatgggtatattgcatgaggtttggggtacaattgatcacatcacccaggtggtaagcatagcacccactayatagttataagttttttgagacagggtaggtctctgtccctcaggctggagtgcaatgttgcgatcactggtcacggcagttttgaccgctcgggctcagtccatcctcccagcttagcctcctgggtagccgagactacagtgttgggccaccattccctgctaatttttgtattttttgtagagactgggttttgtcctgttacccaggctgcctcgaactcctggactcaagcagtccacccacctcagcctcccaaagtgctggtattataggcgtgagccaccgtacccagctcctagtaggtagttttgaaccttcacgccttcccatcctctcctctctgttagttccctgaatcccatgtttacttccatgtttacccaatgtttagtttagaatgatgatctccagctgcatcatgttgctgcaaaggacatgattttattcttttttatggctgcagcgaacctttgggtaaagaaaatttacaaaaatttctcacatctttttttttttttttaatgaaagtaagtagtagtaatccatagttcagatctactttataagtgagtcactgataaagacagtagttacacattttataacattaccttgatgggacaaatttttcttgttttgtttttgttttacttgagttaatttggatgagactttcttgaattacttacatttatagcatttacctccagtggggttgagatgaggagccttcartccaacaaagttgtatacatgcattcatggagatgacacttaggctatttaatcaggaaacactcatacttgtccacatgtagatagtcctattctttggaaattttgctatgttgcccctgctggtcttgaactcctgagctccagtgatcctcccaccttggcctcccagagtgctgggattatagacgtgagccattgtgcccagccagaaatatgattttaattccatagtatatagtatatgttattgtgagtagaatatgtttattctgtaagtagcaaattgactccttcaacagttttaatagttttctagttgttttgtctttagtttcccaggcaaataatgctgttgtcttcaatcacagtattgattagttcatcccattcttcatattgatcattgtttttggatattaaataatastactgtaataattaagaaagatggaaagcctcaccaatttgcatgtyattcttgtgcagggaccacgctaatcttctctgtattgttccaattttagtatatgtgctgctgaagcgagcactccatttctgtaaagcttaaaaaatggacaaaactaacagatgggaatggaaatcagaataatggttatctttggtggtgaggacaggggagattgtaggtatgctgctaatgttctgtgtcttgatctggatcttgatttcatggwtgtgttcagtttatgagaatcatcgagtagtagacttaggaaaggtgcacttctttgtatgtatattatacctcagttaaaaacttttgcctcgcaaaattttaaagaacgtaatctgctgagttcgtcgtcttttagcttttgatgtaacttttccactacttctcttcatatgtgaatacacttaatgataagccatttaacctttttattatgatataaaacaaacatacagaagagtgcacaaatcaaatgtatagcttaatgaaattttaaaattattaaattggaggttttttggggtacattatacctgtgtctttgttaggagggaaggagttgatggagggctaaaaattctggagaggacaaagttttaaggaatctcagaacaccaaaacctcatcttggctctgccttcacattattgtttctttgggtaagtcatttaacttatttagacttcacttttttttgtataagtggtataatacttaacgtttcttttgcaaactgaattaggtaggtgaaattcacgtaaaataataggaatatagagtactgttgctaaataggtctttatttaggccattgaatttaggccacttaccttacagagcagaattgtgggatacaaagactacacagctggtgattattgatatcattcatttatattaggttagtattgaggcttagttaactatgccaggcactaccctgtgatttattataatacatgtrttaactcatttaatagtctaggattattcccagaggtaggtaaaattatcccaattttactgatgagacaattgaggcaaaattakgttaaataatttgcctaggtgggttgagttcttgagcctgtgctttaaaaaaaattttttttgagaaagggtctcactctgtcacccagggtggagtgagtggcgtgatcttggctcactgcagcctctgccttcaaggctcaagtcatactcctgcctcatccccctaagtagctgggactacaggtgtgtgccaccacacctggctaatttttttgtgtattttatagagatggggttttgccactggactcaagtggtttgccttggcctcccaaaatgctgggattacaggtgtgagccactgcgtccggcctaagcctgtgctctttttttgttatactgcctagttatgtgaaaatacgtaaagacttttaggcaaatgttaagattttataataatctgttagagagtttttgaagtaaaaattttggtattttgaaccaaaattaggagaagagtctcatttgttttgaccatgatgattctggaaaagattgatgttaatatttattacttgggctttattcccttaattttctcctaaaatgactaggatgtaagcactaggtagttttctttaagaatatatatatatattttaatattaaaggattttgtgactaatttacaaatattgtttaatttttaggcgaaatgttaatggaagggagttttcaaacttggaggcagatgagaccaaagtttagtgttcttgcttcggtggtttaagcagcatctatttggtcttggtattagagcaataattaagactctatcatatgtatggttgaaaattatttttattaaggtatgtttgagtatggttctgtgaggttgggaaacacatgtagttttgcaagcaccatgatcaagatacagagtagttcctcaaaaaatttcctcatgmccctttctatagtcagcccatttcctcacctctagtctctggcaaccactgatctgttttttctctgttgtattgtctttttttcagaatttccatgtaaacaaaatcatgcagtatttagcctttttgttttaatttttgtttgtttgatagaaatgggaggtcttgttatattgcctatgctggccgcaagctcctggtctcaagggatcctcctgcttgactcagtatgtgacttcttgagactgacatcttttatttaacctaatgtattttgagattcatccatgtttttatgtatcagtaattactttctgttgtttaggagcattccattgtatggatgtacaacaacttgtgtgttcattccccagttcatttgggttgtttccagtttttggtaattacraataaaagtgccataaaagcattgatgcatgcatacatacrcatgtgcccatgtattttttttatggtttaaaaaaatatggtgcctagaacttttataactttattagagaacctgaaaaagctggtgattttcacagaacattataaattgcttggtaaactaccctaaaaaagcccactctggaatgagaagaatctgtttgtrtaaataatcttataatataaactgtaagtcattagaatttttttaaattaaagaagtacacacacatacttgttaaatgggtaaatttatatataaaactccttagtgcataatttcatattttatgtttttagtagcttttaaattgtcaatcattgacttttttgttcctctaagtagtagaatggttatataattggttatgaaagtttttttttttttttttttgagacggagtctcgctctgtcgcccaggctggagtgyagtggcgcgatctcctgtctcagcctcctgagtacctgggactacaggcgcccaccaccacgcctggctaatttttttgtatttttagtagagatggggtttcacgatattggccaggctggtcttgaactcctgaccttgtgatccgcctgtcttggcctcccaaagtgctgggattacaggcgtgagtcaccgtgcctggctggttatgaaagtttataagtaaaaaataactgggaaaaattttagcactacagaattcctttttcttctcctctcctcccctctcctcccccaagatggctggaggtattaatattgataagcagagtttcatgtgaataagacataaaacttaggttgattacctatgttaataaattatcttctttgttcctatgtagtgagctttctttttgcagcaatctgaggccaagagaaatagatgagacctttttaccttagaaaagagattgcaggctggatgtggtggctcacgcctggaatcctagcactttgggaggccgaggagggcagatcacttgaggtcaggagttcgaggccaccgcctaggcaacatggtgaaatcttgtctctactaaaaacacaaaaattatctgggcgtaatggcatgtgccttgtaatcccagctacttggagggtgaggcatgagaatcacttgaacccaggaggcggaggctgtagtgagccaagattgtgccagtccactccagcttgggtgacagaatgagactccatctcaaaaaaataaaataaaaataaaaaagaaaagagtttgcaggccatttttgcaagttaattttttgaggttccagttccaaccctgagtcagactacagaggccataggtggtttgacgtttcagagaatagcagtgtttttgattttctttttttctttttctttctttttttttttttttttttgagacagggtcttactgtcatccaggctggagtgcagtggtgcagtcatggctcactgcagcctcaacctcctgggctcaggtgatcctcccaacttagcctcccgggtgctgggactgtaggaacatgccaacatgcctggctaatttttgtggttttttttgcatgtacgtagagatggggttgcgtcatgttgcccatcttgaaytcctgggctcgagagatccgcctgcctcagcctcccaatgtgctgggatcacaggtgtgagccaccttgcccagccatttcttttgtgtagtatggaatcttagtttaagccctcagtttaaatgtattatataattgaggtgctagrtgtacagaggtactagaactacagagcttttctcattaatgtaygttccttctgatgttgaatatttagaaaactgaatattgtgtttggagccaagggatattacacttgaaatatggtcatttggtgaacaggtatctcatttgtaggctatcattatttttggtgaacaggtatctcatatgtaggctatcattaattttggcagtttcacattaaaatacctgcctggaaatacctgcccagttttgccagtaatgggaattgcaggttaaccgttggtcttctatatgtggctctatgatgtggacaagacttatagctctttactttaactgagacaacaatgttggtgatcsaagtctagaattccaggatagggttgccaaaattaacaccgtgggagtatggaggtagcaactgtgggattagtaatacaaatacaattttaattagctttatcagttgcacacttaatcttcattgctaccttgtgaagtaggcacggcaggctgtatattgttacttctactttacaagtaagtaaattgtgtttcatagctgtcaggacttacctgaggttgcactgctagtgagtagctgaaatagtacttgagtccagacatcaggttggatgctgtttccacttttgcagttyactgtcgtgaataagagctcaggcttgggtttgaattgtggttctaccacttacctgtctgtgatcttggggaagttctttaacttctctgagtctcaggtttaaaatgrggctaacaataatacctcttagggctcttgtgagatttcagcaagtgcttataatatyagataascaatagtaagcactcagtatttgctaattgtggttgtttctactgttattaaagtgataacaacactacagttacacatcctctttcccctaaggatctgtgttaagagttgaaagacaataaatgtaagaagcaaaaatattcaaagatgatagaataagtagcaaggggagttgattttagcaggaagatggacaatgttcagaggggtatgtgtgtgtgttgtgtgtgtgtgtcttggttttaaacatggtagcagttagacaatgaagttacaagtgtgttagacagttggagctttaggacagggttgagtaggaggaccagtgttggaggaaaactttttaatcaccatcacagatggcatatggaaatttacatttctaccaagatttaaacataccaatttgctatcctctgttatggttcttagagctattgttacatcagaatggagtaagaagcttatcatacatttttcatttttagtggttatacagagaacaatacagaaagtcagcatatatcctactacagtttatccttggtatacttgggggatgggttccaggacccccacatacaccaacatctgggcatacttaagtcccccagatgcccctgtggaacctgcctatatgaaaagctagcccttggcctgctgtatatataggtttcacatcccgagaatactttttccatccacatttggttaaaagaaatccgcacatgagtggacctgtgcagttcaaacccctgttgttcgaaggacaactgtgtaaataaaagggtggtccctctccttaaaatttcatagttgatacttgtatcatagttgatatatagtagttgatactatgaaaatttcatagttgataaagtttcatagttgagcccttttaccatgtgtgtaagtcttaagggctagggaattcagaagtataagttacagggttgtatcttttggtgcttgagtcctttcctttggataaggtacttccttgatgtaaggtaatgttctttcaagcattttaaattaaatgaagttgtttgaatttacttgttggggaatatcttgcctttaatataatagctgctatgtggaattatgtattttatgtattcggtgtttttgaacttgcatcttttattactgtatttttacagctttccccatttttgatattaaaacaattttatggggttttggtgcatattttaaatttgtgcactaaacacttgcaaaagcatattttaaattatggcaagtttcctaaacctgttaaccttttatatattagctgttacatattaacttttttcaaagtcattatatatccttctactgacaaatgtcaaacaagttctgagcatctgaaagtctagattcatccagagtttgctcaggatggcattttttttgtttttcttttgaggtggggttctcattgtgttttctacgctggcctttaactccttggatcaagcagtcctcctgtgtcagcctgccaggtaaccgggactaggtgtgtaccactgtgccaggcttgttttcaaagttcataggaaaaactttggtgtcttctaaagagaccagtactgtacacaaatatatttgtctcacatttatccatccatccgtctgtctgtctgtctgtctgtctgtctgtctgtctgtctgtctatctatctatctatctatctatctatctatctatctatctatctgtctatctatctatctatgacggagtcttgctttgttgcccaggctggagtgcagtggtgcgatcttggctcactgcaatctcctcccgggttcaagcaattctcctgcctcagcctccctagtagctgggattacaggcgtgtgccaccatacctggctaattttttttttttgtatttttaatagagacggagtttcaccatgttggccaggctggtctccaactcctgacctcaagtgttccatctccctcggcctcccgaagtgctgggattatagggatgaaccaccgtgcctggcctgtctcactttttataccccgaaagcattattactatccattactttattcagagctaggagctttttcattcctgtactgtggaactacttgagttgccctatatctactccccctttccccattctgaacattgtttcaccttataaaaattaaaaatttggctggtgtggtggctcatgcctgtatcccagcactttgggagacagaggcagatggatcacttgaggccaggagttcgagaccagcctggccaacatggtgaaaccccgtctctactaaaaacacaaaaattagccgggcatggtggcgtgcatctgtaatcccagctactcgggaggccgaggcaggagaattgcttaaaccaggagacggaggttgcagtgagctgagattgcgccactgcactccagcccaggtgacagagtgagactcggtctcaaacaaacaaaatccaaaaacatcctaaaaattacaaaatttggccaggcgtgatgggtcacacctgtaatcccagcactttgggaggccaaggcgggtggatcacgaggtcaggagatcgagaccatcctggctaacagaatgaaaccccgtccctactaaaaaaatacaaaaaattagccgggcgtcgtcgtgggcgcctgtagtcccagctacttgggaggctgaggcaggagaatggtgtgaacccgggaggcagagcttgcagtgagccgagatagcaccactgcactccagctgggtgacagagcaagactctgtcttaaaaaaaaaaattacaaacttttttattgatgggttcctctaaaacccattactaaagctacttactaaagagtagatgttttcccccttcaccgatagttgatggaccgtcagagaatccttgagtatctcaagcttttacttaacttcagagttcttacctgagacagaaaagttgagttttctttcctcaagggcataaaraattttaaatgtacccatttgcataaaatctactcaaagaaaattatcaagtgattttacaggatatttttggatgcttgcacataagagaatcttttaacaaaactgcttaacctcctttgtattattcattccctctcttactaaaacaagtgaatggcttgcttggatgtgtatctgtatctttttttttgatacacactttgaaggagtcttctgaaatgcagtgttttggccaccattccagctctacaggaatatggtttcatgataaagccaacaaagagcacactggcagcagtccagcagctgactcaccaaggagtaatgatagacactttgaaaggagtgacctgtctcaggatctcacatttcaaagcttcgtgctatgattacattggtagaaggcagccaagaaatctagatgagatcttgcttgtacctcctaagagtaatggtatataggtaggaaggacttccacagtcggatgcaagtaagattttttttcctaacaaccttgtaaaacctgggggtgggaaacaagttgaggattcagaatgggagtaaccgtggtggaagctttccttctacggacctggatgagaacagccttatagtgactgagggtaactcaagaagytcaatgccatattagttttctagagctaagggaatatacatagtttagtagtaagcacaagtatcgtgttcatgtcagacactgtagctactgcttcctactagaacagaccagaagaaaccaaagcaagaccagaatcatttcagttttgaggaacagaccctttccttactagcattgcacactttaggagtaaaaatagaatgaaagtggatttgcttcagtactctgaaatagttaactgttgattgttttggtggattagagtgattgcagctctgtttctaaattgaatttcatggctatacgttgttctaggtggcaaattaatcttttatcagtaccacaaattgattgttggccctttgcggaaatagcaggaatatgtctttttcattttgttgaakggtagctcagagataaaacatttacataatctgaaaatatttttcagagataagactaagtgactgtgtataccacagtgatagattgatccactttgattattgtagaactttctatttctcagtaaaaagtgctaaacatggtaaaattatgaaggattgcttttagctatttgctgtattctttaaagcatatttaggaataaaaagttaatttccaaagtgctgtcatttatttaatacatgttttctccagaatgtgcttcccaaaagttaagagtgcttttatttatttaagaaatatgttaatttttcttttcttttcttttctttttttttttttttgagacaaattctcactctgttgcccaggctggagtgcagtggcacagtctactgcagcctcgaccttccaggctcccacgaccttcccaggcccaagccatcctcccaatttagcctccaccatgctcagctgagtttttatttcttgtagagactgagtattgccgtattgcccagactagtctcaaactcctgggcttactgtgcctggcccacaagaaatatgttactttttttgagatttttgtataatttgagaacacagattatttgccctactcccccaacccccagtgatacagacctggtttcattgcactgagagaaaaaaattagtttcttaatttacgttgcgtttctgcctttttgagattgagtgctttgacttttctcttgtttttgtatttgctgtatatgtgttgttcctacttaatttcttatatggtttaaacttgcatctgtaaattatttattagctagctttatgacttgggcaagttaccttatctctctgctccttagtttccctctttataaaatgaggataataatattacctactttgtagagttgagtaagattaatgactaataaatggtgaagcacttaaaagagggctctatacatgttggctgttaaaattataagcgaggacctggacttctcccctccattaattgtaactcttcatttttataattttttcataaatagtatgtctctcagcatataacagaactttgtattaaggaataataaatatcaccatgtatgtaattctttattataaacataaatttgcttcttgttaaaaacagagtatcattttcttgcctcagatcgagcttgaaagaaattagtagaaagtgggcccttttggccgggtgcggtggctcacgcctgtaatcccagcactttgggaggccgaggcgggcggatcatgagatgaggagaccgagaccatcctggctaacacggtgaaaccccgtctctactaaaaaatacaaaaaaattagccgggcatggtggtgggtgcctgtagtccccactactcgctactcgggaggctgaggcaggagaatggcgtgaacccaggaggcggagcttgcagtgagccgagattgtgccactgcactccagcctgggtgacagaacgagactccatctcaaaaaaaaaaaagaaagtgggcccttttctgtgttttataggtacccacacaccactgaatgtaggtcatcgtttaaaatctgagtgtacatccaaatccagtgcagttatgtagaacaaaacagtttgtatggaactagaagtgttactggaaaggtaaatactgtagttggtagtaaactgatcagttaaagtgatggatcagcaaagatttgggggttgctggtttttatttaacactcagttgtttcagagtgattactcctgaaacaaagttatttcgaacatagatgtgttaagaaatttcatattcctttccacttaaacctcttgagaaaggaagcatttcttcagggagagttagctatgtgagtgctacatgaattttagtcattactgtggcgactatatgataaccaaaagtaggagtctcacactttagtttcaaatttgtgctgttattgagtaaatttttaaaatgagattgccctctttcttgctaaactgtcatatatataagcccattaaattgacttttatgcctcttttccttttttttttttttaacctgttaagactttttttttctttctcatatttacccctgcctaagcaaggcctcaactctccacggaaatctttagtaaaaggcaaaaagatttattcattatgaagagaaaccagagcatgtgtgacaggactttctgtaattataagttagtggttcagtgccaggggttagattttcttaacttttatgtttagtaggattattgataattcctaagttgtatccttaaatcatattttttgaacattagggatctgcgtccaacacttaattatactagtaaaaggaatagaacatgcactggatttcttgtttttgagattctttcattcctgccctaccccaggcaggaggtctgtctgcagtggaagagaatgaaaccagaatgaggccaaacaagtaaagaggagcatgagatagagatggatcccatggcactgtgcctttgaggccctggtcctgaagtttttttccttgtttctacgcagcatctcattatcctgtgagccatyaaattctgatttttgggctgggtgtggtggctcgcacctgtaatcacagcactttgggaggctgaggcaagacgattgcttgagcccaggagttggagaccagcctgggcaacgtagggagacttgtctctacaaaaaataaaaaaattagccaggtgtggtagcacacgcytgtggtcccarctacttgggatgctgacatgggagggtcccttgagtctggaaggtcaaggttgcagtgagccatgatcacgatactgcagtccagcctgggtgacagagtgagactgtgtctcaaaaaatttttttttaattttgtgtawawtagcttgatttgggtttttttttttttacttacaactgagaattttgaccagtatatttaatgttagtctgaccatttctccagtgggctttctacgtatttaaaaaatagtttggactttaatctcagggtaaacaatatatataggtacactcagtttatatatgagataatattcaggatcagtggagtgaaaatagtaaagtatcttccatttttcaatggcttagagggaaaagtgttcataatgggtatagaattaatcagtattcctttcccattatttatgcctatacagtgtagaagtttcccttaaagagcttatcaccataataagtacaatagcaaagatataaagtcagtacttttcactgattaggcataaatatcctctttattgttttcttacaaagtagctatgataaacatataaaagggtcagaaagagaggggagaaaaactcggtgaaaagtcagacaagaggaaatgaagaggtgaggtatgtatagtaagcattagtgaacttgtagtaattgctttaggttycatggattgcccacttgtggattaaatgttagacttctgcaaaatgagttgatggtagagatgaagaaaagtcktaatttgttttytttatgctaaggttaaagttgatgtggctaattaggtattaagatcagttttcctgtctttttattatttatttatgtttatgaatgaatgaatgaagaaatgaatgacaaagtctcgctttgtcacccaggctggagtgcagtggcatgatcatagcacactgctgcctcaaactcctgggctcaaaggatcctcctgcctcccaagtagctgggattacaggtgtgcgctaccatgcctggctaattttaaaatttttagtagagatgggttctcgctatgttgcccaggcttatctagaactcaagcgatcctcctgtgtcagcctcccaaagtgctaggaggattgcaggcatgggccaccaaacctggccttgtcttgctttttaataagctgttgtcattatgttgcctttcaaagtccagttcttctttaccaccccatttgcctggaggtaatgcattaggtgagaatgaaaggtgagtacctaaaagattcagaattggaaggccttaataggatcaatgtgtaggagctgcagagaatatgaaggacttttaaatattccagtcccaaaataaacttsaccattggccaagattgtggtaagctaagtatttgagatgtctgtgctacatcatccaactcttggcctgaactgttttagctggcttgcctatgtaaattgaaacttcctttaatacttaactgtgagttaaacatagttctggagctccatcgaaagggtcttagtcagccaggcacagtggcttacacctgtaatcccagcattctgggaagccgaggcgagagaatcacttgtgaggcctggagtttgagaccagcctgggcaacattgcaagaccccctctacaaaataataataataattattatccagctgtggtggtgctcacctatagtcccagctactcaggaagctgaggtaggagagttgctygagcccaggacatcaagacagcagtgagccatgattgcaccactgcactctagcctgggtaacagcgagactcccgtctcaaaacaaaaacagaaacaaagggtcttagttatacagatcttcttaatcattcctaaagcgtacattccaagtttatatttacagtaaagtgatctatatcccaaaacatgtttccactggttactaatttggggcaagtcattaacttctcagagccttctgtaactaagatttagggaaaatactggtcttaaccagagcacatatgtatacctttgactctttttgctgccacatggttaaaaaatcagccttagagaggtataatttgcacaaattttgccttttttctaggatgtaatataaatgaaatcatacaggatatactattttgtgcctgtcctctttcattttagtataatgctttgagaatcattcatattgttaaaagcagtagttgttccatttaattgctaagtagtagtccattgtatggatattccacaattcctttatttactagttaatggatattgggkttttttttttttccaggttttgggtttatttatttatttatttgagacggagtctcgctctgtcgcccaggctggagtgcggtggcgagatctcggctaactgcaacctccgcctcctgggttaaagctattctcctgcctcagcctgctgaggagctgggactacaggcgcatgccaccgcactcggctaattttttgtatttttagtagagacggagtttcaccttgttagccgggttggtctgatctcttgagctcgtgatccgcccacctcaacctcccaaagtgctgggattacaggcatgagccaccacgcccggcccagtttttggctattacgaataaatctcctctgaatatttgcaacatagatctttgtgtggacatatattttcatttctcttggttaaaaatccaggagtagaaattgcaggattgtagggtaagtgtgtttatagtttttaaagtaacggcctattttgcattcccactggcaatgcatgagaattccagggctccaaatccttgttgatgcttggtattgtcattcttactaacttaagtcattctagtgggtstgtagcaatacatcatcatggttttagtttgtaatttccagatgactaatgatgattatcttttcatgtgcttatttgccatttatatgtctttggtgaagtgtctgttcaaatcttttgctcattaaaataggttgttttttgtttattgtgagttcataatgtattctgaatatgagtccttcataacaggttttgtaaattacatgttttgcaaatatgttcttgtaatttgtggcttgccttttcattcttaacagtgtctttcagagagcaaaaacttaatctttatgtagtcagttattttttttttctttttgagttaatgatctttttaaaagcctatctaaggaattgtctctaaacctaaggtcactaatattttcttaaattttattctggaagtttatagctttgtttgacatttgggtctgtgaaacacttcaaattaatactgagagaagtaagtgtagggttgcctttttgtatatactgtgaatatctgagttttcctctgagcagtgctycagttgcagctcacaaaatgacatattgtgtactactattcagtttgaatattttctaatttctcttttaatgtcttttttggcctatgaattataaaagtttgatgtttaacttcctgtagatattttactgttactaatttaattccattgtggtcagagaacatactctataggatttcagtctttttcaggatttcagaatttgagatttgttttgtggtaaggcatatggtctattgtggtgaatgttttgtgtctttgaaaagacaaatatttggttctaccagttctgtctcatatattttgaagttctgtttttaggtacatacatatttaggattgttatgtcttctcagtaaattcattcttttataatgacttgtcccactttattttgataatatttgccatcccccaggctactttaacatgaatataactcttgtagctttattaccacagtatttgcataattttttcccatccttttacttttagtctgtgtatatatttgcaatgcatttcttgtgattagcacatagttaggtctcgcttttttatttaggctgacggtctccttcattcattcatttgttcattcattgagatggagtctcgctctgccacccaggctggagtgcagtgatgccatcttggctcactgcaacctcagcctcccgggttcaagtgattctcctgcctcagcctcctgaggagctgggattacaggcgcctgccaccatgcccggctaatttttgtatattttatgttttgtatatttacccctgtgttggcaaagctggtctcaaactcctgactttaggtgatccacccgccttggcctcctaaagtgctgggattacaggtgtgagccactgcgcccggctgacagtctccttttaattgttgttattaaatgatgggtttactctgagtttgagtatccatatggttaggtttcagtctaccattttgccatttgttttctattcatcccgtctattcttttctgtcattttttgaatgaaagattttgtaatatttcatcttatcccctcttttagtggagatatacttatttgttctatttttctctgtggctgctctatagtagatacctttaacttacgacattctgccttcaaattatataccacttaatgtataagaatcctatggcgttatgtctccattttcctatcttctgttctttttgctattgtcatacattttacttttggatatgttagaaaatccataattcarcgttaggcttgtttttatttaaagctttgttcatctgggcctgtagaggagcctttgccctcgggctagttgagctgtgtttataaaggtttcagctgaatggcctgagtttagtaaggtctctttaatcagtcagaaggagaatgcctgtgtaaactctggtagttgtgtttatagttcccaagtagttgcttgttacccagtggttgttctttgcctaccctcgtgaaatctcacctaatacatgtgcagctaatttagtaaagatgtagtagtgcctcacaaattacagctgcttcagccttcggagacacatttaagtttctgattgggtttccaccctccctagattctcagtttctccctttctggctggggtctggaaactgcctcaaaatacaaagctttgacaatcataaggcacaggtaatttgcttgtcttctctcagggatcacagttcggtgctgtctattgttcagcatccaagaatagctgtttcatgtatcttgtccagttttttagtagttttggtggaagggctagtctcaagttactccatcatggtaagactaatttaactttttataaatacaaggtttgcatgataaaggctattatagcctacttcataaattaatacattgcattctgcgggcagtgttttgcaccatttgtcctggcttagctgatattcatgttctaattgttcattacaggattttgtgtaaataaataaatgtttagcctttgtaatgggattgttaatagtaccctggatctgctactttaccaattgctccctaatgcctacagttgattgccaacactatctcactgccccctgtaactgcagtagtttgagctttaagatacaatgtcactaattatggattattctgttcttgttctacaatatcccaatatcttcagcaaaggattctgtattggctcccaccagctggtatttactagaatgtggaaataattcaaacaggaggactgtgcttttgaaaacctgctttaacattagaagaggaaaagtgattgtaaatggctatttttcatgtaagggagggattaaattttcatatctattgtttaaagaaatctgtagccaaaggtgtctgtttttagttgggtcattgtttaggactatagacttcrgttttgtattcttagtaatattaaccccttcacctcccctgataacccaagaaaagatccttcgtataagattttaaaaattgcaccagaggagccaagtggctcatgcctgtagtcccagctactcactacttggcaggctgaggtgggagtattgcttcaccccaggagttcaaggcccaaggccagcctgggcaacacagggagaacgcgtctcttaaaaacaaacaaacaaaaaaattgcactgggatttgcattaaaagttgcaatacatacctagtatgttttctaatcataatgtgcaattttaaaaaaaagtgtaatttttatctgccttctaatttgagcctttattgttcaccagtaggtttatttcactggaacaagtctttgtgccatatttggcatcaccaaaggaatagtgccagtatttattgacaaatgaggacaaatagtttttccacattctattgccatcattgttactaggtaaacaatagaagcttataaaaatattgtgcatttaatacctttttggtttccttttatacttgtcaaaagtcatttatacataaattgacatactgtgtccatgatatgtatggataagtaagatctttttgtagcttgaatatcttatgagtaaatagcatttcctaactattaaatgggatttgaatagctgtcaagggattacttgatacagagaagttgctaatttattttgaaattgtaaaatacattttcccctctgaaatcacgaaatgcctcatattgctaatgcagtgagtttaagtgtttaatttagaaaaaattagtaactgctggttgcctcataktgctaatgcggtgagtttaagtgtttaatttagaaaaaattagtaactgctggtgttatttggcatgagatgaacctggaagggaagtgttgaggggcatcatctgtacttggcactgtttagaactttctttagaggtgtatagtgctttcttacactaatattccagtgtatgcctgaatagcacttttcttcttgtactgaaaaataagtccatggtgttaagcaggcatctctaaagtggccatctgatttaaaatagcttccataagttttaattaattttgcatgttttagtttctctttttgatagcaggtagtagctctctgaagcattccttctgccttgaaacatctttctttttcatatatttgccgttttcctttgtgagacttaggcttataatacaataaatatttaagtgccacctatttactaggcactgttaggttataggctctgtagatgtagtggtgaacaagatctccgttgttactcagtttgtagactatgaaggaaaaggagtaagggttggagaattactcatgtattaaatatatgttgctttttggaggcaaatgaataaaatatttagaatggttaagatagtcttctgctttctttggattcactaggggttttatcataatctgtctcatatcatttcatatgttaaaagggaattttaatgaaatacgttactactggttgtggattctaaaaggtagaaggacaaaatawtatttgcctttaagaatacaaagaaaggattgtctgtttgtatggttagttgaattgtcttatttcctatttatttattttttattgctgagatctcactttgttgctcagggtgatttttaactcatggcctcaagtgatctcctgccttggcctcccaaaatgctggaattacaggcctgagccatttcaccccagcctatttcttattctccctacaagggacattttagtgtaaggcaaaaatataaaattatcactcataatgttttttcggaaaatatatgactgcatggttttgtagttttcttagcagtcactgggtcattaagttacctcgttttttgcttcttgttcttccttttttctgggggaaaaagttttctctaggtctcatctctcaattctttagcaaggcatatttttattcatcataccataactatatacatacttaaaagtaaatgacattttgtcttaccatggatttctcacgtatctggtgaagtggtttaaactgtccaattttatgtgcattgaaagcaaaagctagctgagaaaggaaagcttttctcatcaaakaggttgaaattactgtcgtaaaacagtgataaataccagataagatatgtgatccttgaagtttaataaatatttttggactgttaatttatattcacttttgggcatgttttttttgagacatggtctctatagcccaggatggagtgcagtcatgtaatcatggctcattgcagcctcagcctcctgggctcaagcgatcttcccacttcagcctcctcagtagctaagactacaggcatgtgccaccatgcctagctaataaaaaaaaaaaaagttttgtagagatggagtctcactgtattgctcaggctagtctygaactcctgagctcaagcagtcctcctgcctcaccttcccatagtgttgggattagaggcatgagccactgcacccagcctggttttaatctttaggaaatatttttctaggttaaactcaacacagtataagtatttttacatgtatttcagaatctaaatttattaggatactggctgatgacttacatgcttttattattaagatttaggttcccagcactttgggaggctgaggcgggcagatcatgaggtcaagagatcgagaccatcctggccaacatggtgaaaccctgtctttactaaaaatatgaaaattagctgggcatgttggcacgtgcctgtagtcccagctactcgggaggctgaggcaggagaatcgcttgaacctgggaggcagaggttgcagttagctgagatcgcgccactgcactgcagcctgggcgacagagcaagactctgtctcaaaaaaaaaaacaaaaaacccaaaaaaaattaggcaatttgctttaaaaattagataactcatgaactcgttggttattccttattagctaaaaaaaattattagaccactgtatattatgctaattaaatgactcatttctgctagttaaaccatctgtaataggctacagaacacattttgctggagtatgtaaaactaagcccaccaggaaacttatggctaaaattaaacagaatcctgctaaccttgtgtgtgtattcaattttggtacctgaaagaatttgtggtatttagaatatttgaatgttatgttatatttgtttggatgttcatattttatatttacatgacaaaaaggatatggttgctatttaaactttttggatggtaggaaaataatcttaggcacaggaaatcatgacaagaccagtgttgtagaactattatggataaagctttttttttaactttatgtataagtaattctctagagcagaaattactcaagctttcagtgtataaattgcatgtggactaaagattgatactgaccaaatataaaagattgatactgaccaaatataaaagattttgctgcttctcctaattttcttgtaccttttgatattctttgaagatacctaatggttatttaatttcttcaggttttactaaattttgttcattctaaagacttttaaaaagcttacacatctaatatgtcagagctatgacaaaaatgccaggttttttttagggggtggtgggggtggcgggggtggtcctgtaataatgctacagtatcttgatggacatcctgttaatactttggggaatgtgtttgttttgtattgctgtgaaggaatacccaaggctgggtagtttataaagaaaatagttttatttggctcaaagttctgcaggctgtacaagaagcatggcaccagtatctgcttctagtggggcctcaggaagcttccagtcacgttggaaggtgaagggggaacaggcgtgtcatgtggcgaggggcagcaaaagagagaggagaaggtgctaggctctttttaaacaaccagttctcacgtgaactaatagagcgagaacttgcttattaccgaggggagggcaccaagccatattagggatgtgccctcataaccagatatcttccactaggcgccacctccaacgtttgggatcacatttcaccatgagatttggaggggacaaatatctaaaccacgtcaaggagtttcttttgggagagcttaggatcttattactttttaatggatgattgatttattttctgaaattcctattttactgtgtctttttgaattgtacagttttctggcatttaaatactttcatatttgttgtgcattggttaccaccatccttctctagaactttttcatctttctcaattgaaactctgtacttactaaacactaactccccattcaatcctcttcctagtccttggcaattaccattctattttctatctttgtgaatttaactaccgtacatacctccatataagtgaaataatataatatttgaccttctatgactggcttatttcacttaacataatgtctttaaggtacatccatgtcttttttttttttcttttttttttttgagacagagtgtcactctattgcccaggctggagtgcggtggtgccatctcggcttgctgcaacctcgacctcttgggttgaagcaaattcttgtgcctcagcctcccaagcagctgggactacaagtatgcggcaccacaccagctaatttgtatatcatgtctttttttttttttgagatggagttttgcccttgtcacccaggctgcagtgcagtgtcgccatctgtgctgactgctacctctgcctcctgggttcaagtgattctcctgcctcagcctcccgagtagctgggattacaggcacccgccaccttgcccagctaatttttagtagagacggggttttgccatgttggccaggctggtctcaaactcctgacctcaggtgattctcctgccttgacctcccaaagtgctgggattacaactgtgagccaccacgcccggcctgtatcatgtcttttaaagactgaaaaatactccatcgtgtgtagactctacattttgtttatccatttatctgttgatggacagttgagttgcttctgctttttggctgttgtgaataattctcctaygaatgttggtgtacaaatatctgtttaagtacctgcttttacttcttgtgggtatatacctagaattggaattatttttgtttacccatttatccattgatggacagttgggttgcttctactttttagctattgtgaagaatgctcctatgaacattggtgtacacgtatctgtgtatatctgtatatcaagtctctgcttttactccttttgggtatataccgagaagtggaattactggatcatatggtcattctgtgtgttaattttttgagaaatctctattttctacagtagctgtaccattttacattcctaccagcaatgcacaaggatccacacaacccagccagcacttaaaaaaaatttaaaatagccatcataatgggtgtgaagtagtatctaattgtagttttgactcacatttccctagtgactagtgttttttttttttttttgagactgggtctcactctgtcacccagactggagtgcggtggggtgatcagggctcattgcaggctcaatcggttctcccaccttagcctccagagtggctgagaccacaggtgcacactaccacatccagccaattttttttttttttttttgagacggagtcttgctctattgcccaggctggggtgcagtggcgccatctcggctcactgcaagctccgcctcctgggttcacgccattctcctgcctcagcctcctgagtagctgggactacaggtgcgtgtcaccactcccagctaattttttgtagtttttttttttatttttattttttattttttttttagtggagacggggtttcaccatgttagccaggatggtctcaatctcctggccttgtgatccaccctcctcggcctctcaaagtgctgggattacaggtgtgagccactgtgcccagcttgtattttttttatgtagacatagggttttgccrtgtttcccaggctggtcccaaactcctgggcttaagtgatctgccaccttggcctcccaaagtgctgggactgcaggggtgagccattgcacttggccaactagggatgttgagtatcttttcttgtatgtattggccttttgtgcttctttggaacaatgtctgttcaagtctttattagttttctcaggctaccataacaaaatatcacactctgggtggcttaaacaacagaaataagtctggcagggtttgatttttggtgatggctctcttcctagagtgaggtctctggtgtcttgtcttttaagcacactaatcctattggatcaaggatccatctgcatgaccttatttaaccttaattacgtcttacaggtgtaattaaggccctgtcttcaaatacagtcatatcaggggttagggtttcaacatttcaatttcaaggggccaaaaagcccatattcaaagccctttgcctacttgtgaattggattggtttttgttcttgagttgtaaaaatatattctaaacattccttaacagatatgtaatttgcaggtattttctccattctgtgagttgccttttgtactctgttgatagtgccctttggtgcacaaaagattttcatttggataaagttagctttttctttcttagcctgtacttttggtgtcttatccaagaaatcattgccaaatgctatgtcatgaagcttttcccctgttttcttctaagagtcttacagttttagctcttatagttaggtctttgatccatttgagttaatttttaaattaactcatgttaattaaaaacagttaattacatatagtctaaaataaaggtccagcttcattgttttgcttatggatatccagttttctcaataccactcattgaaaagactgtccttttcccattgcatggtcttggtatccttgttgaaaatcatttgaccatatatgtaagtgtttatttctgggctgtctgctttattctgttggcctatatgtctatttttatgccagtttcctcactgttttgtttactgcagctttgtagtaagttttgcagtcagttagtgtgagttcttcaacattgttcttttcaagttcactttggctattcggggttctttgaaattccgtgtgaattttagactgaatttttctatttctgcataaaatgccattgggattttaatagggattgcattaaatctgtagatcactttgggtagtattgacatcttcacaatataaagtcttccaatccatgaacacatgatattttttcatttatttgtgtattctttaatttattttagtagtgatttgtagttttcagtataatagtcttttgcttccttggttaagtttatttctaagtaattcttttttatgctattgtaaatggaatttgttaatttctttttttggcttgttcattgttagtgtatatgtatattttttgtatcttgaaccaagaatagaattgctagatttgacagtttataattaatttggctgtccatactaatattgataatagatataattgtctaagtaataggcttttaaaatgtttggcatgaaataatttgagaagcatttcccctttaaatttattttatttttttggagacagagcaaactctgtcacccaggctagagtgcagtagcacaattactgctcactgtagctggctcctccgaggctcaggggatcctcccaccttatcctccccagtagctgggaccagaggtgtgcatcactatgcctggctagttttactgttttttgtagagatggagtctgactatgttagtcagatcggtctcacactcctgggctcaagcagtcctcctgcctcagcctcccaaagtattgggattacaggtgtgagctgctgctcccagcctgaattttttgacgtcagtgttaatttgtgtgtgctatgttctgtctggatatattggactggtagcttgcaaacagcctaacccttggagataagttgattttaaattaagagtaattgtagtggataattgcagaggctcttaaaagagtaaatttcattttaaaaagaaggaaccaggagtaagaatgtaaaaataatacctacctttttatttgttttctttaaaaaaaaaaaaaacagctttgttgagctgtaattcataggccataaaactcagtcttttaaagtacacaactagggccgggcatggtggctcatgcctgtaatcccagcaatttgggaggctgagatgggtggatcacttgagaccaggagtttgagatcagcctggccaacaagacgaacccgtctctactaaaatcacaaaaaaatagctgggtgtgatggtgggcacctgtggtcccagctgtttgggaggctgaggcatgagaatcacttgaactcaagatgcggaggttgcaatgagctgagatcaagccactgcactccagcctgaaccacagaacaagactcggtctcaaaaaataaaataaaataaaaataaagtatacaatgtaatgattttgggcatgttcagagttgcatggtcataactgctatttaatttcagaatccctaacagagacctcatgccctgtagcagttattccactttcccactcctctttagaccttcgcaactgctagttgattttctctttcaatgcatttacctattttgatattttatttaaatagaaccgtacatgtggccttttgtgctggctgctttcatttagcatgaaagcattttcattttcatctgtgttgtagcacattatcagtacttaattccttttaatggctgaataatactccattgtgtgtatggatataccacattttgttcatccgtcagtgatcatttgggtttttattattttactattgtgaatactggtgcttttaatctttatgtacagatttttgtggggacacacgttttcagttttcttgggtatatacctaggagtgaaatggctgaatcatttggtaactgtatgtttaactttttgaagaactaccacactgtttcccacagtggagctataccatgtcacattcctatcagcaattattaggattttaatttctccacattcttgattacatttgtgattatctgcccttttgattttagtcatgctagtgggtttaaagtggtatctcattgtggctttgatttgtaattccttgatgcctaatgatgctgggcatcttttgtgtacttattggtcatttgtgtatcttctttggaaaaatgtttatttagattctttgcctatttttaatttggaacttaaattattgtcatgggagttctttatgtattctggatagaagttccttatccttgggttgtcctgattgtgccctttaaagcacaaaaatgtttaattttgatgaaatcccatttatttcatttttctttagccactaaatgcttttggttttatatctcagaaaccattgcctaatctaaggttatgaagatttactcctgtgttttcatatagaagtttaatagtttttgcacttacatttaggtctgtgtctattttgagttaatttttgtatatggtgtgaggtagagttcttatttaattctttggtagatggatattcagttgtcccaccaccgtttgttgaaaactgttctttcctcrttgagttgttctagcatctttgttaaataacatagatgttaaataaatgttaaataaattaaccatctatgtaagagtttatttcttgactttaaattctattccattgatctgtgtgtctttatgctagtaccacattttcttgataatttcaaaacttactacaaagatatacttgagaagtgtgagttattcagctttgtccttttttcatggttgttttggttattctgggtcccttgtatttgcacatgaattttaggatcagcttgttgatgtatgcaaaaagctcactgatagaaagattgcattgaatctatagatcattttgtcagtttgttgtcaccttaaaaggttatctttagatcagtgaacaagagatgtttctgtttaggtggtctttaatttttttcaataatattttgtagttttaaaacatttttgttttaaattcttgtttttttattttaatttcgaggtgtttagccggtacttctgttcttagtggtagtggtagaggtttatcaaaaaagagaactcaaatactgatggcctttctaaagcagtgtgcatgcaataaggtgcatgcattgggcacagcaacacttgtgagaaatgatagtaacattccttggatggagactctttaagggaggaaaatgtattatattagtttcttgtttgcatcagcacctcctggaattaattttcagtatacaagtaggtgaagaaatgctccttttaaaatacctttttctttttttaaaatttttaccacaatcatgactacatatccttgtaaaatattaaaatgtaatgctaaaatctctagcctttgtttttttttttttttttttgagacgacgtcttgctttgtcgcccccacagaagtacagtggcatgatctcaggtcactgcaaactccacctcctgggttcaagcgattctcctgcctcagccacccaagtagctgggactacaggcgcaaaccaccacgcctgtctagccatcatttttaatcccgttcttttctcatcgtctgtacgggtaatcactacattttttttttcttttttttttttttttttwagacaaagtcttgctcttgtcccccaggctggagtacgatggcatgatctctctggtcactgccgcctccgcctcctgggtagtgattctcctgcttcagcctccctagtagctggggttgcaggcgcctgccaccacgtccagataatgtttgtatttttagtagagacggggtttcatcatattggccatgttggtctcgaactcctgacctcaggtgatccgctggccttggtctcccaaagtggtgggattacaggcatgagccactgtgcctggccacattttttttcttttaggctttccccccagtgcccttatgtatgtatgtaccaccaaatgatatgtagctttctttttttctctttcttctttttaaatatgctgtacatttactctatatatttttccccaattgatggatggttaggctgtttctagttttttgtttttacaacctgttggtgtgaagtttaaaaaaaawttttttttaagtttttttaaaatagagacgaagtctcggcatgttgcctaggctgatcctgaactcctgggctcaagtgatccaccctccttggccacccaaagtgctagrattacaggtgtgagccaccactcctggctcaaagtttttaaaacatgcctcagggaatatktgcgccgactttgttgaaatatatcaagggaagtagagttacttggctatatggaatacgtagtagtagtcgtagtatattgtcaaggtactcttcaaagtagctttagcagttttaccattatcaaaagtgtgtacaattgctcacttttggctgggcatggtggctcatgcstgtaatcccagcactttgggaggccaagrtaggtggatcacctgaggtcaggagttcaagaccagtctgggcaacatggtgaaacgctgtctctactaaaaaatacaaaaattagctgggcsgggtggcgtgtgcctgtaatcccagctactcgggaggctaaggcaggagaatcgcttgagcctgggaggcagaggttgcagtgagctgagattgtgccattacactccagcctgggtgatagagcaagactccatctcaaaaacaaacaaacagaaaacactcatttttccaccagtgccagtacttgaaattaagcaacatcttacttttctgccaatctttttgatggaaaacagtttctttattgttttaattttcattttttctgattatttatgaagtcgacatgttttcatatgtgtgttgaacatttgcatttcttttgtaatttttttttggtctgtttttcaggttttttctctctcatggatttttattttttcttagacagagtcttgctctgtcacccaggctggagtgtagtggcgcaatctcggctcactgcaacctccgcctcccaggttcaagcgattctcctgcctcagcctcccgagtagctgggactacagttgcgtgccaccatgcccggctaacttttttttgtatttttagcagagacagggtttcaccgtgttagtcaggatggtcttgatctcctgacctcttgatccgcccatcttggcctccaaaagtgctggaattacaggygtgagccaccgcgcccggcctcatagaaggtttttaaaatggaaatgctcaactctttttagattattattctaacacttactgggaaggtctgaattttgactgaactgtttatagcattggacaagtgtttgagaggtgtgaggggtgtgtggagagtacagcaggtaagaagagccctagtaactgtggacagcacatagattgggttccagacacatagtctttgaatttttgtctttcagttgaatcagttcagtgaattcctttcatactatttgatttccagataattttttaaagccttaggagtgtgtttgtrtaatatttttgcttttgaaagtcaattaaggtaaattgtctacaacaaaattcacttcgtatattttggaaaatatatacagttataaaatcaccacctgattaatatgtagaatatttccattactgcaaaaagaattccaggtaccctttggccattaattctctctactgctcagtgaaccactgatcatatctccatcactataggttagttttgcctcttgtaggatttaatataaatggtcatcccagatcttttatgtagacttccaaacctagcattatattcacattaataatatgaacttggccaggtgcagtggctcatggctgtaatcttagcactttgagaggctgaagtgggaggattgcccaggagttcgagaccagcctaggcaacatggcgaaaccctgtctctacaaaaagttagctgagcgtggtggcacatgtgtgtagtcccagctacctgggaggctgaggcgggaggataacttgagccaggaaggtcaaggctgcagtgagctgtgattgtgccactgcactccagcctgggctacagagtgagagcctgtcttgaaagagaaaaaagaatatgaatttttgactgggtacagtggcttacgcttgtaattccagcactttgggaagctggggcaagaggattgcttgagcccaggagtttgagaccagcatggrcaacatagtgagacctgtctctacaaaaatataaaaataaaaaaattagctggtcatgctgatgcgtgtgaatagtgccagctactcaggaggtagagttgggtggatcacttgatcctgggaggtggaggctgcagtgagccatgatcacaccactgcactccagcctgggcatcagagtgtgagacgctgtctcaaaagaaaaaaaaaaaaaaaaaaacttaaaaatgacctaactttgagagtggttggtttaaaaatcttgaatttctctatagttgagaattgtttctgaattgatttggcaactttatgtcactatttaataagtaaaactttttgtgttaaattctgcagtggaaatactgacacaacaaggttaacagtacttgaatctctgaaatgagatatagtcagtggaaggaagacagtagtttaatctacccctttttccatacttgcctcttaaatgttagtttcatggtactgttaatcattatatacaatgacttttggttgttctgtacatacatatattgctttgaacaaaggaggacaacatccaaagtgataatagtatttagtttctgccaaagctgtttttttgttttattttgttttgtttttgagacagagtctcactctgtcgcccaggctggagtgcaatggcatgatcactgcaacttccgcctcctgggttcaagcgattcttctgcctcagcctcccaagtagctgggactatgggcgcgtgccctcatgcccagctaacttttgtatttttagtagagatggggttccaccatattgaccaggctgttcttgaactcctgacctcgtgatccgcctgccttggccttccaaagtgttgggattacaggcatgagccaccacacctggctgccaaagctatgttttaaaaaaataattttctatttccgtagtcctcctagaaggggagagagaatcctttttttttttttttttaaagcagattaagaccattggagggaaggagtatgtctaacctgatttttagcccttttttgtaagacagcaatgtcacggatttatcaagatttcatgttatttggtaggaactcctgacagccagctctttattcttctttgcacatgtgcattgatttcactgtacaccttctcaaaattctggaatggtttattcttttgaaaaaattcccatctcagagatacactaatgttgatcaggattataaggacaggttataaatctgaatgctattgtaatytgtttcagtctattacattgtagatttttgacttgaaccagtgagttctctaagtgcttctcttttgttctcttaattataaaaattgagatgtaatacacgtataaggtatagtaaccctaaattaaagcctggcagctttttagatatgtatagacccatgtaactacacccatattaatatacagaacatttatagctctctccctactaaggttcccttccatcctttcttaggcactacatactgtgagataatcactgtcttgtcatctgtccccagagtgctttcatttttgtttttggtttcatagttaaagttcttttcaaaatgttcctttttttggtggaaatttaacagggtactaaattggtataactaacttattagtaaagttataatcaaagattgctgggaaggcacggaagtgatcaagactaattatgattcagatgattaatagtatcattcagagatagtcttatgcagcattcctcatggtcagagtactttacctgggactagagtacaacattttttaaaaaaatgtggattttgccataaggaaaataatgaaaaagcaaaaggataatgaactgatgtgatgaatgttcatgtacctacgacctaatttaacaaatatttatccctgtcatagttcagattttaaaaactaactttgctatgttatrtgaaaataataatagttatagaaataatataaggaactctcaatgttcttcaccaattgtttacattttgtttcatgtgctttattatttctccctttctccatattttttccctgaatcattttagagtaagttggaagcactgtgcccctttgcctctaaatacttgagagtttatttctttttataaaattttaaaatttttattttttgagatggcgtcttgctctgttgctcaggctggagtgcagtggtgcgatctcagttcactgccacctctgcctcctgggttcaagcgattctcctgcttcagcctccctagtagctgggactacaggtgcgtgccaccaggtctggctaattttttgtatttttagtagagatggggtttcactgtgttagccaggatggtcttgatctcctgacctcatgatccacctgcctcggcctcccaaagtgctgggattacaggtggagagtttatttcttgagaataaggacattatcttttttttttctttttattatccaggcaaaaaaaactgtgaagaatgttattttatataaccacagacaatctttcatgggtttttatagattaattttgaggatgcttttatatccaagttcttggatacacatcacagttggcaaaatatttctcgtgctatctcagatttgtataccatcagaatttttagtatatttttaatcttcttaactaaatgcaaatgtagcttattttactatcggtcaagttattttaaaatttgagaattaaaatgcatcttgctggcttcatttgtatttcactgggtggttgtcaccaggtatgctctcttccattatcttcacataatttttgaactgagaggtactaatcagactttagtcatcaatgatagtcttgttctttgcacataaagatgatagtgtaaacccaacagagcagttctgtgtttttttttttttttttttaggagactgggtctcactgtgttgcccagtctagacttgtactcctggactcaagccatccttctgccccagcctcccaagtagctgggaccacaggtgtgcaccattgtgcctggctaaagtaggcatttttagttttgctttcttaccacctctcaatgagatgatgcacttgtggttgtccagccatacatattcgtctacttatttccctatgatagtacatgtttttagggtagttgatttatggataaaaacatgtttatattatgtataatatctatggaagtgaataaatttgcttatgaaaattaaactctagctgggcacggtggctcacgcctgtaattccagcactttgggaggtagaggtgagtggatcacgaggtcaagagatygagaccatcctggctaacacggtgaaaccccatctctactaaaaatacaaaaaattagtcgggcattgtggcgggcacctgtagactcagctactccggaggctgacgcaggagaatggtgtgaacctgggaggcggggcttgcagtgagctgagatcgtgccactgcactccagcctgggcggtagagagagactctgtctcaaagagaaaaaaaaaattaagctctggacattaaagatgttagcacgcatctaatcaaatgagcaactgtgtattagattacttgaagaaggtggtatcccatttggctattctagagcccaatttttcttttgtatgtgtaatttctggagttttctcttgccatacttgcattttaatataaaaatctacactaatgtggtctcttttccttagtatctaagtttttaatgtcattatagattgtaatatttggagactttgaaaagattctattttaggggaaaactagggcatgcaggttgatcttgtcccattatggtgagttgtttgtcctaccctgttatattagaatctagaaacatactagctttgaccttggacaagttattgaatccttgggaaccttgaagtcctcactgttaagtgggttaagtggcacctccttcaacaactatgaagattgaataagatagtgcgtaaaaagtacatagcccagtgattggcacatagttcagtaaataatagctttaaagtatgaaaataatggtatttattcagagtttggtttcgcttaacaaagtaatttatccatttagactacttttawtaagcatatatttttctattatagtatttaagcagagctttgtgtgtaatatattttaactataggtgtcttgtgaattaagaaatggatacttctgtaatgaagacgttttaagagcttttaagttgtacattagtttgttctttgataaacccatgagattgttttgtcaggggagataattctatttcttttgagaggtaaatacagcttgtactatagtatttgatcaatttacaataggacattagtggtagagctaatatgtatgtgattactaaatggcatgtacagttcgaagtgttcctgtttattagctcacttaattctcacagtaacaccataagataccattgggagtggaagcaggagaaagaaaaagtgacttgctcaagattacagaactactagatgcctgaattgggttttgagacaaggtcaggctgactttaaagctgtgtaagaatgtgttaaaaactaacatttaaaaaagtgctagtgtatgttttcagttcttaccttacacactagtattccttttgaaagccttgtttaaaacagcagaaactgaaatgatacggcagagtaaaacgagacgtcatatttctccactaggtcaaagaggtaaagaatagaagtaacactgccacaaattgtagagaatagaataaaagaaggaaagcaggagatctattcctcagttatgacttttacaaaataatttccatatctgatgcggtttactgtctgattgaatgatctcttctctccatgcccacttttttttttttttttttgagacggagtcatgctgtgtctcactctgtcgcccaggctggagtgcagtggtgcaatctcggctcactgcaggctctgcctcccaggttcacgccattctcctgcctcagcctcccgagtagctgggactataggcgcccgccaccacgcctggctaatttttagtatttttagtagagacggggtttcaccgtattagccagggtggtctggatctcctgacctcatgatccgccctctttggcctcccaaagtgctgggtttacaggcgtgagtcactgtgcccggcctccatgcccacttttaggggaaaagtttagaagatggagacaaaaccaactatccttctgctatctcttagattttcatctctttctattctgtagcctacaatcgtaatgtagaccaagattaggctgaagaataaaatattccttaatgtatctaatatttttatagtattgaactgtaaccccataatgaatttttttggggaaagtcagattatttggttatgcttgggaacttttaggtagttgcagactcattaataaactgatcacatggaccagattgtcttatccggtcagctttttgcttccttgttcttatatttgctctattgtgctggtgcccataacaacataaacttacagctcagtaatgcagggcaagtagacttcttcctgccctggagctttttcctgtactagatgccagttctgaggatggtgagcctgagagtttaatggaaaacctgatttcttgattctctgtggttagattagatttgtttcaatgctgaaataaagaaactctaagagagtaggtagaaagcagtgcttggctggaggatatttaataagtgttcaactttagaatgaatgggtttcttgctttgttaacttcttgaaaatgccagtgtctttaatgataccatttaatagaggtaatctgtagtggaacattatttagtgacaccacattttcaattcaatagccatttatttgcttttgtaaattctctgtattttctcatattcccaaagacttttttcagttttctaagtgaattaatttctttgagtagaatataaaatagtaatattaaaaaatatggcccctcatgctatccacttgagttttaagatggttaggttttttcgtattactgactggctaaaaggagaatttgatcctggagaatttgatttgagttttagatataaaggcttatattttaccccccttttcttaaattttttgtcaagcaccccccttctacagctgacaaaactaagatacttcttaatattggattaagcttttgttattatatattagttttctgtgttatctttctagtcatatctagtaatgttaagcttcattttgtcttgtacttacttggatttgcagctttaagatgcttatcattagggctgaatcttatttctctggaggatactgactctttaaatggctgtaaaaatcattgagcgcctactcgataccaagacattctcttctaagaagagacttctttctttaccatatactgtctacctttggtcacagcagttttgaggcttgggagctatttgttctattcctttttttgtgcttgttcacttttttctttcaaaaaactttgcagattttttttttttttgagtcagggtcttgctctgttgcccaggatgaagtgcaagcagcacaatcatagcttactgcaggcttgagctcctggggttaagtgatcctcctgcctcagcctcccgagtagcggggactataggctacaggtgccgccgcacccaaactttatttgttttataaaacactagtttttagaatataaaacttggtgaatagtatcactatgtataattcttgagtctcaagtgtaaacacatcaaaatgcgtttcgtagggagtatatattcagggcaacttgaatctatgctcctgagaaaaataaatttagaaaaccgacaaaaacccaaaatgcatttcataaattgtacaagaagatttgaagtaattaaaaaatgatggagcaaactttcacaagcctgtttttttagttgttggttcctaatttggcatcagtctgtactgagttgatgcttcagtaggtttgagacaggaataatacagggtggtcacaggagaacagaaaattccaggcagcaattttacatgactagcataaaggaaactattgaaatagctgcataaactaggggctgacaagaccttaaaaaaccagagtgtgggccaagctggctaagactgacccagcatggcactggatttgacctaggtttcacctaggatctcattatatgctcattaacatactaaatcacatacccaccagcaccatgcagttccaggaacacccatatttggtgtagaaatgggtggcactacagttctgagaaatcgtaactgttttcctggaatcttcctgaatattccatgctttgcgtaaagaaacccataaagatggaagtaccaacccgcttggtacaaccttctcttgagtatacccacacccccctttcttgagtttataattttcgctttgtcataaatctccstactttcactgtttctgactcattcytgaatttctccttgtgatagtgtcaagagcctggacaccagctgagggagaggtctcactgctctttggggacttcccccagcccgctggtattcagacctttccaaaatctgagtgtctgttgtggaatcatatagagagaaatttttcttggtcattagagtaaagtatrtgcaaattcttttcttcttttccatagctcactgctatttggggacttccctcagcccactggtattcagacctttccgaaatctgagtctctgatgtggaaccatatagagataaatttttcttggtcattagagtaaaggtatatgcaaattcttttcttcttttccatagaatgtttgctcaggaccagctgcataatttacagggcctcttcaagaggtgatttagaaaactatacattttctttacttttattttattattttttttttgagacagagtctcactctgatgcccaggctagagtgcagtgtcgtgatctcagctcactacaacctccacctcccgggttcaaccgattctcctgcctcagcctcctgagtagctgggactacaggcacccgccaccacgcccggctaatttttgtatttttagtagaggcggggtttcaccatattggccaggctggtctcgaactcctgacctcaaatgatatacccgcctcggcctcccaaagtgctgggattacagaagtgagtcactgtgcctaactgaaaactatacgttttctaattgtgctgcataattgtatattttgtgatttgtatttgatgaaaatatgtccacgctggaatttaaaataaactgttttacaatggtatttttgtgtcctaacttaaggtctggttaaggagtgtcatggttcaaactrtttttattataggtttaaataaaataaaaacaaaacaccgtggggccaaaagatgggaaagggactttgttggagctgatagttttattattttcaaacattgaaatcttgtagagatagacttttcaaattaatcctgagttgttaattttaaactttgtgattatctcactcttgagataatcctataaaccttttcagacataatcattgaggttagctaaaactacttttagcaaaagccatatgcttgttttcccagtgggtgaaattgagcactgacttttagagtcactaatgttttagtgaaactgcttaaatttcaaggtagaccttagtgactttctatatgtatgaaggtattacttgactgttttataaaataagaaccgtaattggcgtagactttcagatgagattgggaacattcagggtggtatggccgtaggcagtatggactttcagatagcagctataactgttagtaataagagtaggactgtcaggccactctgcccaggctaagccatcatatctcctgtgacctgcccgtatacatccagatggcctgaagcaactgaagaaccatgaaagatgacattcaaccattgtaatctgttcctgccccaccctaactgatcaattgaccttatgacaatacaccctccccgcccttgcgatcatgtactttgtgatatttccctgcccttaagaaggtactttgcgcctgtaatcccagcacttcgggaggccgaggtgggcagatcacgaggtcaggagatcgagaccatcctggctaacacagtgaaaccccgtctctgctaaaaatacaaaaaaattagccgggcgtggtggcgggcgactgtagtcccagctactcyggaggctgaggaaggagaatggcgtgaacccgggaggcggaacttgcagtgagccgagattgtgccactgcacgccagcctgggggacagagcgagactccgtttcaaaagaaaaaaaaatactttgtaatattctccctgcgcttgagaatgtactttgtgagatccaccccctgcccacaaaaatttgttcctaattccactgcctatcccaaacctgtaagaactaatgataatcctaccaccctttgctgamtcttttcttggactcagcccgcctgcacccaggtgaaacaaacagccttgttgctcacacaaagcctgtttggtggactctcttcacacggatgcgtgtgacaatgactgtacttttaacagatgagaagtttgatgggagttgaaactagaacttttttttttcctcctgaataggaaaaatcggaacattctttaaggtccagcttttctcaccctgccccacctttttaaaaaaattgttgcttattgccaatagactagcaagtggttgaacagtttccttggcaagaggtgccaggtgactgactaatgccatcgtaaagcacatgcccttgatcacatcatatggacttgatctccttggaggctaattatatttagggacattttagtactttcaaggaacctcagactttgctgaggttgaaaacactggtgacctccctttggttataagagagaccaggagttcatatgcattccttcagaaaaatatttgaaaaatataacactgaccttgggagattagtgcatatgatcttgattttatgatcttttctagagacactgcaccactgcagccactgcctcaatcatgatacagaacttttacatcacatgagaaagttcctttatgcacygcttctagttagtctttctctgccctaatccaaactactattctctttcctatcactaaaaattagtttcrtccttgaacttcatgtaaatggaatcatacaatattcttttctaacttgttgctttgagtcaacatcatgcttttgagacttatccaggttgtatcagtaagtagtttgttcatttttattgctgagtatggcaatccattatagaaatataccacaatttgtttatctgatcacttactggatatttggggttgtttccagtttggggctgttatgagtaaggttgctgtgaacatttgtgtccagacctttttgtgataatgtgctttcatttctcttgggtaatacccaggagtagaattgttggatcataggataaatgtrtgcttaacctcataagcagttgccaaactgtcctccaaagtggtaatgccattttacactttacgagccgtgtatgaattccagttactcgatgtcctcaccaacatttgctcttgccagtttctttaattttagttagtycagtggatgtaaaagggtatctcattgtggttttcattttttgtctccctgatgactgatttgagaatacttctcctacatgactttccttttcattttcttaatggtgtcttttgataagtagagatttttaaaataaaattttaattgtgggaaaatatgtatgacatttattaccatcttaaccattttaaaatgtacaattcagtggcatctctacaaaaaaataaaataattaaccagacatggtggtgagtgcctgtaatcctggctacttgggaggccatggtaggaagatcccttgagtcccaggagtctgaagttgcagtgagctacgattgtgccactgcaccccagtgtaggcaacagagtgagatgccatctcttaaaaagaaaaaacaaaaacaaaaacggtattttctatcttgaatgcctttagtttttggatatgttgacccttctgtgacaccttggtccacatgatgtatcaggcaaaattcacctccgatatttcacgtaggttcttttctattttccctaagtgtcagccagtctgagaaataaagggaaagactacaaaagagagaaattttaaagctgaatgtctaggggagatgtcacatgtcggcagcttccgtgatgacccctaagccacaaaaccagcaagtttttattagcgattttcaaaaggagagggagtgtacgaatagggtgtgggtcacagagatcacatgcttcatttgcttcacaaggtaataaaatatcacaaggcaaatggaggcagggcgagatcacaggaccacaggaccggggcaaaattaaaattgctaatgaagtttcgggcacgcattgtcattgataacatcttatcaggagacagggtttgagagcagacaacyggtctgaccaaaatttattaggcgggaatttcctcttcctaataagcctgggagcactacgggagactagggcttatttcatccctccgctacgaccgtaaaagayagccgtccccaaagcggccatttcagaggcttcccctcagggacgcattctctttctcagggatgttccttgctgagaaaaagaattcagcgatatttctcccatttgcttttgaaagaaaaatatggctctgttccatccggctcaccggcagtcagagtttaaggttatctctcttgttccctgaacattgctgttatcctgttcttttttcaaggtgcccagatttcatattgttcaaacacacatgctctacaaacaacttgtgcaattaatgcaatcatcacagggtcctgaggtgacatacatcctcctcagcttacgaagatgacaggattaaaagattaaagtaaagacaggcayaggaaatcacaagggtattggttggggaagtaataagtgtctgtgaaatcttcataatttatgttcagagattgcagtaaagacaggtgtaagaaattataaaagtattaatttggggaactaataaatgtccatgaaatcttcacaatttatgttctgtcatggcttcagctggtccctccgttcggggtccctgactttccgcaacaatgatgtgtgtatttttctttttttcttttttttttgagacagagtctcactctgtcacccaggctggagtgcagtggcgccatctcggctcactgcaagctctgcctcccaggttcatgccatwctcctgcctcagcctcctgagtagctgggactacaggcacctgccaccacgcccggctaatttttttgtatttttagtagagatagggtttcaccatgttagccaggatggtctcgatctgacctcgtgatcygcccgtctcggcctcccaaagtgctgggmttacaggcgtgagccaccgcgcctggccttgatgtgtgtatttttcttgtctacgtttgccactcttttagtatataagtttataagttcatagaaattttagctgaagtttttggagaaggtgtgttgggtaaggtgagcttgtcagggaaggaaggaattggtatgttatgactattccagatctactttgaatctgtatcctatgacttaaaggattattttgctatgtctcatatagcaaaatgaggctcttatagtcttagaacatgatagacttttagtttaggcattttgcttccccttccccacccccaaaccccacccccaatgccagctccttcatgtggacaacttttttttttctttctttctttcttgagacaaggtctggctcgattgcccaggctggagtgtagtagcacgatcttggctcattgcaaactctgcctcctgggcttacgccattctcccacctcagctgcccgagtagctgggactacaggtatgcaccaccatgactggctaatttttttttgtagagatgggattttgccatgttgcctaggctgttctcgaacttgtgagctcaggtgatcctcccgccttggcatcccaaagtggtgggattacaggtgtgagccactgcatccggcctccgtgtggacaacttaaggcaagagctagmggggtcttaaagcccagaagagtgagaacagtgtttcgtggttccttttgagacattaatatcttttagattggtgcaaaagtaattgtggtttttgccattaaaaatgatggcaaaaactgtaattacttttgcaccaatctaatacttatctccactgcttttatctaccccaagaacttgtcattgtcctaggggagaattaacttttacttctwtctgacttacgtgttagttttgtgatgttttattctagattaagtatcctcacwtaaagtcatgtttttgataataggggaaaaagtcagacttttacttttgtcttttcttcctacccccacaagaagacaggaagtagatagagatcaaattgagttggaggaggatagtatttgtggacttccaaacaaattcttttatcctcaggacatatgtagcttggtatgcagaggcagcatgacttttggaaattaggtgctgttctttttcttatttctgttacattttaaagttttgcaagctactttgctcggttatctttaatgttgtatgttagccagttgattagtgactttttattgtgataaaactttatttgcagtagatctttacaaactgagatcacagaacatgtaaactcattagaactgttattttcaattggtgtatttctgatttaagcttttcttttagaaatgtttacttttatatttgctaaatagatatttcagtcattgattcaatgaataaactgtataaataggttcattgctgaaattgctgctgtgtgtgatttataataatagcagatttctccataatcaaagtaaatacaatatccacattttatttctggaaatgaattgtttaaatattattttttagacagggtctcctctgtcacccaggctggagtgcagagggatgatcaccactcactgcatcctcagcctcctggactcgagtgattctctagcctcagccttctaagtagctggggccacaggcacgtgccatgaggcctggcgaatttttcatagaggtgggattttgccgtgttgcccaggctggtctcgaactcctaggctccagcagttctcctgcctcgccctcttaaagtgktggaattacagttgtgagccactgcacccagcctggaaatgtaaataattataatgacatgtagtaagcattataaataagaataactatattgaaatggcacagtgaactctgcagggaagcttttgcagtaaaaatgttttcaagctggccaggtgcggtggcttacatctgtaatctcaacactttgagaggccaaggtgggaggatagcttgaagctagtttgacaccagcctgggtaaagcgagatccctgtctctataaaaaattaaaaaaaaaaaatgtagccaggcatggtggtatatgtctgtggtcccagctacttgggaggctgagacagtaggattgcttgagtctgggatcctgaggctgcagtaagctgtgatcgtgccactgcattccagcctgggcaacagagtgagactccagtctttaaaatgaaaaagaaaaaaaaaaaaaaaatttcgagccaagaattgaaggacacatgggccttgtccagatggataaagtgggatgagggaatcaggcaaagataatagcagttaaaaaaaatttatggatgaaaaaattttaaaagcagtcccaacttgtttaatttggaaatgtaatgtcagagggtttattttttggagagaaattttaggaaaacttctattgaaggactacgacagggagtgttaaaagatttgaccagagtagttatgttataaattcaattgtaaaacttgtgtgtgtgtgtatatatttgtgtgtgtgtgtgtgtaaggtaatcaaggtataattaaatataagcaaatgtttgagagtcaatttgatggaaaaagtggcagtgatactgataacatgcaatggaaagatgagaattaggcatttcaaagaaagcagtgaaaattggtgtcagattttgtcattggaaatagagtcaartggtttctagactggaatacctagaacaactgtgattcccaaaggagtattaaggagctgtggtggggagaagagagaggagagggaggcagatgatggattctgtttaggatagaggtaaaggtgctagattgacaacctagaggagatctggtaatctgtggtcatgtgctagcaatagcagtcagggttgagggttatttggggagctctctgctagtagctgagggctcgagagaaaggcttatcatttctgtgggaaggactgatcctgttgcatgtgcaccaggtcaggcctgttcatgaatggtttcagactgttaatggattagaaaaatgtcttatgaagaaaaatgagggaacaaggaatccggaggaaatgatttttgtagcagtttctctatatgaagaatttgtattagtattagggcaatatcattcaaacctctcattaatgtactacctgcatattttttttgcagtatctgtataccaaatgggagtgcatcttaaagacaatggcatgttatggttgaattggaaaagttttttttttttctagtggtatgtaaattaatagtgtgtcttgaatttgatggcatctcagactgaataaaaggtaaaattttaaaaatgctcagtagcgcaaatatagttcttaaaaagatacttgtttatgttctgtttaatctcagatatcaccaatgataatatataccacggcatggaaatactggtaatagagtactcccattgaaaaaataactatatgctttagaatatagggtttaggttagattgtaaggaaactgttgaagatgtaaatcattagaaaagaaaaagtgtaagttctttccaaggttcttatgtttccagcattttaacatatatacatgttctgactgaacagtagtagtgcagaatctgttatccaatcacaggtttgattttaccagagagcttggataaacatattatttctttctcctctttcygacatagctcctttgacaaatgatttttatgttggaaaatgcaagaaaaataagtagctcagattgactttggaaatgtaatattattcttaattcacaggcttgttggcaacttgagaattccaattatttgtctgtgtggattgttttttttaaatgctgaattgtatagtacttaagtttttgatgtataaacaatatacttaatatactccataatgtatgaggataggtttctattaggctgtatgtttgaraaagttttcctcttatgacaaaagttaatttagycagtatgctaaattaaaaaaaaaaaacaaaaaaccctgcctcccagttttctgagttaagtaaaatgatggtgtaagaattttttaaattcaaggtttggtctgtctgaatttttctgagtcattgatttaaatgcagttacttaaaagcatacggggagaaattccttttactacttgttagctctgatttaacttggtacttttgccttccttaagtaaagcatgttgatgaattctactttttggctttagctgaaaaagttcattttcttcctgtatgtatttggatggcagtcacatgtattcctctagtttacatgagataaatattactaattttaaaaaggtgggtcttttctgggggtawgttgaattgaagatggtgttcaggtcaagacagtttctggtcttttggccatttaataatctgagaattgctttgaaagggtaggtatttgagctcatcatttaaacagagcctgcattgtggtgtgtggttattggaggttgttggtgttttcattggcgtgttttcaaaaatatgagtagccccctacctaaatgccagaatacaaattttaactaggccagtagaagaggggattattttcatttcacatagcctctagtatttgaattttgtctgtctttgaatgtacctcttggctagctagagttggacagttttcaattgtgatgacagcagttaaaaattcaaatctgttccttttcattgttgagttgtatgcttaaagaatgcatctgcattttcattcagctttctggtccttgtcgatttttgatgtctgttattctgcataaaactgtgtggcaggcgccagaacttttaagaatctttttgtttacagatggggagacaataacattaacattcattaacattcaaaataaaacattcttatactgataagcagtatgcaggttagctaggtttgggatactgatagatattttttkagtgtagtttacttccaaatgtcttctagaatttatgtttaatatctcaaatacctacacagaataggaatggcatgcttatttatacatgggcgtactcttgagttctaatggcaagccagccttcaaattaagttgtcttcctggaaaagaaacctcttaggcaactgtgaagggagagggataatataaaaaggatggagtttagaaatttgtctttttgtggtaagatctagaaacaaagcatattagaataagcagtgtaaattttgcacctttcaaaaagatactgatgtttttatcatgaaataataaaaacatattattgtctaaaaaaaaaaagccaaaaaacccagccaggtgctatgactcatgcctgtaattccaacactttgggaggctgaggcaggaggattgcttgagcctaggagttcaagaccaatgagaccacatctctacaaaaaaccacaacagtaaaaatgagccgggcatggtggcatgtgtctgtagtcccaactactcaggaggctggagtgagaggatcgcttgagcctgaaaggttgatgctgcagtgagccacaatcatgccactgcactctagcctgggcgacagcgaggccctgtcttaaaacacacacacacacacacacacacacacacacacacacacacacacacccccccccccccccgaggccctgtcttaaaacacacacacatgcgtgcgcgtgcacgcgcgccaggcgtggtggctcatgcctgtaatcccagcactttgggaggccaaggcgggcagatcacctgaggtcaggagttcgagaccagcctggccaacatggtgaaacaccccatctgtactaaaagtacaaaaattagcctggtgtggtggcggtggcaggcacatgtagtcccagctattcaggaggctgaagcaggagaatcgctggaacccaggaggcagaggttgcagtgagccgagatcatgccactgcactcaagcctgggtgataaagtaagactctgtcccccgcgcccccccccaaaaaaaaaaaacaacacacgtacacataaacccacaaaaaacacacacattccacatttctggcctttgctgcctgtctcattgattagttttctgttgagtacgtgagaataggagctcttaatttaagccttattaaaaaaaaactttttgagaacctgtttttaaaactactcctcttcgtggagattgattattttgggtctttttgtccaagaaaatgaaattaagattttattctttgattggtatgagggaggaaggagagtcgtcagtctagtgttaaagataaaattatgtatgtttaagaggggcagaagtcatcacaagattataattaggaaaatttaagtttccatacttccaaggaagtatgaatttctagaatatcttttatttccatttgatttaggcattgctrttgaagacactgatttggggcaaggtgtcggggagaacaggaggaattgtagttaacttctttcctcttcaccagaggttaactgagagcaagaagcaggacatgaatgagtgtgcaagaatttgccttctgttaatttcccaaaggtagaccttggaaatagtcaaaagaacaaaagtcaggaaacctttttccgaggctggagctagtctttctgatctttccaaagcagttataaatattgaagtacctctggcacttagataaaatgattctgcgtggctttaaactcagttaatttctaatgcttgaatgtctggattttctatgatttctgaacaactcagatttaagtatgtcttttgttttctgtgaaattataagggttttttccttaggagatagggaacatttctgttttttatttttttatttwtttttttattttttgagatggaatttcactctgtcgcccaggctggagtgcagtggcgtgatctcagctcactgcaacctccgcctcctgggttcaagcaattctgctgcctcagcctcctgagtagctgggattacagatgcacaccaccatgcccagataatttttgtatttttagtagagacggggtttcaccatgttagtcaggccggtctcaaactcctcaccgcgtgatctgcccatctcagcctcccagagtactgggattataggcatgggccaccaccacgactggctgggaacatttctttcagatggtaaacctaaatgctgccttataaaattagattttaaactcttaatttctatagtaaaataatgcctaccttgtgatatttcatagaggacatagattcagaaaataactttacagattacttacagaacttccttaccatcttgttaatgatatatcagtatatctgagttaaaagtataaagtgggccgggcgcagtggcttacgcctgtaatcctagcacgttgggaggccgaggcaggtggatcacgaggtcaagagatggagaccatcctggcccacgtggtgaaaccccgtctctactgaaaatacaaaaattagctgggcgtggtggcatgagcttgtaatctcagctacttgggaggctgaggcaggagaattgcttgaacccaggaggcagaggttgcagtgagccaagatcgcgccattgcactccagcctggccatagagtgagactcagtctcaaaaaaaaagtataaagtgaatgtgttctgcatgtagaagggaatataaggagcaaatcagaacatatacttttatattcattcttaaaaatttaatttttaccgtttttagcagattgtatgtgatctttggttttaatctcttctgctgctaaagatattatatatggctgatattcccctaccccctatctcttgtataagggttgagtttaaaaggaaaatgcttgtaaaataagttatttagaagggtaacaatgaaatttgttaaggttggtttacttacagttaatcttttctgagaacatggtcagggctgcctcctcttccctgttgagatgtataaagcaataaggtgcatgtgaaatgcaaccagcctgttgtctaaaaatgttagtgtgtaattactttgcttttcatttctcacatttttgggtttacatctggaaacgccactaaatgaagacgagtgatttttaagcattaatcactaacctactgtttcagattctgtctattgcagaacttcttttgaagaatgtatttagaacctttcccacattaaaaaggtcaatttatgtaaatgaagaataaacaacatactctgtacctcgtatgtagttacatacttacacatgattgatcttttggtcattatctattgaaacagagttttcacttgttaatagtggaaattatcttaagtgttgctggttcaagtgatttattacaagtaaaggttttttttttttttttttgagacagtctctcactctatcaagtggagtgtcgtgtagtggctcgatcatggctcactgcaacctctgcctcctgggctgaagtaatccgcccacctcagcctcctagtagctgggactacaagcatgtgccaccacgcccagctaatttttgtgggtttttttgtagatgatggtttcatcatgttgccgaggctggtctcgaactcctaggctgaagccatctacccgccttgagtaaaggttttttgatacaagaaatgattataacttggagttcagcttggattctgacaacttactagatttttttccccctcgggagaggatggttgtttcttgcttaggaaatgataatattttagcagcttatctgtgccccacagctggcagagtaatgcagtatgctgatcatgaagttgcatctggaaccctgaaaacttccagaccttaatgtttccaaagagatagaaaagacacatagcttctggtgtgtgtgtgtgtttttttttttaaaatcatgttagttggaggtctcattgaaccaggacaatgacagaattttatatttatatttgttttatctttttcaatgcatggtcatcaatagggaaaaagtcacactaggagcgttgagccctgtgaggatatcacacctgaccctggaatggcagttgtgtaagggtaggaactttgttttgttcattgctgtatttctagttcctagaatagtgcccatcactcagaaaaacacgwtgaatgaacatccaccacttaccacagtagctgaatgtagccatgcttttaactctctgctcgtctgttttcatttatagttgacttcaacaacagaggttttagaaaatttgagcagggagtaagactaacctatagtagttttacacagtgggttttggttaatgctcatgattaatttctcttcccaccatagaatggtcttacccaacatgctacagaattctagtttctgatatgtgaaaagttaatagacataagaaaggaaacactaacaagctgaaaaaaatcacctaaaattgtggcggttgtaaatctacttcttaaaattttgcacctcttgaatttttaaaatactgcstctacactcaaatttttctctggatctgtttcttaatattaaatgcatgtgtaaaaaaatctattttaacagcgaaagtgaaaagattgttttaaaattattcagtgttgccttcttaaggttttgactcttaattatcgttcatttgaaagacaagactatgtagaaagtattctgttgttcttttgaagttaaagtgtatctcagccaaaaaagtgctgctttagtccccagtacccctcaacattttaggaggcctggccagagcctcttagttttccctcatgaatttggttcagacttactagtttttgtagctggggttcttttattatataaacggtacaaattggtgtgcctctttgcccttgttgaagctgatgtgctaggtggcacatcgatgatcacataaacagttctgtgtaggtgctaaatatgtccattcctttttggccttcttagggcctctgtgcccttcgttttagtcattacctcattattttacagaaagggacttagagtatattgtgttaggtccccctctccagtgaaagctgcatgatgatatccaatactgtagtatttaataatttagtatatttttactccttcagggttatcttttacaatggacaaaatcctgtccatatgggacaatatgtgtaccaatatgtgatggtgaaagttttaccctcttatttcagataacttccagaaaggtgtatttatttatacccctcttggagatggaacctaacaaccctgcccacccctcttccctgtttgtctgttcgttagtgcttaatgtgtttaagcatcccttgttatttttaggtaattgcttagatttaatgcaaccacattacattctgctacctctactaatacgtgaatgttcaaggttacccaaacataactactcttattccttaaggtatatacatgactggtatcatgggaaggtaccttatggtaccagagagcttctttcagactcacctctacttggccctttttttttctttcaaatgagtctttttttttttttttttttttttttgkctcttaaatttaaaagagacgaggtctcactgtcatccaggctgagagtacagcattgtaatcatagctcgctgcaacctcggactcctgggctcaagcaaccctcctgcctcagcctcccgagtacctgggactacaaatgtgtgccaccatggctggctaattaaaaaattttattttattttatttttattttttgtagagatgggggtatttctttgttgtataggctggtctcaagcagtcctcccacttcggcctcccagagtgctaagattataggcatgagccaccacgccctgtctacatggcccttatctgacaaatagtcctaagaggcatgagcagtttttaatttgctcgcaatgtttcacaatgacacactgtttctaaccaagcagatgtttgactgtggttactgggaagaatagtctttgccagcattaagcccacctacycgaaccttttctgttgaatctctcgtttggtccatctcttggaagttaatcagcacctgtggaaactttacacaaacacttctgtattactgaagatacctcatctttttgacagaataaattatcacgtgatttttagaacatgtcagatagcttttacagcagatatagtgattttcctgaattaaatctagcaccatcaattcattcttgcccttcgacttgacctgtctcttgaaccatttctcccccaatttacctgttggacgtacatctacttgggaggtcactgttaaagccagcatatcatagctcgataacttcattgggatctacccttcatttcttaatgataatatcctttttctagttaccataagccttaaaatttttcagttatttttaacaacttgctctgcttcctttttttccattattttgttggttgttgttgttcttgtgacaatctagggtcttactttgttggccaggctggagtgcagtggcaccattgtggctcactgcagccttgacctcccgggcccaagccatcctcccatctcagccttctgagtagctaggaccacaggtgtgtactgctatgcccagctttttaaatttttatagagatgaggtcttcccatgttgcctggactggtcttgagctcctggctccagtgatcctcctgcstcagcctcccaaagtgttgggattagaggtatgagtcattgcacccggccagacataatttttaaaaagcaatataatgtccttgctctaataaaaaggaaaaataaaaaggaaaataatttgtaatagtatatatttcatgcaaatactcaggtagaattatactcttgcaggaaaaggttctacagatttacaaatccctcaactttcctgctgtactatgttgtatttaatacttagttaagcaacttaatagcaagactggtcttcatactaaatacttaatagcaagactggtcttcatactaaatacagttcgtctctgaagttgcaaattatgagtagctattttcattgtcatatagtgtgtgtgaataatatggcctgagttataaaacataaaagttattggggagacaaaaatattatgtttaaaatggttaagacacttcattgttgcatatttagctttcctttatggttcttagttaataatgtaccatattttactgactttttttttcttttcttttttgagatggaatctcacactgtcgccaaggctggagcgcagtggcgcaatctcagctcactgcaacctccacctcccgggtttgagtgattcttgtgcctcagcctcctgagtagctgggactacaggtgtgccccaccacacccagctaatttttgtatttttagtagagctggggtttcgctgtgttggccaggctggtcttgaactcttgacctcaggtgatccacccaccttggcctcccaaagtgctgggattacaggcatgagccaccgcgcctggccttgacttcttaatttcagagttttgatattctgagcaatcttgttcatttatgtgactccatgtcatttaaacagctcaaatggatgagtcgtgtttgcacaactttagagaaattgtcacaaaggaacaggtcggttagatgttttgtctctgtaaagttcagattgttgcctactggtgacaagaattctttgtttttgttttgtttttttgagacagagtctcactttattgcccaggctggagtgcagtggcgtgatctcggctcactgaaacctccacgtctcgtgttcaagtaattgtcctgcctcagcctcctgaatagctgggatcacaggcgcatgccaccacacccagctaatttttgtatttttagtagagacggggttttgccatgttcaccaggctggtctctaactcctgacctcaagtgatccgcctgccttggcctcccaaagtgctgggattacaggtgtgagctaccgtgcctggctgaattctttgtttttctaccatattctccttaccctttttcttaaacaaaaggtcagatcccttgatagaagccaattatgtgtacaaaacaccttaaaataagtccaagcctggagtgtctgtgatctttttagttttgtaaagtacctgttcctgtattggcaacgatttacccaagaagccaccagaaatgatgcttgcttgactgagaaaaacttaaataagcctctctgtggggtttgaaaagctctgttctctacagttctgcaatttctgaaggcatgctaaggcttgactgggtctgttctgtgcagttataaacattctaaaatctgtggttgactaaatactccatgttgcaccaatttaaaaatctcattgtcatagcattatgactggtagagaaaggtcttgtggggagatctaagtggcttaacttgattcttaggatatttgtcattataaaataactgttttttcttttgcagacttccttgtgaaacctcctagtagaaaaagttcttgggacaaacttcatttggtaagtttgtttctcccctcctgccacccccgcccccctccaatactctctctgtgctgtttcgaggcaaggaaaaattaatttacaggttgatttttggggatctgtttgtcaatgtccatgattatttagatgagtttttctatgttcactttaatgtccttacatgtgattwtttttttttttcactaggactcataccaggtcactttttctatatataattgcactgtaatagtgtactggaaaacttgtatttaagttgagattttgagttgcagcactaatcatttgtctaaaataaatagatttatcaatctccagttgtatttatttatttatttatttatttatttatttatttatttattgatatattttttgagacagtcttgctgtgtttcccaggctggagtacagttaggtgattatagctcactgcagccttgaacccctgggctacagcaatcctcctgcctccgcctcccagttgctgggactacaggtgtgtgccatcaggcctggctagtttggaaactttttttgtagagacaggatctcgttctgttgcccaggctgatatagttcttttaaattcaaacttgcttcttgttttgagttttcttaaattggtatatatctatatgaaaaataagacctcttattactagagttagttcagcagttcccccttaccttcttttgctttccaaggttcagttatccaaggtccaaaagtactaaaatatcaagagagcaagaaagagagacactacacattcatatgactttcattatagtgtattgttgcttgttctattttgttattagttgttgttaatctgtcactgtttctaatttataaagtaaacttaatcataggtacatacgtagaggaaaaactatatatatatatatgtatgtagttttcagtactacctgtagtttcagggatccacagggggtcttggaacatattccccgaggataaggcaggggattactgtagtgcaaatatgaattttaatgagaaaaacaagttctgaaaaatttgcgagttctttctccagtgtggctactaaaccttgtcctttttcaaaaaatgtccttttcatagacctttgtgtgtctcttactaggtaaatctttattagtgcctcttgtttctgccacctgtttagggaactgtagtacagttttattagaagacaagttattgccttggttttaagttcctaaatccagatcatttccttgttcaggaactgttgccttgctattgcctctagaacaaggatcaaactccttagcataacatttcaggttctttacaggtaggcttcaaacagcttgtcacctgttttctctgtgtaccaagttcatctcttgtagccacaccgacctacctcctgtctctcaaatactctccaaggtgcttttttgtcttactctgccgccatgccattcctgctcccctcttgtctcagtggctcaaaatttggctggttcagttattaaaagcttgagtcttccagaaagtcttccttaagtgcccagctcagaatctctttctctgctttttgcattaccatggaattaaatttctgtatctcttaacatactcttgtcttattagttatatttgttggtcacccccacaggattgggaatgcccttgaaggcaagaactatattgatatttgaattgtcagttcacagaaacactcctagactcctgggataccaatgccttctcagtataaattcttcttgactagggtttttgttttggtaagaataggggaggagaatagattggttttagtagagattggtcagcatagtcttgttgatttaggttactgttttttccccacttttctgtatagtggaggatcatagggtatatataatctgtgcccttgtagtccaagttgctccgtgtattacttgaggtattctttgcaagtataagttttagtttttgataaggaattgagtaatttctctttaacaggtgcctgaaagatgagattccatgttcagtaggaagattaaatgttggtttgcttctgtaaagatttctgagaagtcatatcatggggtggtactgatgatggagctgagagaagcatgcaggttccagctgtcaaattctcatatattaaggaaagaaaggttatttcaccttcaggcttggaataggaatcttaatcttcatttagccaggggggtgggggagtgttgcagattagatctgtagtgaaggaaatgtaatcctttttattttatttacgtatttatttttgagacagagtcttgttctgtcacccaggctggagtgtggtggcgcgacctcrgctcactgcagcctccacctgctgggttcaagcaattctcctgcctcagcttcctgagtagctgggattacaggcatgctccaccactcctggctaatttttgtgtttttagtagagacggggtttcactatgttggccaggctggtctcgaactcctgatttccagtgatccatctgtctcagactcccaaagtgctgggattacagatgtgtgccactgtgctggccagaaacgtartaacatattacttggctctgtagcatttaatatttgtattgccataataatgtaaatttgtaaaagtgttaatttttttttttttttttttgacacaaggtctcactcttgcccatgttggaatgcagtggtgtgatcatgggtcactgcagcctcgatctcctgggctcaagtgatcctcccacctcagcctcctgagtaggtgggactatgggcatgtaccaccttgctaggctaatttgtttttatttttatttttgtggagactagggtctcattatgttgctcagggtggtcttgaactcctgggcccaagtgatcctcctgcctcagcctctcatagtgttggtcttacaggtgtgagccactgcccctggccacgttcttatctgaagaagcatgatctaggtttgaagagaaagatgtaaatgtatttaattttgatgccaggaaacatactgtttaattaatatgtgccccagattaaaggagactaaagagatataaaaatagcttcaatatatgatcccagactagatcctttaccaaaggggggaatattgctgtgaaggataaaggatatgattggattcattgacaaaattggaatagatatggtagattattatatcagtgttaaattttctgaaattgaaactagaactgtggttatatgagagattatctttcttaggaaatacatactgaagtagtaagaattaaagagatatttgtatgcaagcctcttttaaatggttcaaaaaaaatgcacgtgcatatgcgcgaacaaaaaaggagacagtgttggaaactgtcctatccaaattctctgtaatgaaacatttaatgaagtacagtctttatataaccatgtgttgtcatatgtatgtacatgtacatactaatttaaaaagtgcttattacatgccagtaactattctaagcatgttatatgcattatatcttaattctcacaattctttgatgcaatgattgttctccttgttttctcgatgaagaaactgaggctcagagaggtagtatgatttgctctcaaggtcatagagttagtatatggcagccctgagggccattgctttacattcctgattgttttttcttgaggctattatcttaacactctgagtttaaatgaaaacctttcattaaaacttattttgagttttctgtttaaaagctttttttgtagaaaaatttgttatcctaattgcaaatgttttaaaagtttaaaaactgaaagttgctgctcccactctcttccctaggaaggtagattgttaaccattatatagttttttgtgtatgtataaacatactttggaattaatacagacaatgcttaggcatatttttattttaacttttaaaattacagaacattgaaaacttatggcaagttgataaatatgtgttgtgttttttttaaatagaagagtatgtagtctttggcaataataacccctctgcaacccttcccccaaatttatatgcttttacctagtatattcatttttaagaataattagggctacagaaatagcgacttgtgcatagatatggataagggtggttgttgcggcttttttggtggcaatggaaaaatggaaacaacctaaatgtctcactaattgatggatggttaagttatgatacattggggtataatggaatactgaactgccatatgtatatactgacataggagggatttgttatattaattaaagaatatatactgaagaaactacagtatggctaccccaccccacccattttgggggtagataatgtgtgtctttgtacactcatgtgccacataatgatgttttggttagcaacagacccaagatacgatggtagcctcatgagattaaaatggaactgaaaaataactatcacctagtggagttgtagttgtcataatgtcttggtacaattactttttaaaaataaacttagtgtagcctagttgtatagtgtttataaagtctgtagaagtgtacagtaatgtcctaggccttcacacattcactcactactcactgacatacccagagcaacttccagtcctacaagcaccattcatggtaagtgttgtcctatrcaagtgtaccattttaatcttttgtatcatttttactgtatcttctctgtttatgtatgtttagatatacaaatagggagcactgtgttacagttacctacagtattcagtacagtaacatgctgtgcaggtttgtagcctaggaacaacaggctataccatatagcctaggtgtgtagtagactgtcccatctaggtttgtataaatacctctgtgatgtttgcacaacagctaaatctgctaatgatgcatttctcaaaacatgtctccattgttaagcgaagcttgactgtatgtgcatagagaactgtctggatagacttatgaaatagttaacagttgctatatttacatgtagatgaactaaagggcagtaaggagtgaaaagcgaacttctgcttaccaattttttttaaataagtttaactcagatatattaataacataaaattcacatactatacaattcacccatttaaagtgtacagttcagtggctcagtatattcacgaagttgtgtagccatcaccacagtccattttaggaccttttcctcacctcagaaacttcaggccaggtgtggtggctaatgactgtaatcccagcagtttgggaggccaaggtgagaggattgtttgaggttgggaatttgagaccagcctggacaacatggtgtgagcctccccttttccccccacaaaaataaaaatagccgggtgtggtggcttgcacctgtggtcctggctactctggaggctgaggcaggaagatcgctggagcccaggaggttgaggccgccgtgaaccatgatcctgtgattacagcactgcaactccagcctgggcagcagagcaagaccctgtctccaaaacaaaacagaacttcatagctgtcaacctctcttaccgtcggtctttcccagctcctggcacccactaatctgctttctaagattttcctgttctggacatttcatataaatgatatcataacaatatgtggtcttttgtgactcgcttcatcatttagcataatgtttttaaggttcattcaygttgaagcatgtatcagtacttcattcctttctctcttttttcttttttttttttttttgagacagggtctcactctgttgcctaggcttctggtgtgccgtggcatgaagatctgggctcactgaaacctcgccactgcatcctgggctcaagtgatcctcccactttcagcctcccgagtagctgggactacaggcacatgccagcacgtccagctagtttttgtattttttatctttttttcttttattattattttatagagatggtgttttgccatgttgcccgggctggtcccgaactcctggccttgagtgatccacctccctggacttcccaaagtgctgggattacaggcatgagccaccatgcctggctcaatttttgtgttttttgtagaggtggggtttcaccatattgcccaggctggtctcaaacacctgggtaaaagcagtgtgctgactacatcttttcaaagtgttgggattataggcatgagccactgtgtctggccacttaattcctttttttttttttttttgagatgagtcttgctctgtcaccaggctggagggcaatggtgcgatctcggctcactgcaacctctgtctctcgggttcaagtgattctcctgcgtcagcctcccaagtagctgggactataggcatgcactgccatgcccagctaatttttgtacttttagtagagatggggtttcaccgttggccgggatggtctcgatctcttgaccttgtgatctgccctcttcagcctcccaaaatgctgggattacaggtgtgagccactgtgcccagcccacttaattcctttctatggccaaataatttgccattgtttagatatgccacattctgtttattcatccatctgttgatggacatttggtttcagtgagcctagatcttcacgccactgcacaccagtagcctgggtgagagtgagaccctgtagtggaaaaaaaaaaaaagaggaatgaagtactaatacgtgcttcaaaatagcccatcccacctttgggctactttgaataaatctgctataaacatgtatttgcaagattttacatggacatgtttttgttttcttggatatatacctaggagtaagattgttgagtcaaatggtaactctgtgtttaattgagcaactgccaggctatttttcaaagaggctgcactattttacattctcactagcagagtatgaggttacttgtttactttttacatctgtatcttatttactgagtgcatgcattactcgtatatctaattttaagaagtattacactgcttatcagactaacagtaatgactcaatttcttccttttgtactgttggtataactaccactgtggggttcacattttacaagtcaggtgctgtaatgaaccctgaatatttcctaaggattggtcacatctgcgatttgtagtgttttttgtttgtttgtttgtttgttattttacataatacccagagtggtctaatgctctttctagttttaaaaggaacctttagcaagtacttgattctgatgggttgcacagtttcctgtgatcttggctttttcttatggatttggaattcctatagcagttttaacttttctcagatacttaaagcagcacctcttactttgaactattttaactatttcttgtctcctctggactgtaagttctttaatctccctttgctgccacatctaggcctctacctaaacctgtgagttacacaccaggatatctttcacatacttaggcttttatccgtactgcctccattctaaatcaagccactagtctcttactgtaattgtctcctggttctcttctttattctttttctcttttaatccattcaccccacatcaaccagggtgatcttaaaatcaaatcacgtcactctgctatttaaaacctrtcaatggctccctgttgtatttggactgtattttaaacttactactattcacatgatcttttsctttacatttctccaacttcaagttgtgccactcttctttctgattcrgtacagtttagctacaatggtttcctccttttagttcttcaaaattatcaaggtctttcctgtctgaggaacmcatgcacttccgtatattagaaactggccttgccccaccaagtagtcttttctgatcactttatctaaagtaggtcttcggtacccccaaaccccagtccctgtctcagcatcccgtttgtttcctttatcacatttagcacaatttgtaattattaccatctttttctgtcttctgcgatggtatataagttgtattaatgcagagctaacagtgtcatactgtctaacacatactagattattggtaaattttgactgactgcagtgcagaaagaacatcattttacagaatctatttggtatagaaatggaaggccttatttctgggtgaagactatgtttaaattgagacttttaatgccgagtggcaaatctttgtcttggtatttctgtactcattaaaaaattagagtaggccaggtgtggtggctcacacactttgggaggccaaggcaggcagatcacttgaggccagaaatttgagaccagcctgatcaacatggtgaaaccctgtctctactaaaaatacaaaaattagccaggcatggtggcatatgcctgtaatcccagctacttgagaggctgagacaccagaatcacttgaatccgggaggcagaggttgcagtgagctgagatcgcaccactgcactccagcctgagcgatagagcgagactctgtctcaaaaacaaaacaaaacaaaacaaattagatttgactgggaagatagcttatgtatatatatataatgtgactgcagattgagagtttattttgtaattggaatttgatttctagttcagtgtcactacagatgagtacattttagttgggacatccgggatgcttgtgagagttttttcagatttctctgaaaaaaatctgaaagacrtaacagtgcatattgataggcttactgtataaacagtggtttcatgagagataaaactttgactctttaaattaattcttcaataactggaggttttgaggtagaattgccattatggttaaaaaaactttatgtgaaaatttcaaatatataaaagtagagaaaatagtttaataaatctccattaacttatctcactggtcttcaaaagttaccaactcatgacccatcttgtttcagaggtactcctactcattctgcctactccttggtatataactttatgtattttatagttaaaagataaattctttttaaaaacccatcaccacacacaaaaacctataaccacagtaacattgtcaattatatagaaaattaataactccttaatatcatcagatatttagtatgtggtcagatttccctaatagatgtctcagcttatactttgaataagaatccaaataagatctatatattgcagttggttgacatggtcacttaagtctctcttaattctgtaggtttcccttctatgtcggtcttttgtcttgctatttaaagaataggggttattttcctgtagttttccatagactagattattatttgcatcttgtatttcattagcagttgtaaaatagtattatcaaattcttttctttgtatattaggtagaattcttccctcatcaactacttcattctatactagttcattttgtgtaagaaaggcgggatagatacttgattctttccccttacttgctagttttcaaaaataaaaggttagttccttaacatcttccactggtgacctgtaggggtgtgcgtgygtgtgtgtgtgtgtgtgtgtgtgtgtgtgtgtctgtctctgtgtgtgtgtgagagagagaatgtttctttatgaactcatatttaaacatcctgaaacccaatccattgcatttaaccattttgctcaaattatttcatttttagctagtgagtctcttcaaattgactcccaattatttctgacttaccctcagtagtcttttatatgtttcttacattccagtttaatatgatgtttcagaatcaaattgtacattttcttttctagacctggaattggttatattttctttcaggtgccccatcttcttttgaagtgggaattagtctttagggaccacagtctaggggcttagaatgctcattgctgctgggttgatactgtaacttttttgcagcgtttatttttatcttatgaagagtttgattatattgttactcttcacctctgttgtgtgtgtgtgtgtgtgtgtgtgtgtgtgtgcatgcgcgcgcgcgcgcatgttttttagagacaaggtcttgctctgtcactcaggctggagtgcagtagcataagctcactgcagccttgaactcctgagctcaagggatccttccacatcagcctcccaagtggctaggactacaggtgtgcacaaccacctaattttttttttttttcagtagagacagtcttgctatgttgcccaggctggcgttgaactctkgggctcaagctgtcttcctgtcctggcctcccaaattgctaggattataagagtgagccactgcacatggcttctgtatttttttttttttkagctataagtcatatcacataaaatccacccttttaaagtatacaattcagtggtttttagtatagtcataaagctgtagaaccattaccattacctaattccaaacatttcatcaccctgcaaaggtaccttgtacccattagcagtcactccctattcttccctcaacctggctcctggcaaccactaatctactttctgtctctgtggatttaccttttctggacatctcatacaaatggaatcacacaatatatggccttttgtgccccaggttctctcatttagcataatgttttcatctatgtgtgtcatgtatcagtattttattccattttattgctggataactccattatatatactgtgtgtgtgtgtgtgtgtgtgtgtgtgtgtgtattttttgtttgtttatccattcacattttgtttgtccattcattgattgatgcatatttgggttgtttgcacttttggccatcatgaataatgctgttacgaaaatttgtgtagaagtttttatgtggacataccttgtcagttctcttaggtatatacccaggagtggaactgatgggacatatgatgactctaaacttttttgggaactgccacacttttcctcagaggttgtaccactttacattcctgccggcagtgtatgggggtttcaccttcacattccayctacatctgacattagtatcttcctcactggagttayattttgttatttaatagttttgcaaaatgcattaaattcacttccatttaaattgtttaagatacagcagtttgaatgtgtcaatgatgctatctttagaaattttattctaaaacacaaatatcttttgtgtaatattaggacagttttttaaaagtaattcagtatgtttcttttttgaaaaggttctttataacagtatcccgttcttttaataagttcataccctcaaattttctctgcctttgcccttctcctttttaattccaataagtgcctttttgcacatctttaccttcctatctaaagtagcatttctgttacaccatcaccaaactctgcttaattttctttgcagcagttgcctactgcttaacattagttatctgtttctttgtttctaatgagaaagaccaacaataaaatcaagttccatgaatttctgttcacagtggtgtccccaaagtctacaacagtgcatggagtgtagaaaatattgaataaatatttattgaaaagaatgaataaatgagataattttacattagtttcagttcttgagctaggccaaatcacaaaagtttggcttggtttgaagagtggttaagaatgatgactccaacttggtctgttactgaaccataaggttcttcctcatccttccagcctctaaaaaatggtgcacccaaaacccctgtccttagtcatcttagcctctccatttatacttgctcctgcatttggctttaatgccattcacacactgatgtctcccacatttatgtttatatctctaggctccatcttcttgatmtctagtctggtttaactagcactttacttggcatctttgtttggatatgtgataggttttcaaacataatgtgtctaaaatggaaactttaatttcttgttccttgtccgttgagctgtctctgcatggcacgagaagaatagatttttcttacaatgctcttcatcaataaatagaaaatccttgcttccggttgctgacacaaaaagcttgacttctctttttctatcctatttaattaatccactcaaatcctatgggcagtattttcaaagtatatccagaatcagtaacatcccaccacttctatctctactaccttttcattgctatattgtctcttgctggggttaatgacgctttctaattggtcttcttttgccccttacccccagtagccttgactgttctctacccaacagccaaaatgattcttttttttgtttttttggtttttttttgagactgagtctcacactgtcacctgggctggatgtgcaatggcgtgatctcggctcactgcaacctctgcctcccaggttcacgttattctcctgtcttagcctcccgagtagctgggactacaggcacacacccccatgccctgctaattttttgtatttttagtagagatggggtttcactatgttggccaggctggtctcgaactcctgacctcgtgatctgcctgccttggcctcccaraatgctgggattacaggcgtgagccaccacacccggccaaaatgattctttagagtaagtcrtctcctaccattcctctgctcaaaatgcctcaacacaatctgggccttgctactgcttttatgttctcttgttcccttgcttacattgcccttaaaagagttttatgctgcacattgaagcccagactccctgaaatatcctgtgttacagaagcttagcaaactagaaatgttggttttgcatgagactgttcaaagaaaagagcaacttacttactctttgtataagcctatttttgggtttctagttggatattctttcccccttttttgttcttataaaaccaggtaaaggtattagtacagattgtaagtttttagaagagcatagaatatttgggtaataaggcaaatttatttttcctattttgctcgtaagtcagtttggtttcctcagatgggggatccattttgaatttagagataaccacaaaaacatcctaaaatactacaagaataatgattttgcatttgcaggttgatgttatttatttttttgagacagagtcttgctctgttgcccagactagagtgcagtggtgtaatcacagcatactacagccccaaccttccaggctcagttgatcctcccacctcatcctcctgagtaactgggactacaggcatgtgctgccatgaccagcttttttttttttttttttttttttttttgagacagagtttcactctgttgcccaggctggtctcaaacttctgagctcaggctatctgcctcagccttcgaaagtgctgggattataggcattaagccaccttgcctggcctgtaggttgattttaattgttgctttattcatccaagttttatgatattttttgttttactacgaacattaggaatgttagcctttgatactgtttttgcagaaacaggttaagactaacaggagttttacaaaggaactgtcaaattgggatttgactagtgggaattggctgggtgataatcaactttttcttggctgactctgatcagcttcttaggcctgtgtatatacaatacctttgtgaggatatgrccgattaggggaaaaactattgccaattttgcctcccctcctcttttttttttcttcttccccctcttcccccccacccccagacttcaccataagggaaagaagagagccttgttggacactgaagaagggacggggatttctcctcctaatctgggcctcttgtcatggtaagtacaaggaaataagagtaaaaaaaaaaacaaaaaaccctgtgtcctgacaattaagtgaacactaataaattcatacttacccatttttgtttttgtaagaaattatttctttttctttcccagatctcttgtgtcttttcttttcttgtttacttagtagtaatagagtactccaatatacagagcagtttcatttctgttaactttaatcctgtgagctagatgttgtctcttatttttcagtcagcaagtaaatggaatcaagactaaaacatacagttctcggactccaggtttttaattccttttctaggaagtagcgtgtagtgaaaactgtgtgtgtgtgtttgtgtgtagacaaattgtaagatggtaatctgcatatttacttaaaaatttttttaaattgacaaattacatatatattgtgtayagcataatgttttgaaatacatatataccttgtggaatggctaaatcaagctgattaacatatgtattacttcacatagtatatatgctttatgaatttatagaagcaattccctaccttccctgttttgtctctttaaggcagtattttgatcccatagtaggtggagcagccctgcacaccccctcctgtatctttaaccagaaagagaatttaatggacaatttaatgacttacgggccatttcgggcccagctcaagcagagaagatggagcaacaagccagccacattttcatcaatcctgaggaaatgtaaacagtgcttcaaggcttaaaaaagaaatggtcctctgtaatattgtcctycttctaccttgtgatgtttcctagatccaaactgttttatgctgatgcacagagaaggaattgaaaaggctacattaatttcaagcttcattagggacgtatggaaaatgcttttcaaaattagaaaaagtaaaacaaaaaaactagttgtgcagaaatgtcatattaaaaggaagagaaaggtaactgcccttatcttaaaggcatgccaattttttcttagtttgtgggcattacaactttatgatttatcttatacctaaacattgatgaacttttcctgttattttcttgattatattttattttattggttttcccacagagttttcaatgaattgaaaaagtgcttgtctagtatttcagccagtgctaatgaataacaaatgatgggcttatgaaagcagctctgttctgtattgagggtttgtccttcattgtataccacacggctagtaacagtgtggtcctcttcctggtgctgctgggttctccatggtgcctagcagaaagtcttcctggtgttktccctggcctgatgctttagacaacgcttgggagttgattctgtgtgtactagttggggagtagcatggccatgtatgtatcttttgtttttgtttagtttctcataaagtagcattgttacaagtttttacaaattctcatttataactctaccaccagaacccatggttgtattccgttttcttttttcttgagacagagtcttgctctgttgcccaggctggagtgcagtggtgcgatctcggctcactgcaacctccacctactgggttcaagcgattcttgtgcctcggcctctcaagtagctagaattacaggcacctgccaccatgcttagctaatttttgtattttcagtagagacggggtttcgccatgttggccaggctggtctcgaactcctgacctcaggtgatgtgcctgcctcagtctcccaaagtgctgggatcacaggcatgagctgctgtgccccattggttatattcctttctaactagttcatgtctcatatgtatgttttatatagttagaatgataaaataattaagtttctattttgcttatttcacttaatgaattaaacattctcccatgttgattccttggattcctaatgatcattttactagctgtataacattctgcaagttgttgaaccattgattttaattatatactgtataatagcatttagagtgtatgtccttaatccttagtttttgtgtagacaattcaggagcattgaacattctttttgtttttaactgtaaaccgctgtactaatttgagagtgacatttttcccttgtcttttatactcttaaaggttcttaaacgagattggagtctgtctttgagaggttaagcattagcaaaatatattttcatgttttgtggaaaatctcaagcctatgcagagagaaaagtacagtgcactcatatgaacatcattcagctgcagtaatcataaattcatgactattcttgtttcatttgacctcttttacccctacccttttggcaataatcccaagcattttatcaagggaaatgtattgtttgtcttctaataccagtcttacgaatatgactggaaatgacagtaggactgataattattttcacttctacgctttgcaaacacgaacactagatatgaattcagttagtaggattaattgactggtcatcagtctctccttcccatgtactttatttttttgaaatggagtttcactcttgttgcccaggctggaatgcaatggcgtgatcttggctcactgcaacctccgcctcctgggtacaagcgattctcctgcctcagcctcctgagtagctgagattacaggcgcttgccaccacgcccagctaatttttgtattttagtagggaygggatttcaccatgttggtcaggctggtctcraactcctgacctcaggtgatccatctgcctcagcctcccaaagtgctgagattacaggcatgagtcaccgcacccggcccttcccatgtactttaaatatttatctctatggttgacttctgctctgaagcatgtactttcctctcttagctgcataatttagccaatagcagaaactagcctggaactgtggtgactggccctttttcagtattttgtagatgaccccactgactttatggaggtggatggagactacgaagtgccagatgccacaatgcctggtgttcctcagcagtaccaggaaattaatgacatggaatacatctctctaataagttactgcttatagctaggatacgtttgtttccaaaactgttaccagaccagcgtttcccaatttatcttcttccaacttctcaccttattaaccatctcaagtttggccttcctcacctatgaaactcacagaaactataataaattcaggctaattcaactgctaaattcaactgttcagccacatgggatcaccagtcccctagattcaatgaatcctaatgttacgtccttggggattaaatgcatttttgtgtacaaggggagaaaagttctgaagctttacaggtaatgtgaattgagacaatagcttttaaaaagaacatttgtttgattatgaaaaataagtacttcatattcttgccttgctggcctaattctcagttgttttatgttgaaaatcatgcattttcagttttcagtagctactttggtgatacatattggtctggattagcaccctggtgagtgtgccagcaagagtgagtaggtaaatggtttctttttgttctttacaagcctgctacattacttcagttctgtgctaaaagtcagcagaaaactaggtcaaggaatcacttaaagattaataatgggtacctctgtaaaatgaccttacacagaataaaagtctaggccttatgagtttatgtgaggtaaaaagttaatgtgatgctgagaagttatgttaaaagtatacttttatgtaagatttttgctcccctccatgtttacatagcatttccttactatcccatattggtttatgagaaaaatctccctaaattgaagattcttcacatctttcatttggtctctttttttggagacaggatctcactctgtcgcccgggttggagagcagtggtgcaatcatggctcacctttcatagattagcactaggagaatggttttaggaaaagcctggcttttggagtgaagcagctttaattggtatttagtattagagtatagtagagaagcagctctgatggtttccagacctctttttacttcttaaattattgaggtacccccaagagggtttgtttatgtgggttatgtctgtttataccatattagaaaataaaactgagaaatctttaaaatgctcataaattcatttaaaagtaacaacaaaccaattatatagtagcataaataacattttttgatgaaaaatatttttcctcatccaaagatagttttagtgttaacatttttgcaaatctctttaatatttggcttaatagatgacaggtaaattctcatatctacttcggcattcagtccgttacaatgttttctttgaaatatataaagaaaatgcagcctcaggcagatacgtggttagaaaagtagttaaaaaaaggaagagtattttaagttttcccagataatttatatttttctttaataccaaaccaaaacttgacaagtgatgtgtttttttgtttttgacacaaggtcttgctctattgcccaggcttgaccgtagtggcgcaatcacagctcactgtagccgctacagtgcacctcaggtgcaggtgatcctcccacctcagcctcttaagtatctgggactacaggcatgcgccactgtgcccatctagtttctctattttttgtagagatggtgtctcaccatgttgcccaggctgggcttgaactcctgggctcaagcgatctgcccactgtagccccccaaagtgctgagattacaggcatgagccgtgtacctggccagtggtggttctttaaaggttagttgcagtgtagaatctgaaaccatatcagtgaactttttgtattatattacattaaaaccattagtctgtcttgtactttgagtgaatcttttatccacatatgattttgtaacatgcattggtcattaggaaaataatgggttcgttgattgaggcagatcttcaaaagttgacattttattatagtgtgtgttttttttttttttttaaatcacacttggtaataccttcactttaaagataaaagttgtaagtactaggaagctataaagttcatggtgggagatgagaggttttccaaaatctaatctttgcacaaaagctttattattgacaactaatactatcttttgttgttactgtttgtttttttcctaatagtgtcttttggaaaaaagacctgccaaatgtccaagtctgcattaccatagtttttccatcagttgttcttccaattaagaatgatactcaatgaaaaaaaatggctagttcatctcttaattgaagcatttgcacaagtgctttactttgtgacaccgtaatattgcaccatacatcagaggtgttttacttgtatttcctctgtaaaaaagacttctacttaagggtcaggatttaataaatagaatttataatatttccttgctttatcaaggtcattcttatgaaattggcaccactgtctcaattgtgctaaggtaccagcagttttacctaccaggtttttttgcactattagtatagatgtcaatacagtgaagaaaggcaataataccgtaatattattgggaaggttttgacctcgcagggcccctgtaagcatctcagagtctgtggacttcattttgagaatcatgctagtgtagagtattaccagtttatgattatggttgctgttagtaaaaccttaagtgttgtttatagataagaagaaaaactctttttgggggaagacttacaaaattattggaattgtgttaagtagtgtacacagaagcaaccagtaaccactggttataattcttaatgctgtcagttgaacatgatgtggcttttgctcttttaaaaattgctgtgtggggccagtcttggtggctcacacctgtaatcccagaactttgggaggctaaggtgggaggattacttgagcccaggagtttgaaaccaacctggacaacataacgagaccttgtctctactgaaaataaaaaaaattagcctggcatggtggtgggcgcctgtggtcccagctacctgggaggctgaggctggaggatcacttgagccccggagttggaggttacaattagctgtgattgtgctgctgcactccaacatgggtgacagagcaaaaccctgacttaaaaaagaaaagtgctgtgtaaacagattctattataatttagtcaggctttgtgatagatgacatttctctcatgtcttcctataccataaaaattcataatgcaaaatattactttttaatacaaattgtaatttacatgtcatctagatgagaatttattgcttcctcttttgaaattgtcttaacagaaatctattttgtaatataaggcagagtaaatgaaggatagtctttcatatattttcaacttgggaaattcagttcttaagcttactttttcttagaaattgttttcaagctttctattatgaaaatttcacatataaccagagtagacacaatggtagagataatgaactctcacccagtttcatgaattactaattcatagatagtcctgtttcacttatgtcccgcttcttccttactcttgccccagttattttgaagcaaatttcaaatgtcacctttcatttttaaatatttcagtatgtatctctcaaataatttaagatcgtaacttaaagagaaaaaagcattatatcttggtttctcttaaaagtagtgtggggctgggcacagtggctcatgtctgttatcgcagcactttgggaggctgaggcagctggatcacctgaggccaggagttggagaccagcctgaccaacatggcaaaaccccgtctctacaaaaatagtagccaggcgttatggcacgcacctgtagtcccagctactcaggaggctgaggcaggagaatcgcctgaacccaggaggcagaggttgcggcgagccaagattacaccaccgcactacctgtgcactacactaccagtgcaccactgcctgggtgatagtgagattctgtctcaaaaaaagaaaaaaaagtattaagaagctgttagtgcctaatagaaatattctaacctctttgacattttttttgcatcaatgtgttttcagactagatgtaactaatgtattggatagaaaaactttttaagatcaatattgtttccttgagcttttctgcctgttcaccttggtctttgtactttcattgtgattatgctagcagatatggcagaaaaaccaaatatgaatgattagaagctttgaaattattttaaggttttggacttttccaggatgaagagactcggcacagccttgagtgcatccaggccaatcagatctttcccaggaagcagctgatccgggaggatgagaatcttcaggtaattataggccacttttaaatgtaaaatatttatttagcattaactgtatagcagagttaatggatttaagtgtaacgtactatattatatatatatawaacatacatgtagtagaaatgcaagctggaaaacatctcattttagcaagacttayttccygagaatccactgtttaagatgatctyctctgtatcattcctttagtagttcagaatttgaataactagatatatttgaattaggtgggtataaacccatcctctttagcttccttatctacttatgtgctgtgttttcaacttcagtggcagaggatttaccatccattcagccaactgatgtttgaagcttttttttttttaactgcttcagaactctgaagggtttctttcatttygaaggttcctttccttgaacttcatggagagagcacagagtttgtgggccgtgccgaggatgccatcattgccctttccaattacagacttcacatcaagttcaaygagtctcttgttaatgtaagtgattaccagctgttctccctctaaggtaaatggagaaagtaagtcaaaaaacttaatgctctcaaagagaggagaggcatacagaattgggagagaaagcattatgtgctctgcttttctcacttaatttagcactcaaggaacactggcttggccaggcgcggtggctcacgcctgtaatcccagcactttgggaggccaaggcaggcagatcacgaggtcaggagatcgagaccatcctggctaacacggtgaaaccccatttctactaaaaatacaaaaaattagccgggcgtggtggcaggtgcctgtagtcccrgctactcaggaggctgagtcaggagaatggcatgaacccgggaggtggagctggcagtgagccaagatcacgccactgcactccagcctgggtgaccagagcaagactccatctcaaaaacaaacaaacaacaacaacaaaacacactagatcagcaagcagctcttrtgcttgatttaaaatgatgtgtgtagttgtcagctgaggtgtccattgtttagtttaacagtgaatgatttgcattaggtaatgctgtatcattaagctttataaaggtataaaggctgaatgggcttttattctgcaatctttagtagttaccaactgcctcagttgagataattcccttggccttaatgtcaaaagatgagatgcactttgagctcactgcagactctcattacagcatgaggttactctaatgactccttggtggtataagtgtagatgttaagtataatgttgatttgcataatggactatgtattactgaagaaaaggaagcctcttgattctcaagagtacatttacccttttcagttatgaatgtcctctcagtgaactggttcttccagtgctctgctatcattagccttaaatgaaacgaataaaggcttgaaaattcatgtacttacagcaaatgccttcttccttctttacttgccagtgttgtggctttctacactccacttccagcacagagaagtgtattatgacacgttaaaacagctcaggactgtaattccatgcagactgtgttttggcttcattttgggattctttgaaatcktgttcattcgttttactcagcaattaaaaaaagactcagtggctgtcattttttttttggtagttgacattttttacttcttattatcattcttctttgtagttaagcatttatgtccaggagcagttttggcctgaatcccttctggcttctagatttgggccatgattatagcagttacatcagttttctgtctatcagctaaagatacacaccagattcattaaggaaagaggcaatgctgttctttcatactatgtagcactctgttcagaagggtccacttggatttgagtagtcgtgatggggaggggaaaggggggaaacacctataaaatcccagcaactgagaattccccaccagctactgtggaagtaatratagtagtgtttagtagaactgcccaatttaactttgtgttctttcagtgtttgaattgctggaattaaattataattaaattgcatgtgagaatgatagtttcatatcattgcattttctcatatcatcctgtatttatcagtttattggttgatggccaagtgtttcagagactattttagaactatttgggaataaggtctgctggaaagcaagcaggaaagaaagaaagaaagaaactgatcatgtcattcatcagcttaaagcccttcagtgtttcttcactacttctatgatgaagatcagattgtttagcatgacatgaagctgtctgacaacgtggcagggaccaaggatcacagcttccctcctttccccatkatcacatttttacttgtaaaagcagcctctttgtactattcagccatacctcacacctctgtgttctcttttcggcccaggarcttctgttcatctgtcaaaattcagttcaggtgataacttctcctgtgaagcctttcttagtcccagttccctctgtgacagttaactacactctttctttgctttgtctttatcttgtacattcttttataacatttaccaaataggttgtaatttttggttaattgtttttgtgtcttcaagatccagcatgtctcctggtgccacaatattcagtaaatattaaatgaattgaagttaatgtgggtttgaagtgggcattagaaccttttccccctttggtgtttaaagctcattttaaaacagtacacttctgtgtgaataggctgtggcttaattgtctctaaggatagctgtgtgagtaggttgttgactggaattgttgatcccccattgtgattgagagataatgcttaaggaaacttgccactgttctttcttttgatcaattttcttaatctgaaagtgttttttttctgttagcatcataaccctctaaggcatagagcctacatgttacttaaaaagcccagggtaggccgggtgcagtgatgcacgcctgtaatctcagcactttgggaggctgaggcaggcagttcacctgaggttgtgagttcgaaaccagcctggccaaaatggtgaaaccccatctctactaaaaatacagaaattagctgggcatggtggcatgtgctactcaggaagctgaggtaggagaatcacttgaacccaggaggcggaggttgcaatgagctgagatcacgccactgcactccagcctggatgacagagggagactctgtcaaaaaaaaaaaggaaaaaaaaaaaaacacccaaggtaatggctttgtacagaaaaatgatggtgtaaaagtattttggcattgcagtgactttaaaaatttcagattgaggccgggcgcggtggctcacgcctgtaatcccagcactttgggaggccgaggcaggaggatcacgaggtcaggagagcaagaccatcctggctaacacggtgaaaccccgtctctaccaaaaatacaaaaaattagccggacgtggtggcaggcacctgtagtcccagctactcaggaggctgagtcaggagaatggcgtgaacccgggaggtggagcttgcagtgagccgagatcgtgccattgcactccagcctgggtgacagagcgagactctgtctcattaaaaaaaaaaaaaaaaaaaaaaaaaaaaaatttcagattgagagagactagaactcctccataaaaataaattaatttcatcacagctagtgctaagagattcctgaaacctgaaacctggaggtacttaggaaacaaggattcttcctgcatcgggtcctggatggagatcagacagttggtagtggtgttgcccctccctctttccttcccttagcaaataagtatttcaataaaatatgtgtatttcaataaaatgttagatcaggaggctctctttaaatgttattttatctatatcaaacacatttaaaccatcaragcccagacataccagcatatgttgtggcatgccccagttcatcattttgtatgcttaaatcaaaatacttagcacttcagaaaatgatttaccatcaagttttaaatagctacctgatatcatatattctcttttaatttcacagcacattgagtaaaatgtgtctgtaggttttgatacygtaaacatcattactttaattcacacattcactgaatatcaagttccagttcctgtggtaaagaatctctgtagtagagtttatgtgtagcatttaaggtatacattgctcctattctgtgcttttcccaaattattatatatttacagacatagttctttgaagcttagataaattataaacaagtgttcaagtggaattcatgaacgtttaaaagtttgtttgtgtgtgtgtgtgtgtgtgtgtgtgtgtgtgtgtgtgtgtgtatgtgtttgtaatttaatagactgcttctcaatctgctgcttctaaaatccctgtaagtagtatgaaaatcctaggcggttgctgcacctgtgcttggagcaaattggttttgagtgttagatgctcaccttgcaaatcagcagaatgtttcccctctgcatgagtccttttcctcttactggaccaaattccagttgtatgctactaggagaacaatttgtagggtaaggaaaaagccctgcagtttatacataagcagatggaattgtgaccttcaaaaaaatgtagaacaagtttctgttagaaataatttgtaaaatcaacactagtttttttttctttcactttgttttttggagacggagtttcactctgttgtccaggctggagtgcgttagcacagtctcggctcactgcagccttagtctcctgggctcaagttattctcccacctcagcctcccaaagtgttggaactacaggcgttagccaccacaccctgctgcgaaggaggttattgttaacatttaatgcactttgatctagcattcatataacagtgggagcctctgaaagcagtgctggaggcttgtaaattgtcaaaggtgaacaatagagtttgaatcttaaaccagtgacagtcttctgctgattagtgggtttttggtggttgttttttgaaacagggtcttgctctgtcgcccaggctggagtgcactggcgccatcatggcccactgcagcctcaacttcctgcgcttaggtgatcctcccacctcagccttctgagtagctaggtctacagacacatgccaccgcgttcagttaatttaattttattttttgtagagatgatgtctgtgttgcccaggttggtctcaaaactcctgggctcamgcagtgcacccactttggcctcccaaagtgctgggattacagatgtgagccactgcactcaattttttattttattttatttttattttattatatttattttatttttatgttatgttatgttattgtagtgacagggtttcaccatgttgcccaggctggtcttgaactcctgggctcaagcgatcctcctgcctcagcctaccaaagtgctgggtttatagatgtgagtcgtcgtgcccggccctgattagtttttaaatgaaaagatttttgtgcccagatattccactttattactgattttagatttagactcattatttttactcttttactgccattttaacttcacgtgtacaagattagtacttcccattcaggctataaaaagggtgtttgtttttaaaaaggtaggaattatcccactctagattctggtgtttaaaaataatgcacatgtatgcacacacacccagaatgaaatgaggtaaatatagtagggtatgatggcatcagttccctctggaatgtgacagtactgtggacataacctgtgcatgtctgtatgtctgttaaatttttaaactgctgctcttctgctttttttggattgatgctcttcagggtgttagtgtctataatgtaacttggctttttgaggaattggttgtagcactgaatgtgtttgatgcattgtttgagcatgagtttggtgaaatttatattaggaaaagcattgtaaggtgagattgcgttacctggcaggtggagagatagaggagagaggagcaaaaagaaaatgagttgctacaagacattgaatcagtacgtttgagaggatttgaaagtgagtttatcttgctactcttttacaaaaggaattgcatctgaggagttttgatttaaactctgttttcctcttgaagatccctggtggagaagctacttatttgtgaaagaaaaactaaagtagagctcatatggaagagaagcccacgtgtaggggcagaaagaaagacacaccgtgtatggtggaaggagcccaggctggaggacagacatggatcctggtcctgactttactactatattagcttatagtgtagtagtttaaccttcctgggctgtaaagtggactggctcttgaatctgtaatttgcttttgaggttgaatatagggtatctctagttatagaaatgttaagagattgttttcatatgtgaggaaatttgaacctaaagcagtgtagtgggccttaagaaaatagagaaacagtatgttttggatggaggtatgaacaggaaaagaaggtcaattctgccttttagaaaaggcaatctggactgggtgcagtggctcacacctgtaattccagcactttgggaggcctaggcgggtggatcacctgaggtcaggggttcgataccaacctggacaaatggcaaaaccccatctctactaaaaatacaaaaattagctgggcgtggtggctgggatcacaggtgcctgctactcaggaagctgaggcagggagaatagcttgaacctgggaggtggaggttgcagtgaaccaagatcgcgccattgcactccagcctgggcaacagaacgagactccatctcaaaagaaagaaagaaagaaagaaaaggcagtctgtgcaggaagtgctgaagggaaacactgcagtagaaaggagaagaaaagggagatatttgttataaaaatcaggtgtttctcttttgtatgtccctattcttgctgcgtattaagctttcctgcatgtgacagtctgcatgaatattaaaatctgctgttctccgtatctgtgacttgtaatacacatggttgattttggtgacttgctggtgtctgcaatctgatttcaatgcatagaaccaacattctaattcttttttcttcaakttaagatgttaaaatatagaaaaaaatatgtatatattgcctgaattttaggtagcaaatgttttgcatggtctgagataattttatgatattaaatttgggcacgggccattgggctctggtttagtaataaggatgtaaaacttacctgttctttgtagcaaagtagcaaaggctaatccatttcccccagcagctgctaagagcattagctggttttcatgtcttctgtccataaagaaagtcagttgcaggggacttgggatgcaggtgactgctgcaagagcagcctcttcttgtggatttgtaaagctcactctaatcctatcccagactcttcccaggccccatgactgagatttccttagttgtgaccaaggttcagaaagcagaggctgatggcacatgggaaggctggaggcttgcccaatgaagccagcaaaattttaattggtaacattttagaaaattgagattagaactcacggctcttaattgccagtctggcagccacattttggggggatatagtgagtaaggtagttagcaggagtatatacaaaataaaaagcagtaagtgtctgttacaggctacccagagaactggcctgagaacaaagcaaagttatcttctaatctgtcttcttaatctcaatatttcttctttatagttttatctctgataaattgtaggtttgtttgtttttttttttccttcttagatgcacaggtctcagaagaattcttagttgcatcagttgcagtttctcacagcaccttggggttaaggacgtaaataaaaacagaaggccaaaagctccttttgttctcagaacacaggcaagatttttcttttttcttttcttttttttttgtttttgagatggagttttgctcttgttgcccaggctggtgtgcaatgacacgatctcagcttaccgcagtctctgcctctgggattcaagcgattctcccgcctcagcctctggagtagctgggattacaggcatgcaccaaaattacaggcatgcaccaaatacaggcatgcaccaaatacaggcatgcaccaaaatacaggcatgcaccaaaattatccgcacctggataattttgtatttttagtagagatggggtttctccatgttggtcaggctggtctcaaactcctgacctcaggtgatccgcccacctcggcctcccaaaatgttggcattacaggcgtgagccaccgtatccggccaagatttcttagtctttttctgacccccagtcctattacatttgtaagggaatttttatagactgtagacttaaaagcaagaagactttagtcctaaggtagaaactcccagtcatttatctgagtaatattattttgctttcttctcttctttaacccctgctccagtttctgtttctttgtccagcactgggcttctttttgatccctgcatcctcattctgagagttctstgctgactggcagctctgtggtggggcagagtttgcaggaagctkgttcctgaaactggctcagctaacacgagggccagcctgtgcagacagtactcttgttcctgtctgcattggaggagactgtcctcctctttgcatactaaacacaagttgttggaatgctatttgcaactcccagagccacattttggctagacttgatacactgtaagaggcaaatggcccactcctttttcaaggagtaaaagtattcactattattttaccaggtttgccttgaaagcctagaaattgctttttgaagccaagggttgaattaggatgatttaagggataggaggaggatcctcatattatcctgaagatttggcaccctgtctagatgcttttgcttctatctgtctcccttctctctatctgctgttgtacataatcctgtgtccagtagagtctgtagaccagattggcaagggggaaccattccagcttgttcaaacctcaagccccatttggcaaacggggcttctaactgattttttgaagcaaatctgacatagttattatagctttagcatccttgatcactgtatggccttctccctcctttttgatacttttgggtctattctacttagtagagagcctggccagcagctattgccccattgtcttttctgtgcaatccacagtcagcttagaactctagtctttttcaggagcctcattggctgacactaagccataagcccactctgtcatttggggcaaacaatagtctyccactggcattctgatctgtagttcttttctataagcaagaaaagattactgttctggcwcccttcagcttctatgtcattgcatcattgcaaatcatagtcagttatagcatctaaaagtagtactctgatcttgtgaattcggtgcctgagagatatattctccccttcttccaaaggtggtgccacctctttgttgccttcatgctatgacatgacttgagaccactgatttagagataaagggaagtcctaattcactwtgtagtaaatcacttgagtactgttgatccagataagtttgcagttctatttttgttgctttcccttatagatctttttaattagtcttgttggacacattgaagaactccagggtcaatgcctttttgactaagaggacttcatttttttaaaattgcaggttccattacagcttatagaaagtgttgaatgccgagatatatttcagcttcatttgacttgcaaagactgcaaagttatcaggtatgtggtatggtatgtttrtgttgctgtttagtgtggaaaatattttttaaagaatgggtccattatttggtaacttagtaaaataccttttgatgattagcctcattaggaatattttctgagtagtttgtgcctgaaatattttatctgtaggatgtatactttgctatgttgaaagatgttttttttttttaatttggaaataattttaaatttacaaaagggcaaaaataaaaatactaaaaagaacatcagtacaccattcacccagattcacttgttaacattttaccatttgctttattatttgcagaggcgtgtgtgtatgtgtgtgtgtgtttcttttcctgaacagattgagagtaagttacgtaatcatggctcttaaccccaaaatactttagtgtgctttcctaagaatagggatattttcttacataaccataacaytatcaattttcaattttacattgataatacttacatccagtctactatacatgttccaattttgtcagttcacctaatgacctattgatacttttttatagcattctccctcacctccatctcattcagtacaggatccagtctaggtcatatattgcatttagctgccatgactctgtagccttctttaatctggaacattttctttttgtttttgtttgtttgatttttgagacagagtcttgctctgttgcccaggctggagtgcagtagcacgatctcagcgcactgcaacttctgcctcctgggttcaagcgattctcctgcctcagcctcctgagtagctggggttacaggtgtgtgccaccacacccggctaattttttgtatttttagtagagatggggtttcaccatgttggtcaggctggtcttgaactctgacctcgtgatctgcccgtctcggcttcccaaagtgctgggattacaggcatgaaccaccatacccggccaatctggaacattttctacagccttattttcttttatgacattcacattttgcagaatacaatcttttgttttaatggaatacttctcatgttgtgtttgtccagtatttcctcaattaaattgaggttctattttctcaactggaatactgtatatatgatgtcacatccttttcagggtattgtattacatctggaagtacagtgtccacatgtccttcattggtgatgttaattttgattattccagtcgagatgtcacctggcttctgtataatttctgcgttttctctcttgcaactaaaaacagtctgggggaggcactttgaaacaatgcaaatgtccctgcttctcataaaaatttctccataagtttagcattcattgatgatttgtatctgcgcttaactataatggttgcaggctgggtgtggtggctcacgcctgtaatcctagcactttggcaggccgaggtgggggtggatcacttgaggtcaggagtttgagaccagcctggccaacatggcaaatccccatctctactaaaaatacgaaaattagctgggtgtggtggtgcacgcctgtagtcccagctacttgggagtctgaggcggaagaattgcttgagcctgggaggcaagaggttgcagtgagctgagatcacgccactgtactccagcctgggtgacagaacaagactccatctgaaaaaccaaaaaccaacaacgatgcctgaaatgcatttttaaatttaatagctctagaggtcttaaattccacaagtttttactgcattcctctgacctcttctggggtgtcagtaaatattatgtgttggcatactgatgagccaccatgattgggatgagagagaggtttaagtgaccccttggttttaagatagatatttatattgctttttagtcagtgagatttggcttatttttgatagatactggctacaactcacagtttaagaaggtagttgcttattaattagtcagtttttaacattgcattcaaaaaggccaaatatttaaacaaatctttatttttatttatttattttcttgagacagagcctcactctgttgcccaggctggagtgcagtggtgtgatcttggctcactgcaacccgtacctccctgtttcaagtgattctcgtgcctcagccttctgagaagctgggattacaggtgcacgccaccacacctggctaatatttttgtatgtttatcagagacgggagttttgccatgttggccaggctggtcttgaactcctgacctccagtgatctgcccgtcttggcctcccaaagtgctgggattacaggcatgagccactgcactcagcctaaacatatctttaataaattagttttcactaattattttaacttcttagttgtatatactgaaaatcgcagttgacaatagaattgttttgttctctacatggtcatagctgaaagtttcagtgcaatctgtcttttggatctgatttgtcctaatagctaaatattgaaattactacctaactggctaaaaataatgctgtttttttttaaacttgatctaatatgttactacaaaacaaagatttttctaaacatattttttatgagggacaaccataaaacttygatggaagaagtagaatgaaactccactcatgaaagagaatagctgccatttttctgtaataattgtcattaatcttagaagagatttcattagtctaaaaaaataggttttccaatggtcagcttcctccttttggacattttgttccattggctaacatttgtttttcttataagtgataatgagcatgcgaatgactgactgcctcagatgctttcttggttgtagttcccacttcactacgagtgggcattcttgaaataatggcttttcttacatttcatttcaactgtcttctgattacatccatacttgtttggctttacaaaaggtgtcagttttcaacctttgagcagtgtcaagagtggctgaagagactgaacaacgcaatccgaccacctgctaaaatagaagatctcttctcatttgcataccatgcttggtgcatggaggtctatgccagtgaaaaagagcaacatggagacctgtgcagaccaggtacgcctttctgaaatgtgcaaatggccaggggctttatcaagctactgatggaggtacttttaacatgaaatgggacacctaagcattcatatatcaatcagtgtatattttaaggagcacccagcaagtgcgcagcattcttttaagcttaatagaacatcttttctgccttccggggaagggaagaacactagaaggcatcacaatctattgggcctaaaaacagctcaactataataaggttttatgaatagtatggaagcctgatagaaaggagccatgagttttgtatacatgtgtgggaagacttcacatttaaagtggcttttgaatcagctttgaaagttgaataggagttaattggtgagaggccaggttcctatcaagaacaaatagatagtggggtttgttttttgttttttttgagacggagtttcgctcttgttgcccaggctggagtgcaatggctcaatctcggaccactgcaacctccgcctcttgggttcaagcaattcccctgcctcagcctcctgtgtagctgggattacaggcatgcgccaccatgcccggctaattttttatttttagtagagacggggtttctccatgttggtcaggctggtctcaggtgatacgcccrccttggccacccggagtgcttggatttataggcgtgagccacagctcctggcctagattataggttttaacatgtgaccccctcccccccaaaaaaaccaaaaagagatgctgagcctgttctggaacccaggcttcctgactcctctatagtctttgtccccctcactgtcattctccgtcagaaatggctttgaccatgttatttctctgcatgtagtttcttgtaaactttatgtggtcataaaactttgctggtccaacactgacttttagtgtgtcaggtttcaaagtgaagtyttaaatttctgtgcagtgaaaagttgtaagcctccttcaagtaaagtttactcttgggacttttttctagaaacctgaaattttaatcctgaatcttcaatcttrtaagtctgccctgggtcattttaaacatttgaggctaatcttgctatgcttktgttactttgttctctggccccatgactaattgaagcttttggttcacattcttgttctattaaaatgcttgtagcattagcattatcttatgtttaacaatgctttgataaatacttttgtttgatcctcatgaccttgtcaaacaggcaagataggttggtgtctgttttgggagccaaagaaatggaggctcagaggtaaaaagcctgttgtcaagtcccagtgctagtcactgacgacagaactaggacttaaaaccagttctcagttattcagacctgaccatggtggatgctgtggatacagagtttgaaaaacaaaagcacctgccctcttggagcctcagggaaagcctcagaatcccagcttctcacaggcgtgtccaggctagcagaatcctgtcacctacgagagaccacaccaaccttggaagtttatgagaatgtgcttaaactgtctctcacttcactccgattgttacatctattttttttctttattgaaatgccatcacattttaaatacattttttcattttttatggctcttttcaaatttgggggtttttcttaaagagaaagtttacaaacagtgatgtgtacaaatcttacatgtacagtttctgagtttttaaccattkcatcttctttattaaatttttagtttctaccatctcctaggataatgaacttaatgagtgcatcctactgcattatgttatataagaactttaatttgtttaagacccctgactccaagacccctgactccaagaggtattccctaattttgggttgccagcatttactcagcaagatttgctttctcctatcctgttctctcacaaccacagactgaaaagtccttatctttttaggagagcttttttagtcccttgataatttgagtttcttttagatttcagcaaactcttaggatattcctgagaggtacctcagtctagtcttttaattatgggtggctctgccctgaggtgggatgactttggtccccagacccttccccttcctgatgatatctggtattctttggccatcaggacataaagatatctacagtgttctytgtcttttcgtaggtttgtgatgcaagggcatgtgaggggtaaagtactgacttaggaattaggaaacctgaatttaaatgcgtattctacgatttagttgaaaaaaagaacactgggcaaagaatttatgctctctgtgctttagtttcctttgtgctttaaagtgggacattcatgctcttcctgcccaggctgatccaggtatcctgaagatcaaatctgttaatgctgcagagttcaattcagtaaatgtttaagtgccccctatgtgccatgcttatgaaaacactttggaaattatgcaactacaaggtaatgcaatcataactgtttggctagagattatgagtaagggttgcattttgtttcttcccagtatacacagtccacattgatgttaacctgccaccactcagcatggaatcttgtatttcagtgacttggttgaatgtatgtgtatgtatggcttttgccttttatgtatattcgctgtggagtacaaaggaaaaacttggttttaattaaaaacaaaccaaaaaaaaaaaaaaaaaacacctcgaggacatccagtcaacctgtttcttttgtcattacctcatgttgttgagcagtggcggtgtatatagcattactcatcaaatattagcataccagacaaccacatacttataagtcatctttaggatgagacaacacttgggatatttcaaagtcatgcctttttataatctgccccagtacatgatatcacaagtgtagactctgaggggtggaagttagtttaatcttatagcagttaataaagccttttatggagtcttctctacctagcctgctagaagtagaatgtatcagagaggagagaaatgagaaaattacataattgtcttagtattcatataaatcttagtttctggctgttgaaccrgtcatagttaagccggctgtactgtggtcacagctctaaggcttaatcagctttggaagaagtttcaacattgctgttggagtttacctgtgaaacctgcagaagcctttgccaaattcttgacccttctcttagcccctcaaactctaaaaaagtggactgaaagctaaaagcttctctcccatgtccttaacttcctgctcctcattgcaaytgacttgttggtgatggctctgtactagagtgttaatctggaggcctgacagatgactgggcagcttagctgccagtttagtagcatcaggcctacctctctaacctctctcatgtgaaatgtcccttaagcccatcttgtttatccacgactagcatatgactctgggtcttaacactgctgtgaagctgcctatttatctgtcttccgggtttgaatgcagtccaggaagttgcatctagaggatttactgtgacctttgtacatagaaaagcataattcctttctccrtatttgaaaatctgctaagaggtagttcttaccttctctgactctggtattggtctgcttcctcacctgccaggtaaaggcctgtcccttctgtcccaggccttttaagctgtgtgtaattgtgggcttgactactcaggatcagccagggagctagacttttgggggaaaattttttagattgctgattgacactgtgtttgtgatagagggagttagggaacttcattgcttttaaaaagaaagttttcatttccactaaagtgaaaattgctggactgtattatttttattataagaaacactaaatgctgaaaagggacaaaggcagataggaagggttgaaatggaaatataaagccaaacaaaaaccttatagccccagtatttaaagaaagttgggatatcacaatgtatttaatgttgaattgattgagacctgagaattctgagatggagatttttaaggggaatccagcaatagatctgtttgtgtttatttttctggctaagtaaacgtgagtgaacatctcacacaatttgcaaaagctggttgaattcctgatgtatgtaatgatgtggttttcaaataggttatgatccagtagtgggtcatgaaatctaattttaaagaaatggaatagaaaatatcaaattgtgtcacacacatattaagagtgggtattgttttgtgaaatgctttcaaaaaaataatgtatgttgtattagctgggcacagtgtctacctatagtcctagctattcaagaggctgaggtgggaagattgtttgagtttaggagttcaaatccagcttaggcaacagagggaaaacccggtctctcaaaaactgaataaattaaaacatgtttgttgtattgtgttgtaaaacataattcttattgtgggttgtgatggtcagtttcagagtttatgaagtcactgccttagaggatataaaaataattaaaactcattcccattcccaaagaactcgaaataacagattttctatacctgctagtcagtatatatttctgcgtatagctcagaatgttgtgctctggatggtggttctaagtccttctttggggaaatggttctatgaagtaaattgctagtgatagtgattgttactgttattattttgccagtggttatttttaaatcacaagatcctttaagggtatctatgtgttttatcctgagatagaggtgttaatgtaaaagatcattaatgtacagttcaagaaaagcacaaaaaaaataaatcattaatgaaatacttacagcttttgcaaagacttggagctatatcccagagtcgggggaaaaaatctcttaatgaacttggaatttgccacagttttgcagcttttagattgggattatgaattaaagactccttgtctgttttttttgttcgttttgttttgtttttttcccctttttttgagacagggtctcactctgttgcccaggctggagtgcartggtgtgatgatggctcactgcagcctcaacttccctaggttcaggtgatcctcccacctcagcctctcaagtagctgggactataggcatggaccaccacaacttaatttttgcatttttgtggagatggggttgcccatggggttgaccagatgttgcccaggctggtcttgaactcctgggctcaagcaatctgcctgcatcagcctcccaaagtgctgggattacaggtgtgaggcaccgcgtctggcctagtattcttgatggtcaatattccttgcaatttgtagacagatggcaccccaattcagatagttttttcctgtttggaagcctgctacattgcttctaaaacttttccaaaatgggatggatttagtttttatttcttcttgcacctcatattctctcaacctcatctttttatagctctccttcaggaaatgtataatacctagcttgagctcaagaaaagcagtttaaatgggaagtagtttaacagaattgtcttccatccaagtaattgctgtttcctattctgtagctcctctcccagggagaacaaagctttatactctgaacactaaagtgaaatctgttttgtgcttttgttgttgtggtttcttccagccctgctagcacttattttacaacctgtaccactatatattagaggttctgcttaatattttttaaaataacatgctgccctaggactgtgtatgttttsaaggaagaaagttattttagatttactgaatttatgttagcttcgtttctacctctgttttgcttttttaaggaagataaagccagattcattagggcaaatatagccagattataccagcttgggtggctgttcttgcaaataatcagcacttagtagtatggtgtttcctgagattcctggctggcagttatgattccatgacctgttaacctgccatcatctaaaaggctctggaaaccagaatgtttttcataccctatttggtgtcttggctggacctgatctgagctgacatgaggctatttgttgctttatttatcccacctggtatgaatgatctatacctttcacgaaagaaatattaatatttgtttaaggagatcttgttaagcatgtgagcctaatattatattcgctgtcttaccttaacgaaagtttggaaaactctcaagttctaaaatttggaccaaagggttttggatgaggaattatagttctgtattgctactcgtggtgatcttgttattgattttatttcttattaagtgtactgtcagtctgagtgtggaagtaggcaagtagccagtgtaggacaagagcatggcttctggggccagacaggcctgccataataacctgttttaattttgtcctttgtaaaatgagctcagtgatactgttctcagagatgattgtaagggttagatgagataacataactcttgatcagaattaatttctttcctctttataatcttaacctgacagggatctttctaaactaaaactatataatatatgttactttattatttatacaattcttacctttaaaaatacacaggctgggcgcagtggctcacgcctgtaatcccagcactttgggaggccgaggcgggcagatcacatgaggccaggagttcgagaccagcctggcccatgtggtaaaaccccatctctactgaaagtgcaaaaattagccagtcatggtggcatgcacctgtaatcccagctatttgggtggctgaggcacaagaatcacttgaacctgggaggcggaagtttcagtgagctgagatcacaccactgcactccggcctatgtgacagagtggaaccctgtctcaaaaaatatatatatatttacatatatgtaacatatgtatatttctttgtttttattccacctgttttgcaaaatggtattcatttcttcctttctgctgtttatctttggcctctaggggagcatgtaacttcaaggtttaaaaacgaggtggagaggatgggttttgatatgaacaacgcctggaggatttccaacatcaatgagaagtacaagtgagttatatgggtccctgtggactgtttcacagccagtgcctttgcagaaaccgcaattctcatgtggcagaacatttgaacttagactttttatttgaaatggttttatttattaaatctaaaggcatgatcttcagagtatttattgaatcttctgttcccgttgctatcattggagtggaaagtgatccttacttaacaggatcctagaaccttcccttttaccccctctaggcctctgttttttctggtacatgcatgtctaaataatattgtatttgcctgtaggcaggcagttaccatttttctcatcaccacttggcatcacattagagagaggatcagtggtctcataagcagtgacagaacatttatgaactagtttttatgactgtaattttactccaggtggtgtgaaatagacataagtacagttgagtatcccttatctgaaattcttgggactgtaaatatttcagattttggatttttttcaggttttggaatatttgcatgaacataatgagattatcttgggcctgggacccaagtctaaacacaaaattatttgtctcatatacacattatacagctggaaggtaattttgtacaatattttaaataatttcatgcatgatgttttttacgaaaagttttgactgtgacttgactgtgacccatcacatgaggtcaagtgtagaattttccacttgtggcattatgtcagcactcaaagttttggattttggagcatttcagatttttggattaaagatgctcagtctgtattattctgtcctttaatatattgatctaaaaccaacttcactgctatgatcatttaaccattaaatattaatgtaacctttatttggctggacatggtggctcacacctgcaatcccagcactttgggaggccaaggcagatcagctgaggtcaggagttcgagaccagcccagccaacatggcgaaacactgtctytactaaaaatacaaaaattagctgggcgtggtggtgcaygcctgtagtcccagcaacttgggaggctgaggcaggagaattgcttgaacctgggaggtggaggttgtagtgagctgagattgcaccactatattccaacctgggtgatagagtgagactctgtcgcaaaaaaaaaattaatgtaaccatttagccattacccagttccttaaaatgtgtaagtgcgttggtgggggaggacagttaactactatgattttggtgatccaaatttctataaaacaaaattgtccatgatagttaaatatcttaaatctttaactatatccttcttggccaggcgcggtggctcacgcctgtaatcccagcactttgggaggctgaggcaggaggatcatgaggtcaggagatcgagaccatcctggctaacacggtgaaaccccgtctctactaaaaatacaaaaaattacccgggcatggttgcaggtggctgtagtcccagctactkgggaggctgaggcgggagaatggcatgaacctgggaagcggagcttgcagtgagctgagattgtgccactgcactccagcctgggcaaccgagcgagactttgtcttaaaaaataaaaaaaataaaaaaaawawatatatatatccttctcctacgtttccctgcatcattaatcattctgcggtcctcttagctgtctcaaattatgacgggcwttttcctggtctgtttgtggctagccgtcagagttttcactggaaaagctatagctaattgctatacacagttcttaatgtggaccttctccagggagttgagaacccagggtgttttgaagagttggagctgcagactttttatacttttgcctgttctcagtgatgagtcaaagcaaagaaggagggtgaatgctggatgagggggcggcctcagagagcctgtggctgcattaggctttcctgagtgtaacctatactggaaattgtttatccacaagtgagtaggtagtgcatactgaagagctgactactgggagtgtagtacctataggacaatgaacagaatgtttagaaaattagatcaagtaaaaaaaaactgtgaattaagacagacttgttggaaaataatccccaattcggcttttaaaaattaacttcttgagaggccaagatagaggattgattaagcccaggagtttgagactaggctgggcaacatagtgagacctcatctctacagaaaatttcttaaaaatttggccaggcatggtggctcattcctctaatcccagcactttgggaggccgaggcgggtggatcacgagctcaggagatcgagaccatcctggctaacacagtgaaaccccgtctctactaaaaatacaaaaaaattagccagcgtggtggcgggcgcctgtagtcccagctactcaggagactgaggcaggagaatggcgtgaacccrggaggtggagcttgcaatgaaccgagatcatgccactgcattccagcctgggcgacagagcgagactccatctcaaagaaaaaaaaattagttgggcatggtggtgcatgcctgtagtcccagctactggggaggctgaagtagaagagttgtttgagcccaggaggtcgaggctgctgtgagccatgaccgctccactgctctctagcccgggtaacagaacaactgtctcaaggagtttaccagttatacctcagaaccagtctttaggatgttatcaccaccataaaacaaaatggggggtggtgggaaacaacaggatgttgaaagttcttcctactacaaaggtagaagagtgagagccaagtttactcttgagtttaatacataataaagggaatgagattcatggttagatattaaccatcattactggctcccagcttatttttaggagtttgtgaataggtgttaggaagtttgtatagctactcttagtcatagccattctcttttgttcagtggcttttaaattcctgaaaattccagaagtctcctcttctggaaattgaggagagatttagtgcaaaatgatcaaaacccccaaatcctaagccattttgtgtttttctgcgctttctgctatgtataggataggctagggcagggggttggtggtgttggtggagtttgtgtgttttaggatttggattaaaggccttattgccttcactattgaaaaaagaagattggattatccagagagagacattgtcctgtaagtaaaaatctatcggaagtattgcttcctaggataccggcttgactgtagctgggatcttccctaattaaaagaaagcttatccccccgcccccagtataatttgttctgaagtatgttttatggaaattatggttaatagcttagtcacattactaacctggttcaatgggactgaggctgtgtrtgcagatagactggcttgtgttggttttgcatacccatggctgcacctgttacctataaggatgacaccctgtttggttcaaatcaaagaatgagttaatcctgtgaagtctctggaaacttgcaattgtgggcttttttccttccctgagggtctggtagaactgacacrgactctcagttctgtaattggactgggcgctcatgtagttagaaataacctatgtacttgttacagcagaagagttgtaatggagtataaagagctgaccctcgactcccctttttttcattgatagttaagattgccagattcccaaaaggtagcatcaagtggaacaattcaagatagtatcatttgttgtatacacataagtaaacatttaaggcaacaaaacaaaacaaaacacacttatggtaacccattctgttgaggagtccaaaactcgaataaagcgcctcattgcctttaactggttctgtggcagtgagatcatcatccttatgctggctcacctagtgtctctctctctctcccgttttctctctccctctcttatccccttgactctccccacttctcatsttctctttagattatgtggtagctatcctcaagagctcatagtgcctgcctggatcactgacaaagaactggaaagtgtatcaagtttcaggtcctggaagcgcatccctgccgtcatctacaggtaagttaaactggaccrgtcccagcttgggctggtgctgctgcctgctgcatatggtctgctgcctctgctgctgctaacctgggaagggtggggagagttcagagaactttctaggcaaggctgtacttccttattgttaaagcttctcctccagtaacacatcagtactgactgcattcagaacactagctggttgttcatttgaaacagataagaaagttttagttgtaaagtggctggacttgctatttcartatccttcttacattctgtgagaagataatgtgcttactaagcatttagcttcagctgttagcagggcttttggattgagagatgagtcttagaaagtgatctttgggaatatagggtcgagttggctctgattgtctttgtggttgaaactttgacatgtggaagaactctgtttcragaggaagcatttagagaagaagactgaggcatgactagatagaagatttcagtgatcagaggcatgagagccatgggatgcaagttctagatggggatggtggcatggtgatggagcacagattttggaatcacagatctgaattcaggtatattcttagacttcttgctaaggcaccttgaataagttccctaactgacctcagtctgttcctaatgaatacaatgggaatggtagttcttattttgtagatatgttctgattctaaatgaggggctataaacactgagcttctgtaccagcatttggaataggttaaatctcttgagtgctgcttttgtaattcattgaatatcttagttctcacagaatcctattaaattttaaagaagtccttccttcttattctggaaatgttttggatgtcatctctttgtaatgtttacattctccatttcattttcccagtttgccggctttttggactctccctgagttgggccaatccagtggcttacagttagaaacttcattccactgaaatattgagattgtaggaagggatttgtctccttgtggaattcctacagaggtaaccagcttgttcatttagtctactaaaggcaaactctgatgcccactctgaatggagagagatggaaaagtatttgctctggcccagtggaactcattacgtttttaatctcaattctcatcactgttgttttcagacacccctagaaaagtcagtcaccaaatttacctgtcattcaagtggtaaggatgctacaggaactagagagtagtgaaagctgaagggatttatgagtcttatcaatgatcagctcagctggaatggggaaagcagccagttgctgctctggccaacaactgtgttaggtcagcagccctggcatctgtggggcttgctgactttgaccaaaagggggaaggtactcttayttgcaaaataagaggctttaggtgaattctccctttgggaagagaagcttaagagggctggttgaagaaaaacttcctttttttctaaattttattctagagggcatgcaccttctaaaattaattctagagggcatgcaccctaggttttccccccctttttctagagatacaagaggatatataaatgaaaaattttatttgcagtttttcagagaaagtctttcaaaagatcacaaagttcttggtgtagtcatccatgcaaaatcaggcaggtttcctggaactgggctctgtctcagaacatgtgtcttgtatcrctgagatgcagactgggttgctgtagtatttgggagctttgtaaggggcgtgtggaagaatcggatcctccaccatgctctgctttgccagcctaggtggcaggatgcctggaactcttgacatccatttcctgaatttagttgtctgtagattgggtcatgattcctgaggttgccagcagcagttacttgacagcaccatgctgaaccagcgcttgattagggctttgtcctactgtgatgagagagcacttaattggatttataactgaaggtagagattgctctaacatagcaagatgatgtaaagggcacccatctgtagtgcagttcacagctttttcctttgtgcatgtggtgattattctaaactcctagttacttaagggagcttgcctaaatctaagttgaggttacttaagacaattctgttcctatataaaattgaagcattctgtgttttagtagggagggctttatctgttggacatcataatttttatactttgcctggttctgttagtgrtagaaatgcattcctttagtgatttttaactgtagtgtttgaattatctttcatgtagtctgaagcattttagaagactgcagaaaacataattgtttattgcaatagtccagttgaaatctaatagctactataatgcagtgtcccctaaaacccaagatccaggctgaagagcgccatctactgctcctcttgggcactgctgggaagcattgaagaagaggaggatgttcaggaaaggcccaaccagcctcttgtgcagggtttggagtcattcagctcagtggttgcctgttatttgctaggagacattttataaagaatcattgaggttttatttctattttggccccattcagcacgtgagccagttgagcatgttggcaatacacaagtacttacagctacttgtctcccagggagggaggmtttaaaaactacaagcaaactggtgatttcagtggaatttgattagtgccaaatttaacttatttgtgagttttaggagtaaaaacaaattacagtacattttcatygtcccaaaaaacccattcacagggcacccagccaccctagccctgaataattaagatgtccaatggatgaagcccctgctagtaaaacatagagtgcttcagttttatatagaaacatactcgttttaagtaaccccaacttagaattaggcaagctcccttaagtaactacgagtttataatagtcactacatgcagaaatctacttccatctttatagattcgcctattctggatacttcatgttaattgtcgtacaataagttgccttttgtgactgacttctttcacttgtcataacatatttgaggttcatcagtgtcctagcctgtatcagaactttattcctctttactgccaagtaatagaatttttctaactttttatcagttaaaattgcctaactaggaaaagtctgggttttaatagcaccttaaagtagactgtgatttctggtctgtcttattggaaaaggatatgtcagagtatggttttctgaggttgatgctcttcttctctttcttaagagccctaggaagggtagctggctcattgagctatctgcctattataagagcagtctgtgactcatgaaatctcaggagattttgtaaagcagttcactgtgggccaggtaaatgttttattcccagaggcgggctcttggttcagcattaagaaggtagcagatttcactattgggtagcagaattagtgtagtacctatagatttaagttacgaatattgatttattttcactaagagtacacattaattcttttttgttttttggaaatggggtcttgctctgtcacccaagctggagtgctggagtgcagtggcacaatcatagctttctgcaacttcagccttctgggttcaagggatccttccacctcagcctcctgagtagctgcgactacaggcatgtgctaccatgcctggctaatttgtaaaaacttttttgtaaagatggggtcttgctatgttgctcaggctggtcttgaactcctgggctcaagtgatcctcctgcctcagcctctcaaagtgctgggattgcagagtgagcctccatgcctgacccctgttagtcatttttttgggtaactttacagggatctccgtgatgttatggtaattgagaaagacacacaggttttgttgtttgttcttgttggttgtgtaagatttctaccctctttaatactgagaggacttgaagctgacccaacacttacctagaattagactgttcattaaggcacttaaaatctattttgtgtgagtacagagagcatctgaatgggtacagttgttgtctcttgttcctcacacaggcaccagagcaatggagctgtcattgcccgctgtggacagccagaggttagctggtggggctggcgaaatgcagatgatgagcatctggtacagtcagtagccaaagcttgtgcctctgactcccgatcgagtggcagcaagctgtcaactaggaacacttctcgagactttcccaatgggggagacctttctgacgtggagttcggtaaggtgctccctggacccatggcaatgatttttatagcatctaagaaccttttcttgaaatggcctcttccttacaagacatagatttacttttatagaagtgaatgtgcagagcttcacttgatgggattgattgaggagtcatgggtcttggcagagaatcagaagaccctttgtttcaaacctgaatcaagatattagtgtgtttgttgtctttcttgccattgtgacaaaaatggagtgtttatgtaatagaggacttgcagtatctgcagaccatggcaggaaatgccaggcttcatgaaaggacaacagatacagaaatgaagtataagagactgggctgtgtgaaccccatgtgtactctgggagtcagttttggagaataaatccttctcatctttcataagaaggccacatagaaaaaaagagaaaaatcctatgtatcaagggttttgrttaggggatttcattttattgagccttttttgtgccataagatgtgcttgtgggtctaattctgcacagttctgggagagacaggctcatttagtatgccctctccctctgtgtccctagattcttctctgtcaaatgcttcaggagcagagagtttagccatccaaccgcagaagcttttgatcttggatgcacgctcctatgcagctgctgtggcaaaccgagcyaaaggaggaggctgcgaatgcccaggtgaggtgtatggtgctttgttccccatactttctccttgtgagtgtagcccttgcccaactgagacttagttcccaatttgaaataagtggcaagccatattcctcatccatcctgtcgtgagagtgccagagcttctctttggattcttaacactgtatgttcttttctgaggagaaatggaggaggaggtgcagtgaagtcacataatcttccttccttgtgccaacttgtaggtgataaggaaagcagatcttccccataataagacctgttcatgtttggaagctgctgctttagtgggctcaatttctcagccgtctaaaagctttttgttgcctttgacagagggtatgctcaccactggccttgtagcaaactcctcaagggcctctccttagaaaacctggggtgaaaattgaagcagtaaatacagaaccctagtaaggtatctctgtcctgagctgtaacaccattactgttggaatgctagctttccccaaggagggaccccsctcagtgcctmtggcacaggcagaggcaccaggctctttgttcagatgtggtctaagctggaaattgaaagcagctgtaccaaggtgaaatttgaatgtgtgaacgcattgttctgyggagttcttttcaaagagatttcaaagccacaagttagataaggcccaagaagtaaagccagagtgagatcgaagtaggcctttcttttaaaaaataatagcttttattttatgtcagtatcttctttacaaatctaaccttcccttttcacgctttttgaaaagatagctaaaattcagtgtgttcctcttattataaaggattgggctaatagttaagcatttcaaaacatttcagtttcgttaatcagaagctgcagtgggtttgttttatagccagtttgcttttaaatttggccatgtgggctttaagttcaacgtatttgtgttctctttattgttactctctccagagtattacccaaactgtgaagttgtgtttatggggatggcaaacattcattctattcggaggagttttcagtctctgcggttgctgtgcactcagatgccagatccgggaaagtaagtccttggccttggctttcattttgcatygctcttaaataataagtttgcttctttccttgaactaagggggaaaaaaagaaaaaaaaattaatttggagcagtctttccttctgtttcttggtaatcttcagttaccagaccagtctctgcaagtatctccttgctgggtctgaaatgtggcagcacagaggaagagttgggagaaaatacagccatttgaaaggttttaaaatctgcagcacagaagaaatctcagcatcaaaacagaagcattaccttactgtttgtcctgggacctttcccttccacgtcatttttagcccaaagaaatttaattcttcagtttctgatgtcccatagtgatacataacctgttttgaactgggatgttttatcatgaaaagtcagaatttattcatcatgttctaaagggtttaaacttgccattaagtcagttccttttacatctgctttcaatttctaaactgttctcatttactaagcatattatcctgattcttattgcttattaaatatgaatggctggcatttgcagtgaggaaggtgaactaataccccctccaagggtactgattgaatacaagataaattaggaagaatgctctgtaaaacaaatatggacagataagtatttaaaaatcctgttttactatttcaggaagccagagataggtgccagagaagacagaattttcttttttctggtatttgtgctggagcccatagttgtttctctgggtcctattcagtagatctgatgatcacatcaagttttactgcgttctttatttgatttattaaatcagatgctgcctaaaccacttatattgactgccartagcaaatgattaaattcaccgtagttgtcatcagccaagaggatgaagcagtgcctttggggaaagcctgaccggagaattgagcttgctgcctcctttggggattagccatttgcatttgctacacagttccaggtcccagctagcagcgctttcttccctagggtggtatgtagaaggagccttactaaggacccaggagatcggccgcgaactgtgtaaccttggccaaggggtttaactactgtagatctcagttttcctgtctataaaatgaaagacatgtaatcaacactacatgatctaataccctccatatattaaaattcttaaagagctatcagagtcaaaaaagatagaattagccctcacctggtccacataaatgtcttggggattttattaaaggtaatgcttttatgtatttggcagcaaatcataatgctgcactgaagtctccctcatgggtaaaaagcagctgtagcagtgatgggcagctgtaattaggcccccggcctgtgtttggggctgtggaggataggggaatggtaggcttctagtgcaggttgagaacaggacaagggaatggggagtctctcagcagcccctccttggctggcaggttttggagtacagcttcattagtcacagacaacaccaactggtattaaataatagtttagttaggttcaaaagaacctcacaccggttctcttgtttaccatttcttcaggtgctaggagataatttagtatttgttctcctaagccttatcttttagttcctttcaagaatatgtgaggaatgaaataaacaattgatccatcaggaaaaaatgtttctcaggtacctgctaggagatagaaagtcttacgattggatttttacccataacagacttacaattcattaaacagtgggactccctactgtatgctaggcactgtgctgggggtacagttatgactgagacatagtgttagccctctgaggagtcacagtctggttggtagtccaaacaaatccatatacaaccagtacttatgcactgcattctgttgtctctttgcctggaaagacccccacctccttagactatgccaaaatttcatacttattccacagggtttagtaggcctttacagccttcccacagtcccctgacagaaatgtttatttcttcctctgactcagtgtttgaaagacttgacttgtgatcttaactacaaatctgatcacatttgggaaaaatcaactcctttttagggattgggaggggtgagggaaagcacaagaaacaaaatgcaacagagtttaaaaagcaagtgtgattagcttgtgattactcccaaggggcagctactgctatctgatactccraaagtgagatggagtctctctctstcatccatgctggagtgcggtggcctgatctcagctcactgcaacctccacctcccgggttcaagtgattctcctgcctcagcctcctgagtagctgggattacaggcgtgtgccactatgcccagctaatttttgaatttttagtagagatggggtttcaccatgttggccaggctggtctggaactcctgacctcaagtgatccacccacctcagcctccgaaagtgctgggattacaggcatgagccactgcgcccggccyctaaaagtctttcaaaaaaaggttcttcctagatcgctgctgaatccagtctgtgttgagcccagcaatactgtgtggccattggtatactaatttgtatcagtataaattatcagattgggctcatcttgttttagtcagtaaacattaaagaattaaacagtggtaagtgttacagtctgggtcataggcagggttgtgtgtaccattcttgtatatggcatccagcttatgtctcatagatatatttgtattcatgagtttttcttttcttttcttttcttttttttttgagaacttgttgggcgtagttgctgatcattaaatataaatatcttctgttttacatctcagaagtggctacattttttattcaggagaagattccagaaagagccactttccttataccatggactgaaaaatgtcaaatattttgcccggggaatcatccatacagattttggaacaaaaggtgtgctattaattgtagcccctatttctaaggctcttctctattgtatagtagggcttgggcctcatcctgagacatgctttataaacacacagatttttttgttttggcagtgttatatttggagagagaaatctttggaaattgctttttcatttgacartcattgagcatgatgcagtaaatcataaaaaaatcagcattttctaatcctctcctgtttttatagttggctatcagctcttgaaagcacaaaatggctccatcacttgtctgtgcttctgaaatcagcgcttctggtagtgcatgctgtggatcaggatcagcggccggtgctagtacactgctcagatggctgggaccgcaccccccagattgtggcattggctaagctcttgctggacccttattaccgaaccatagaggtgagcccatccaaatgggaggggttggtacttcaggatgagccagggaaacgtctcaggagtgataccagttttgggagtggtgattcggttaaagaaagtgaaatttctgttttggtcattgttcctttatgccatgagctaaattgtggtggttyctcccacagttcttgcacctcttaaaatggggcagattatgggtaacaaggtattgagaatatagacatattttcctttacagtctatctacttgtaaaagtttttagctacctcaggaaaataaggagtctgtaaaaggatcttggcatgctagatattaccagagtgttctgtggagaagcagctctacctgaaataaccatctgttgggttaaagatgaaagaaaaatcataaagtaccctaaaatatatgcaagtattaattaaacttggggtatagaaggattttacagacttgactttgtaacaccagaggcagaaatgttaagagaaatttaggggaaaagtgtggtttttatatagtgaacacaagaggctaaaaatacacattcaagaaaggcttagataaacgcagtcagtaccattttagtgatcatggaatggagttcagggaattgggaaatttccctaagtgtgtgcctcatcagggatagagccttccaccaaagggcaaggccgggtgggctttctgggaggctgttagaggggattgctttctgtgacaccaggcttaggactgtcacagtctggatagtctagcacaaatggtctctcctggatgcttccctgcagggtttccaggtcctcgtggaaatggagtggctggattttggccataaatttgctgaccggtgtggtcatggggagaactcggatgatctgaatgaacgttgcccagtgtttctgcagtggcttgactgtgttcatcagcttcagaggcaatttccttgctcttttgagttcaatgaagcattccttgtaagtttcttcattttggggactttctcaatttgaaggagggtcagtacaaatgttagtgggccagttctcacatgaaactgtgctgcctcttcagaatttaatagaggtgatttttttcctgtttctgcttttttttttagtaaataattttgctattttcaaaaagagaaaatccaggtataccaggtttgcatgaagtccttgtgttgttttaaacttagtttttttttaaagggatggtagaaaccctaaatagcagttagaaatagaagcaatcagaatgtctggaccatactccctccagtctgtctaccagacccccatgactgtctcagactctgcaccctctcctttgatggagggtacactatccctgccctctttcagcccctctgtccatttgtataccagctctcatctcctctcatctgctgcactggctggctccagcatttctcttctctgccttctgcatcagtgcgtttccctctctaccagagcatgggtttcagcttaaaaatgtgtagtgtctctcatctttttaaaacccattcttggtcctgcatttacctctagctatcatcctattgctcttgttcccctttacagcagagctcctcaagttttctacccttgctatctcaaatttctctttccactctctcttaaacccacttcaatcaggcattcaccccactgcttaacaaagctgctcttgttaaaatgaccagtgaccttcatgccaccaatccagtgagaagttctcagtcttcatctctttgatccatcattaccatttggcacagtttaaccactccttccttgaaatgctttcttcaattgaccttctagtacttccttgcagttgacttctagtacttccttgctgttagttctccttttaccttactggattgtttctgcctcctttgctgattccccttaatccctccagttcttttttttttttttttttttttttcagatagtatcttgctgtgtcacccaagctggagtgcagcagtgtgatcataactcactgcatcctcaaacttctgggatcaagagattctcccacctcagcctccccagtagctgggaccacaggcacatgccaagatgcctggctagtttttaaaaattttttgtaaatagacatggagtctcgctatgttgcccaggctggtctcaaacctcctggcaagtgattctcccgccttggttgcccaaagaattacaggcgtaagcttcgacacctagcctcctctccccagttctaaatgttggaatgcccccttgctcagcctccaggctgctcctccatccacacttccaagtatttcatccattctagtggctttaattgccatctgtatgctgatgagtcccacatttatacaccttcagcttagacctctccacttcagactcacgtatctaagttactactaggtatctccacttggctgtcttaatgttgattcagacttaataaattcaaaacttgatgcttctttttggagacagcatctcactctgtcacccaggctggagtacagtggcgcaaacacagcccactgcagccttgaactcccagggtcaagtgatcttctcaccttagccccctgagtagctaggactgcaggtgcgtaccactgtgcctggctgatgtttttaatttttttttttttttaagagatggggtcttgctttgttgcccaggcaggtctcaaacacctgggctcaaacaatatcctcccaccccggccttccaaaatgctggtattaacaggcatgagtcaccatgcctgtccaaaacttgattcttgattcctgtgtttcctcactataaaacttgatcttccagaagtcttctctctcaccatatggcatttccatccctccttttgtttggggcaaaattcttygtcatcgtcaagtctcctccctccctccctccctccctccttccctccctccctcttccacattcagtcagattctgcagctctgctttcgcaatctatctaaaacctggttatttattgccacctttactggtaccacactggttcaagccaccatcatctcctgccccaattgagttatcccagcatagagtctcttctaaaacacaaggcaggctgtgtcattccttggcttaaaaacctctagttacattttacacaaaagccaaagttcttaaaatggtctccagggccttcctagaggttacctctctaggttcatttcctaccattctccctcttctgcaatctcctttagtcacactggcctccttgctgtagctcagaaattgcaagcatgtgctttacctcaaagccattgcacctgtggttgcctctgcctggagtgcttcccctcagatacccacatgcctgctctttcaagtccactgggtcccagccagtgaggccatcctgcactgcctcatatgtgtcctgtccatctcagtctgccttgttctccatagcactggtcactcttcagctatgactagagcaagctccatcagggcagaagaatttgctggtcattgctacatgcccagcaccttagtcatgtttgggccatgtgaaatgctcaataatttgtagaatgaacaagtagttttacaaacatactgtcagctcagacttgagttgtacactgacgtgctcctgcrcccagttcatatgctgtggcgcttgtgagagtggctgttaattcacaatctcagactatttatcacggaagctaagaggaataggggcaccaacaacctgtctgactcaggttgttgggtcctggaattggtggtgtgaggaggaggaggctactgcatggcttactgggttccccgtcctgacagagtaaattgaagtgttctcagggatgttaggataaggtggctcagctgagctgacttaycagagtgtgcatgcctgattgcttaatttgtgcttcattggacttccataggtgaaactggtgcagcatacctattcctgcctgtttggaacattcctgtgcaacaacgccaaggagagaggggaaaagcatactcaggaacggacatgttccgtgtggtcacttcttcgggcaggcaacaaggctttcaaaaacctactgtattcctctcagtcagaagccgtatgtatccttcagcctttccactgtggtcagcagaaggaatttggggttggttacatatgagagcctttytgagtagtgactgtttytgtgaagacatctctactgtctctggatggactggttccatttttcccccatgattctgtcctgaggaaggcctgcttctgatggtgctctgatctgtttctgatgactrcttgctgagggtggtttggtttaacacagatctctactttgccaccctagacatgaatcttttttggcactgcctccagagcttatttctagcatattctgtcttacgggagaggcacttaagttgcttcctgatgcactgatagctcagaatgagctgccaccaggcccccagcaccctcccagtgtcaataagcaatgatacccaccaaagcttctgtctcagaacagtaaactgtgtttgacattggtatgtgtgtctgtctgattctctgctcacatgaagagctggcaggccctttaagactttgttccccgaaggaatgaataccttctgttaagcagagaaaaggaggcacatagacctatgtgtcagtttcatagtaatactagctttgtcagaatgcatcttagaccctaaagaagtcaaaaggaggctaatcagagttcataytgatttcctggactattaatatggttctcattacatttaagtaatcacagaaaagatttaagctgactgcttgtctctccccttcagtgtgccttctggggaagtaacaatacagcaggaaaatttccttcttttcacatgattaatttaaatgatcccataaaatgggtttgacagtgtttcttgaagccaagcttttgtgccagcaggatggacaatcaccatctaacagaatgactcactttcttaggcagtaaaagcaacaaatcaagctgatgaaagtcagacattgaaggtgacctaagaaataactataatgagaaagggatctwaaaaatattttatattttcatgctctcaagtggctcttaggtgaaaaatgttggctatataaaatgtctagtcctgtattggtcctcttgggatagacctgtatccattggtgctgcttctttgtggagatcctgtcagccctgttgggtattccagctgggtgcttgctcttgatcctcatttccagacatcctagaagacttaytggggcatatttaaacctgtgtcctcccccctcctcaggtgctgtaccctgtgtgccatgtgcgtaacctgatgctgtggagtgcagtgtacctgccctgcccatccccaaccacccctgtggacgacagctgtgcaccatacccagccccaggcaccagccctgatgatccccccctgagccggtgagcccagggtgatgccacaggcctgayagcctgtgtgggtgtattcctgtgttgggacgtgtgcagggatggtcagagatcatgatggtatctggctccacagtatctttcttaggtctctgcagttttttcagggaagttatagggatttctgagctacgaggctgtaagatccttgtttctgggagtgagttaggccctgttgcttcatgttgttttgcatacactgagccgctcctcagtgatagagcaaatcctccagtttttctgtgaccccctggtttgtgttttccccagtgctctgtgctcctgcctatttgccatgatttgtcttctgaggcttaaaaggcagatgctgtcagatgacagaaaattttgctttggggccaggcttggtggctcatgcctgtaatcccagcactttgggaggccaaggtgggaggatcgcttgagcccaggagttccagaccagcctgggcaatgtgttgaaactctgtttctacccaaaatgcaaaaactaaccaagcgtggtggcacatacctgtagtcccagctacttgggaggttgaggcaggaggatcacttgagcctggaaggtggaggttgcagtgatccaagatccattgcactccagcctggatgacagggcaagacctgtctcaggaaaaaaaaaaaagaaaagaaaatttggctttgtcacttgagaattagctttattaaattcagactgatagataatacattaatttaaaatactgtaatatcaagaaacaccagtgctactttgccatccactgagaaacacagcagcatcatgaagaacgtcttttggaaatagcatttgcaggccrggcgcggtggctgacgcctgtaatcccagcactttgggaggccaaggtgggcggatcacctgaggtcaggagttcaagaccagcctgaacaaaatggtgaaacacccatctctactaaaaatacaaaaaaactagccgggcgtggtggcacacacctataatcccagctactcaggaggctgaggcaggatcgcttgaacctgggaggcggaggttgcagtgagctgagatccgccactgcactccagcctgggcgacagagtgagactccgtctcaaaaaaaaaaaaaaaagaaaatagcacttgctgttagctcatttgtatgtatggggcatggggttgggggagtttgaaaggaaatctgcacactaggaggacttgttccggagctttgctgctccagcagtctgggcctcgctccagagatgctacagctccatgagtagccataatggacccagttatgaaacaactgcttgttaaaacctattgtctcctacttcctccraacagtttccaagattttcatttcccccaaattcctttcctttaggctaccaaagactagatcatacgacaatctgaccacagcctgtgacaacacagtgcctctggccagccggcgctgcagcgaccccagcctgaacgagaagtggcaggagcaccggcgctcactagagctgagcagcctggctggccctggagaggatcccctttctgccgacagcctagggaagcccaccagagtgccggggggtgccgagctttctgttgcagccggagtagctgaggggcagatggagaacatcttgcaggaggccaccaaagaggagagtggagtagaggaacctgcccacagggcaggcattgagatacaggagggtaaagaggaccctctcttagaaaaggagagcaggaggaagacacctgaggcctcagccattggacttcaccaagacccagaactgggtgatgctgctctgaggagccatctggatatgagctggcctctgttctcacagggcatttctgaacagcagagtgggctcagtgttctcctcagttctytccaggtcccccccaggggagaggattccctggaggtccctgtggagcagtttcgaatagaagagattgcagagggtagggaggaagcagttcttccaatcccagtagatgcaaaagttggctatggtacctcacagtcatgttctctgctaccttcccaagtcccttttgagaccagaggaccaaacgtggacagttctacagacatgttagtggaagataaggtgaagtcagtaagtgggccccaaggtcatcatagatcttgccttgtaaatagtggcaaggacaggcttcctcagaccatggaacccagcccttcagagacaagcctggtcgagaggccccaagtggggtctgtggtgcataggacttcccttggcagcactctcagcctgacacgttccccttgtgccttgcctttagccgaatgtaaagaggggcttgtgtgcaatggtgccccagagactgaaaacagggcctcagagcagcccccaggtcttagyaccctccagatgtaccccacacccaatgggcattgcgccartggggaggctggtaggagcaaggactcactgagccgtcagctgtctgctatgagctgcagctctgcccacttacactcaaggaacttgcaccacaagtggctgcatagccactcaggaaggccatctgcaaccagcagccccgaccagccttcccgcagccacctggacgatgatggcatgtcagtgtacacagacacgatccaacagcgcctgcgtcagattgagtcaggccaccagcaggaagtagaaactttgaagaaacaagtccaggagctgaagagtcgcctggagagccagtacctgaccagctccctacactttaatggagactttggggatgaggtggtgagtaggctgtggtattcctccatagctgcccaaggagacggcatgctgaggctgggtgccctttgtgcccagtgcatggtgattggtacaggttgttaaaggattggaaaggtccagagtagccctgttaagagaggctggagatgagcctccacgacagcgatggcagcctgcctgttttctgcttcgcttactttctgcagatgtcctgttgaggccgttggagaggaagagacttagcatgcactgcatggttgatcagatctctcagacacaggatcataagtcttcagaagggcttgaacccatgggcagaatgacatctgtagggcaatgccaagttattcctgtcagattttagtgcctgttctgccttagtaactacaaagtattagtccttccagacgtgggctatggctttgaaggttcagttctttttaaacaaatatttatacccatcctgtggcagatgctgccagtagaaatggagagaagggactggtttctagcactgttgaggagttagctctgatgggggtttgtggctggaaatgggggttccagagggggaggttctcaaggaggtgctttcctctctgggtggacttgactcaggcagctcaagtacaagtgtgagcctggctctcaagtggtcagcgtacattaaaggcgggcacatccagtgactttcagttcagagtgacttggcttttccttcatgctaatgatagtttctcatgttcccagagagtccttctaagaaaaggagggcatcccgaaagcactcagctttaacttagtggcaggcagggttggattgacaggcccactggagcagctgacatacagaattctcattccattttggtcacttccctctcactcactttctggaaccctgagggcctgtttttctactccagagtcactgcacacaacctgtgtatccctctcccagctgagcccaggcccacactgcacttcttcaccccagttcttgatggctgatgcatctgcagattcggcagtcctagcactcggccccacccagagtcctcagttctcccttcttcaccaggccttttcttcttttgggaggagaccaggttcattctgttcagctgtgtttgtttgccaacagacttcaatccccgactcggaaagcaatctggatcagaactgtttgtctcgctgcagcacagagattttctctgaagccagctgggagcaggtggataaacaggacacagaggtacaggctcagcccctgctctgagtgccatcnatttaactgttttgtggttcttctccacccccattcccaccccatacccctggccaaggaagcacctcccagcacagctagccctgagcctctggcaccttagctcctgggaacccacatgaagcctaggatttctgagccagggagactcagcaagctggccctccctcttcattgcctctatgaactggagccttgccagctctcacagtgacccagggtgctgctgcctgctactttatctcaggggagattggagtcccctccagggaaacgatttggacgcctttcttgtactgttgacatcagatctgctgggctggtgccactggagctgatgtggtccttgtgactcttgctgcccccagcatggctctgctggctccagctggatggcccatctcctgtcagtaacctggtcccatctgttttgcagatgacccgttggcttcctgaccacctggccgcccactgctatgcgtgcgacagtgccttctggcttgccagcaggaagcaccactgcaggtaccattgaggggctgtggtagggtgggctgtgtgtggaggttgagggtcggcccacagagcctgcagagtagagggttgtgggtatctcagtgttctgtctgaggcagagccwtggtctcatcttcctgtgcctctgaaattggtgtttgcaaaactgcatttggcatctttgttcaaattcagagtaatcactgttaaattctgaaatgtgcaaatggtagcattttgttgtttcccagattggtgaaacaacagccaccactgaaaccaccatttcttattctcagcataacatttcttcccattcaacatggctactatgagcaaaaccagttttcctgcgatggggagggaactattttcctattcctttcctgctccctgaccccacacttgttttcccttgtgccattggtgagcagctgtagcttgggaagtagtagagacagctgaggacagtcttccaatcattaaggttcctgacttctttttccttctgggttagggtagtgagtttactagggaccctttgccccagctagggtgttgactgtctggtggatgttcagtgttcttagaagaggaagtttatctgaatcatgccatagctcacccacacgagtgggtggattgaaaatggaacagtctctttgcctagtaatgatgcttctaggacatgtatctccccaccctgcaccccaagcccagatatctttggttggcttctcttctgagctctttctcccctccttgcagggacactgaccgtgttgatcaaacgtggtgagcatttgcaacaacctgcctgtgatgtctgcacatctacaataacttctccacactaactcttatcatttccccctctctgcacttactagggtgaagcctggggccttgggtgcacaggcagataggtgggcttgaggggattcaaagcagctgaggagaggccatcgagggtgggtcaggctgcagccatgtgctcccctcctgatcacagaggtcagccaggccgtcttgcttgtgacgagaagtagtgcttcttgtcttctggtcttgtaggggaaccagttgggttttcagagctatttattttgggtcagtgattcattgagatgccagaataatgctagtaatttccagstcaaacagcatcactgcttcttttttccctttttttttttttttaagagaccaggactgaacagaggtgatctttccagagaattgttttagcttggaagacttcaaggaaagattccacttagtgtctttcagggtcctctgaaagaagtcagatagaaaagcatcagccaggtgcggtggcttacgcctataatcctagcactttgggaggccgaggatggcagatcacctgaggtcaggagttcaagaccagcccgaccaacattgtgtaactccatctttactaaaaatacaaaattagctgggcatggtggtgcacgcctgtaatcccagctccttgggaggctgaggcaggagaagagaatctcttgaacctgggaggcggaggttgcagtgagccaagatcgcaccattgcactccagcctgggcaataagagcaaaactcccatctcgaaaaagtaaagaaaagaaagaaaagcatcaaattcatgtcaggcttttgagctgaactccagcaggaatgttaaagaagtgtagatgttcagaaatttttctgtgtaactacaggtttttgctgactcacgctttttagaactagttacgaagtacagcattctagaagatgaattttgtgtttttcttttctgtctttccattgccccatgtcccaccttttccttttgtggtattcttttgttcccaactggtcttagtcttctctcctcctgtgcctaagtgatccttaatccagcagtgggtttgcattccgaacagcataaatgaaaagttagaaggctaagaagctgccctcccccagtctttggtgggctgtgtcaggctccttggagcttcttgttcttaggctcattaggattgatttgtacctcagggcccagcaaaagtagagttgtaaggtgggcagaaactcattctttgccaattccctttcctgttggctctgatgggcatccatctgggggtgcagaactgtgctgcacagatgcctcagaacccagctttcaggggaggaggagagggatgcctggggcctgagtgcattctggccttctggtagaactctggttttccctggagatgcatgggtcggggagtgagccataattgactgacacctatctaataagggggtgtgtgtgcacgtgtgttcatcctgtgttcttgtcctcccacctctcctctttcaccctctgagcatgcatcacaggctrcttgtccctggctttgcatgctgccagcagagcagtccaaaatggcagcagtctatctgccatgttgctgcctttgatcctctggagaagtggccgttgggcaaggctccttactccccagtgaggctgggtagttgtttctctcgtttgaggagcctggcctctgtgatcacaagctacacagagggcattgcctaggtgggtgtggccactgggttttcctggatcaggactaacccattgttaggaccatgtattcttacagatctctcttgagcagcattcttttgtatacctgagcagcattcttttgagtcagtggtgaggcagccaagaatccttggccccaaagtgaaaatgacatgtgactctgctaggtagggacaccctccctacccagcttgttcctgggctagagagatgaaagggtttgatctcaaggagctccagcacatgcaaattacacacggcaaagtttgtcttttgaagttggtttccctcygcatacctgctggccaaaactaacattgttctgtttcttctcatctcaaggaattgtgggaacgtattctgctccagttgttgtaaccagaaggttccagttcccagccagcagctctttgaacccagtcgagtatgcaagtcttgctatagcagcctacatcccacaagctccagcattgaccttgaactggataagcccattgctgccacttccaactgaagctcagtgacctgggtgggcagtggccaagctgctgttcctatgacaggcccactcaacctgggcagaccgagaggcccgtgcactttggaatgggagcgtggaaccacctgtacagagtgacagatttgggatgcaccactggattgtagattgatttttctttcctgtccccctactccctccctaccttttccatcctcctcctctgccttcaaaaaaggaaactttcccttggttgtcttaattttttttttttttgatggaagaccaagggttgccaggcccactgtaactgccgagctgcctgctgtcasgtgacactgagggatggcttgtttcttccgggtgggaggatggtggtcagagccaggagtatggagatctgagaccgtgagcagggaagaaagccagtgctaacatgcaaccattcctcacgccaccgccacatcagagctggttgggaaccctttgctgctggggaggctggaagcatattccccaagagcactgccctgggcatcatctccctcctgcgaggagctgagccagtcccctcacagatggataaatgaggctgatgtttggagggagaggcacacggtaaatggcatccccttaggcgcctctttgggaaaggaaagtggatgctcctttgaggcaggcgaggggctgggagtgggtagccgtcatgttgtcccccgtgggatcccatttttaacttgacccagattgtcttgggctccttttactttcagggggctgctttcctgggccaggctgtgtagcacttcccaccctcaggcatgagtacagactggtcaaaatgtttatgcagtcaaggccaaagcctgccctgagcccagacacacctgggtccccattctggggcctggtcccctaaacaatctcttcctyagccagcacagggaaatccagactcagggttccagaaatcccccgttcccaaaccaaaccaatcatggatcttccctttaaggggtagaatcagcctttagagttacaagcccctggaaaagggagcaggtcccatacaatcagcctttctcctctyctcttcttgggacaggaataactgctgagcagtccccctttgccactcctggctgtctgagtgggcacttgtctggctgctggccagcagtgaagggccacttggtgacttcgtagggttccttagagaagtgacatggccttgaggagattcagggcacctttcctcagtgagctttgatatggtccaaaaacagccttaaatcaagaatatttgtggaggtaggtgtggggaaggttggagaagagttaggtttgtgctttgtaatcttggcatccatgttttgtgcctgccctccctcttggggaggccatgcttgactctgctgaaagctgctaactggtgacagggtggatcatggtgaggactaggggtaaggtcagggaatgcttaagctctggccctgccctgtattcctcttccccttggtagcagttccctgaccaagggcaaggtgtgtctcaggaaggtggttctgtgcatgcctgggtgtggttaaggcgtggcccagaaggcttccctggtgctctcagtccaggcaaagcccagagcatctgagcacgtctctgacttccagtggcaacacagtttgaaygtggtgaaacagggtgtagttcttttccacattctgtgtcatctagtcgtgcaggtagggaaaaagttggtctaattgaagattgtgcatttcctagtgacaggtgccaagaggttatgatacgggtttcttgggtctgatgtacagtgtgaataaatgcttgcagctcttagctcttttttgatcgatgaagcacttttttattaatattttcctttgttaaaggaggaaccgtaactctccatagctgtacatataacccttttctcctaaagaggagtcartcagtgctcctatatttttcattttttgtcaaagcaagaagtaaatactttagaattgttaaatatataaataaagcaaataaagttgagtgttccacatggtagcatttgctaacacttcctaattctttgccctgtggtttatcccctcttcgtcccttttccctctcacacagaagtgtttgagggcctgctgggaaactgacctttggcaaaggaaagctacagatagccttccgactctagaccttggcaaggagcctcaccatgatgttcaagcactgaacgcatttcctcagtgattttgctcctaaaatctcccaggctaaaagagggcaaagcagtcagggatctgacctggcagctattcctccttctctgaagagttcccatcagtagtcattacaactacctctcgcctcaaggctccatttttagctgctgctctgatttcagggcagccagtactctggccccttcagtcggggagtggaaggagatgtggggtgggggtgagaaaatgcttctgcctgttgttcttgaaggatagactatgggtgggcagagagaactgggggcagaaatggaattagatgtgattgggttatgcagtcaactagaggtctccttcccgccctctctccacacagagaggaacctctgctccttagctcttacagcaggactgtggcatctagtcacttcaatactagttcttgctcttcacagaggtagatttttctttaccctacagcactgttgggcatccctcccatcacatgggtctgtgggtgagatatgttatgctgttcctccctcgggaaggttggtattgaggggtgccttgctccagaggcgccagcccagcatctgtggtgagttggctaagatccagagtgacctgctcagagctccccagaggccttcactctttggggcagtctctctagggtcactttctgaatgtaccttctacctaaagtatacaaacacaaagagccagctgagctggttctagtgtgaaagccgtaagtgccacccagcaggcgtttgaaaacaagaaatcattcttctgtggaaggagaatgtgccatctcagctaccctcagtccgccagggagcccagtctgtgtattcatatgaagttgtgaaaaccatgagtgtgtgccatggccatcgtgtctacacacagccactattgttcctgtgggctagtctccagcaaattaaaacactggcatggcctaggaagggcgttgcgagctcctaaatggaaagcttctctgggggtagggagatgaagagccaagatgctggtgaagcaggtgcagtgaggatccaaggcaaggaattgccctgagggaggtggctgcatatggagaaaggcagttctctgtgggcaaggccagcttgcttcaggctgtagagggaatttggtctgaagcaacagggcatgaactgtgactttgagctgccaggttgtcttcatctcagaactttcctatcctggcactctcgttacctttcttctataccttggcctctgtaactgcagtccaaaacaagttacagctgccttaatccactgagattctctatgaggatgtacagaaaagttttcctgtaataattttgcttatatgctaactcttttcatgttagcaaagaatattctatgaattagaatgttactgtggtagatctaaaggagaatgaacagaaggtgctggaggacctgttaaacaatctctggctattaaaaaacatcaagatgagaattaaaggcatatcctgatatacttgcctgcttgcacatgaggctgggagatcccatgcctgttgaagttaactctagccctgacctctattgatcttttgggaatgagggctgatttgaaggtgctgttgcaggatttcatttagctgctgccagttcaagtgacctgtccccagggctgcagctgtatccacctgattgcagtaggtgagggctaacagcagaatttaaagtggaccctgggctgtggagcaaagtgactatccatttggacttttggataatgtggcaggagtcccagctgtttaatttctagtcacattttccagaaagttgttctaagttgagattactgacaagatttctcaagggcaggaccagatatgtgagagacttctagttcagagctgacccctctaagcctctgacacttaaacacgagtcctgctgtccccagcacacaactgcactgaagccttgttcctctcggctggtgtagagctcatctgcatgttgtgtgcagataccagtagcctccctgcttgaataggcctctcctaggctaggcaggtgttcagaggcatgaaggtctgggcaggggaagggcgtcttctgaaatgggagttaccaggtttttaaatgctgctattgttttatttaccatttaaggtcttttctattatatctgagtaactagtcagtttttcttacagtgctcatagcagttgtatttgaattgtattttcagtgaaatttgttttacattgccatttaaaattggcctttaacagcttcccaamtrgcttatatttttttttaatgaaaacataacccatgaggctcagatgctgttgaagaaataaatggtatgttgctgctgacagtagtgcttgcctattgtaacagcattggttctgctgtagcctcggtgaccatttaagttgaataaatctgtcattttcacccacaaacagttgttgagcccctggatttgggttgtcactgtggttctcctgccagtgctataatccagtgtcgtaggtgcagggtatgaatcagctcagcctcttaggagagaggggctctcagcgaggagggggcggggggggggkcactatttatcttccagaggcagggttcatggattcctgatgtttagaggcggaagggaccttaggtcacctacttccacggttttcatactgttctctggggcctcgtggagagggagcctccaggcccattcaaagctttattagatttaaaagtaagatctggtatgaagaaaggttttgtttgtttcttaaaataaaaagtctgaaaatcactaatccaatctcctcctttttcattgaggaaactgagactcagagagggccaaagacatccagattaccaatgagttaacagcaaaatttgaataaaagtcattcttggccaggcacagtggttcatgcctgtaatcccagcactttgggaggccgaggtgggaggatcacttgagcccaagagttcaagaccagcctgggcaatatgttgagacccatctctacgaaaaatataaataaacctgtctctacaaaaaatatgaataaactagtcaggaatggtggtgcacacctgtagtcccagctacttgggagcctaaggtgggaggatctcttgagcctaggagtttcaggctgtggtgagccatgatcacgccactgcactccagcctgggcaacagagggagaccctgtcccataaaaaaaggaaaatactttcccgactcctaaccctcttcttgtgctcttgggcctccagaaagcctgatgtaaatagctgtattggttctcgttgaaatctcagcgaggagcttaggcaattgccatcacaaggcttgaattatgagcccttctctccctcttaaccaaaatcaaaatgttgtgatagtctaatccagtgtttttgtttttaacttttcaaatacataaaaacaaatgatatgttattagcatgaatcatcacagtttaagtcataacatcttaaaatcagtgggcttggggagggagcatttttcattagtgcagatgataggttcactgtgaactgtcccagcatccaatttctggattttgttttagttgttatataatatgggggagtttaattttaaaaaatttgagttttataggtaagcggttgcaaatggtagtagtcacagcttgcctgcaatctcttgttgacaaaactgaagtacatgcctgaaaaaagggattaatagaagaatatccaaaacctgctttcagtctttatcatccatatatcagatgagagacacccaaagatttataagcactaaaattactttatgctcagggccaccaggtctgagttggccctgggcctaatgatcacagcactaagctggtgccctcccagtcagtgacccctgcaaaggccacacacacacacacagcaatacagactgtacagtgaagtctcaagcagcctcactgaatgtgttttaaacctttgggtgtatatagtttaaaagacggttattaatatttatcaggacattatttattaatatcaggacaaattctcctgaggcagtgccacaaaagttggtttgaaaatcaccagtttggtggaaagcccctgtgttttagagcccacagacctggggtgggatcctagccctgcagcaccagctgagttgctcatgggtgtatgaggaactcggagacatttcctcatctgtagcagagcacatggcatataaatggagtgggaaggtgggggcctagcaaatgctgtcctccccactgtcccatgaaatgagatagatagatgatagcatttctgtctctggcttctagcaggcatttggaacaatcaatcagagccaggcagcacttctattccactgtgtgttgaaactagaccctgctctcgcttccaccttacaggggaaaacatttgactttgaagcattccaatctgagttttgcactaagttacaaatgaatcactagctgaagaagacaaactaaagttcatatatgtgttttagttttatttattttgagacagagtctcactttgttacccaggctggagtgcagtggcgcgatctcgactcgctgcaacctccgcttcccagattcaagtgattctcccgcctcagcctcttgagtagctggaattacaggcacccaccatcatgcccagctaatttttgtatttttgtagagatagggtttcaccatgttggccaggctggttgaactcctgacgtcaggtgaaatgcccgcctcagcctcccaaagtgctaggattacaggcgtgagccaccgtgcctggccttatatatgtgttttgtttttaaattaacattttgtaaacagatggtggtctgcatgtgcaccgatgctttaagagtgtatggagccaatgggaagggagtgtggagagaaactgcttgttggggttgaggcagcatctaagaacgcctgagtcctgccatggcaacaatcctgcaaagacagacaggacctcactttgttaaactgatgagtttaagttgttcaagactaaagacgaagccagaagatgcagactagcttcgcaggctgagaagtggggaaggtggagccaggtggacctcgcctctgcatcacagaggcctgggtccaggctatggtgctcttagcatctctttaagaataaatcccagagcccaaggttggaagaggaagtggaggccttgcgttcagatggccctccccaccctctccaatgacagaggagcccaaggttgcccaacatatttaaggccatgtcatccgagttcaaatagacatgagtttgtagtaagtggttgctgcactttgccagctggaagatcaagccttagaactggaggttctttcaagtcccccagaaagtgctggcatacaatgtgtaccagggcagctccctctttagaagtccctgtcagcccttgggacataaactgcatcccctggccccttgggggtggtctgattctttctgttctctttcatctgattcagtaataagctagctagctagctgctgccttattaccgcctaactagagactcctagttttggaaagacagtaagatgtcagcttgccagcctctattactgggatgaggagacggaaatggaaaccatgagaatggtgtgcctctcgacagttgccactgacccctggagaggagtcctagttgggttgggaggaagggggttgggcttgaactctccctgcccccttacttttggagcagcagcatccccccgaggagctgagaggtcactccctgggtcaagcagcctgagctagtccctctccacggacaggatgattcacagcccagaaaagggagcagccacctctggaaaccgtgtacatcctaagagcccctcctgcagcacctttcttaggttgattcagggagggaagctgtgggaggagtcggggaaaggcctgggagcagtgcttcctctctccctg

SEQ ID NO: 96096 - DNA, 15986 bp, Homo sapiens
ccttctccaggaagctctcccaggccaggccagtgaaactcagcttcctacctcagagctctctggcacccccagcccacacagcccatcaggcacttgccctccgccctcagcctgcttcacacagagtggggcccttccttcctcagccaggacagggcacatcgtctgtcatctcccacacaccaagcacagctaggatagcaggtgcacacatagggttgcataccggaccctggctcctcctgctcccaggctgggctggcaggcaggggccaggctgggcatggggtggcagcagcctttgggctgggcttacagtgagcaccgtgtggggcttcagagaagactgctccagccccggcctcccaggagtctgagcatcctccgtggcctttgcaggagacggggctcaaggtgaaccagccagcgtcctttgccgtgcagctgaacggtgcccggggcgtgattgatgcccgggtgcacacaccctcgggggctgtggaggagtgctacgtctctgagctggacagtggtgagctggccctgcccctgccaactcccttccgggctggggccttctggggaggggaaggatggaggctaagccaccaaccctttatccacagacaagcacaccatccgcttcatcccccacgagaatggcgtccactccatcgatgtcaagttcaacggtgcccacatccctggaagtcccttcaagatccgcgttggggagcagagccaggctggggacccaggcttggtgtcagcctacggtcctgggctcgagggaggcactaccggtgagtgcctggagctggggaacagggtgacttctgggggtgcttggccactagtctggtgctgctttgctccagaggtaggggccctgcttcctaagccaggagtccccacagaggctgtccagggagctggggcccagtccctcttgggccacaagcccttcctgccctcagccttgctacctctggcccccaggtgtgtcatcagagttcatcgtgaacaccctgaatgccggctcgggggccttgtctgtcaccattgatggcccctccaaggtgcagctggactgtcgggagtgtcctgagggccatgtggtcacttatactcccatggcccctggcaactacctcattgccatcaagtacggtggcccccagcacatcgtgggcagccccttcaaggccaaggtcactggtgagtgccagtttgggggaggtccacccagcctgcagcccagcccagcctggagggctccggtggccacgcacatctaggccatagtctgcccccagacatcatggtcagtttaccagggctagaggtgggcctggctctacacagtacacgttctgtggagtcgggcatgatcacgtaaaaatgccattcttcctctccatcgtggcccctcactccttcagctctggcctgcgctggctcctcaggctctagcaccactttcttccctcctggcttcccatattcctccgctccaagaagacacagtcggtattgagcaagcttcccctcttgaggctgtctgtaggatgagttgggtgggtgttcctttgtaaagtggctcttaccctgtgagttagcctgagttcccagacaaagcctgcaaggatgagggacgcagcatctgaggccccagccctagggtggagcaccagttggagctggcagctcagggccctggctgggaatgaggctgtgctcctagagtggcccttggaggaatttgagggggagcctcaaatgcaggcagtgagtcccacagggtggcagtgctggccgagggtcccctgcctggggaagaacaggaagcccttctgactaggtttgtgccccctccacccacccctcaggtccgaggctgtccggaggccacagccttcacgaaacatccacggttctggtggagactgtgaccaagtcctcctcaagccggggctccagctacagctccatccccaagttctcctcagatgccagcaaggtggtgactcggggccctgggctgtcccaggccttcgtgggccagaagaactccttcaccgtggactgcagcaaagcaggcaggtggcggggggagggcgtctcccggggtgtgagcaagaagccgtcagggagcagggtgtgggtcacagtaggggactccctggtgtgagcctgtccctctgcctccctctccaggcaccaacatgatgatggtgggcgtgcacggccccaagaccccctgtgaggaggtgtacgtgaagcacatggggaaccgggtgtacaatgtcacctacactgtcaaggagaaaggggactacatcctcattgtcaagtggggtgacgaaagtgtccctggaagccccttcaaagtcaaggtcccttgartcccaaaagtgcctccccagcctcagcccccacctccagccacacacacattacacacacacacacacacacacaaatgtgccacacccagacacgcacagaatcagacactacaaacacctgccttgggggtgaagtgaaggcccagcctccccaccccaccgcgccccaggggttggaggaccttgtctgtgtcaggacagtgtccctccctgggaatgtgacatgagggccgactggggccaggctcaggggcagaggctgggacacaaggggctggcgagggctgcgaggccagggaagccctgagtttctggcggggctgagcagtgggggagcattgtgttgtgggtgtctgtgtgtgaggtcaccctcaaactgcaccgccggccagataccctcctgaccccgaggacttggtctggtctctctggtggctacaaccccagagttttaaggacttggaaaggaaagcacaatcagagaagaaaacagcccccgaaccagcaggagtggcctggcacatggaccggcctgagcgatgtgcactccacccaagccaggctcccagggggcctgatttctctctcactgtctctttttttaaaatggttgcacggctctgccccatggggggccttttttacmcactgcgaggcccagctttytaggggacttttgcacatgtcatgcagctcagctgggagctgcttaggtggaaaactccaaataaagtgcggctgtcgcagagggttggctgttccttgggggtgtgctctgtgtggctggctgccctctggcctgccacacgaaaaaccgggccctggggaggcagaggcggcctggctgttccctggaagattgacccagtcgagggaaaggtcctggggcagaagtgaggtctgggatgttggcagagtgcttgaaagaaccgggggtgggggctcggggatgtgggaaggggtcccagcgggagggttcgtggacagtacagggtgtggatactgtgttctacagtactgtcccaggacccctgggaggccagtttcagttcagcttgacctcaaggatgtttttcaaattaagactttaaaacagtgagcactgactcaaacaggaatattcctcaaccagcaggcaggcagaaccacctgcagactcagcaccttccccctagtcagttcctgaatcaacttggcctgtttcatgcccctttccagcactaagcttgcacagggcctccctcctgaactcctgcaacagccctgccctggccagctccctccaacctcccctccatgctgcagcttggcgggggggtcactttaaagatagtatatgcccctctctggtttagggccatctgtgactccctcctgctccagagtaaagtctcctcttcctgacaaggtctccagggccacccaggttcagacagcagcctccccagccatatgagttgggcagcaggcccactctccattgtgccctccacctccaaccccccttcattacctctgggcacccatgctgtaatttgggcccttgcccggaaacaccyttgcctccccaccctcttcatcttcctggccaacaggaagttttcctggacccctccctacccctcctggatcagtgcccccagctcccaaactgccctgggacacatctctagttgcagttacgaccctgagctgtggccatgtatccacggctccccaccagatggagctccctggccctgggtgtgaatgagtgagtgaatgggtatgaatgaataaatgagcagctgagtagctgcagcagggaaaagaagtctttcattcaactgatcccacaatctagacccacctgggcatttcagcacatggtggtgggcttggcagaaaaacccacgagtccccaactcctaatccctgacctccccacctctctcaccaggctctgtgcttcctccctcttccctcacaccctcccacacacccatcctcactctctgcccccctcaccctcaccctcacccctagatgtgctaatttccccctcagcttcggctgcctccacctgtgtgtggctgataagctcacagacctccagcctgcctgcttccagccagccacagtgtggccctgggtgctgagccttacaggcccttcctcattaatcctcataacagccctatgaggtggggctactaccatctgaagaaaccaaggccctgggaatttcagtgatgagtctgaaaccgtacctttaagtagtggggcacagattgaaacccaggtgtgcccgaatcccaagcttatcacacatacaatcgctagaccagaccacgggcacgtctcaagcactccaaactcacaaaccccatgccagacaccgggagtgctgatttgttaaaagggaggaggaaagagtggctccttccccttcagcctgctcatcttacagaggtcactttcttggcaatgttactcccatccatgtgctgcacaggccagaaacctggaaatcacccaggtctctctctctacctcactccccaaacacatccactctgaaaccagttttgtcctaaatatctaaatatctctcggctctacctacttctctgcgtttcccattatcaccacctgagtcctggccaccattatctctcacagtggcctcccaatttggtttctcctccctcagtttcgcctctgcacacagcacagtcaacagtgagtgacagctctaaaacgtaagtttggcgatagcactctcttacttgaaatccctcagcagcttcaggataactgtcctcaggataacttccagatctttttttttttttttttttttttttagacagagtctcactctgtcacctaggctggagtgcagtggcgccatctcagctcactgcaacctcccttgcccgggttcaagcaattgtcctgcctcagcctcccgagtagctgggactacaggcacacaccacctcactgggctaattttttttgtatttttagtggagatgggatttcaccatgttggccagactggtctcaaactcctgacttcaggtgatctacccgcctcagcctcccaaagtgctgggattacaggcgtgagccaccgcgcccagcctgcagatcctttttttttttttttagacagggtctcgctctgctgctcaggtttaagtgcagtgccgtgatcatagctcactgtaaccttgaactcctgagtaagccctgctgcctcagcttctcgagtacctggaactataagtgtgcaccaccacgcctggctaattttttttttttttttttttttttttttttgagacagagtctcgctctgtcacccaggctggagtgcaatggcacaatctcggctcactgcaacctccgcttcccgggttgaagcaattctcctgcctcagcctctcgagtagctgggactacaggcgcccacaaccacgcccggctaattttttgtgtttttagtagagacgggttttcgccatgttggccaggctggtctcaaactcctgacctcaggtgatccacctgcctcagcctcccaaagtgctgggattacaggtgtggcgtgagccaccatgcctggccttaccaattatttaactttccttgaaggccctacgctctctagtcagtacgcctttgcacatgctgttcctctgcctagaacaccgtcttgtcctcacttctatccccttcatcctgcaggtccttcaggtctcagcttagatctgaagcaagcttcttggggaagggttctttggacgccccctctctccatgggttagttaccatggatgtgtgcttccatatacttttcacattctaaccattaacacacagctttgtagtcgcctgttcccttgactttccacctcactaggcagtatcatcattaacttttgcaktcctttaactgaacaaacgtgtgttacttgttaactatgtgtcatagttacacacatacatacacgataaagacccagaccctgcccttgagatgagtaactgcgtctcttctctggggtctcggcgtctaacagcgtcaggtccaaagcgcttgttgaacgaatgaaccaaggaacgagtgaatgaacgaatgaatgcccgcgaaggacgtggtgccgcgcggtcttctgggaatcgtagtcccctggttcgggcctgtctttacggcgcaggcgtattcacatggaggccgtgttgctgttaatgcgcatgtcccggaatgcggctgggaggactgcgcatgctcgaagggtgggggttgaggccgacggggcgccgtacggcggaggcggggtttcagtggcttctggtgctctagggtgakctctgcccggctgcagggatggcggggaggggtaagctcaycgcagtgatcggagacgaggacacggtgactggtttcctgctgggcgkcataggggagcttaacaagaaccgccatcccaatttcctggtggtggagaaggatacaaccatcaatgagatcgaagacactttccggtacggtaccgcgcgaggcctgaacgggcccttctgctgctcggtggagtgcggggcgaggctggaggctgcccggacgggggtgaggggacgatcctgaaagtccttccgcccttccggagcggaggcctccgcgccccaagtccccgtttggggctcggtgggacagaagctgtatcaggtccacgagcccccccacctcacatgatcgtgtgtcatgaaagaaggggaacagagctcgtgacagcctagacagtgggcttggactttgttctgctttctcctcctttagaggctcaccatcgtcccgtaaggcagggatgatttttgtcctactcacaggtgagaaaactaaagctcggagagggtaaggcacacactaaagttacgagtcggcagaggcagagctagaatttgaacccaatcycaaccctttctgcctccggtaagccaggtacacactcttggcaggtctcctcaggcggcctcggaatttccttgtagtcttgagcacagtaggcagaaatgtcgggactgtgagagccttctgctaagaccttgcactcaagccctcactgcctgccttaggtcagagtgtgggtgcaggcatgcttttaatccaccaggggtcctggtgactggaattaaggataccagcctcctattttattcctcaccccttctccagggcccctgtaccaagtctcaggaataaaccactcacctgtttcccccaaacagtccagcccagggctgctggctgagactggttcctgctgcctggtgtattaggtagtccctgacctgggaggctgttatctgccawtctctaagctgtctggtaaagtgacccaagttatcatgggagaaggacaaattttacttcaagaattttttatgtttccaaccaaaagggacctcagagatcaaatctaacccagtgactggcagggggtgggtgctcagtaagtaatttttaatcagtaaataaacgaatgagtctgggtgcagtggctcacgcctgtaatcccaacagttttggaggccgaggcgggtggatcacctgagctcgggagtttgagactagcctgaccaatatggtgaaaccccatttctactaaaaatacaaaaattagccaggcgtggtggcgggtgcctgtaatcccaasaaatcaggaggctgaggaaggagaattgtttgaacctgggaggtggagactgcagtgagccgagatccaccactgcactccagcctgggtgacagagggagaccctgtctcaaaaaaataaaaataaaataaacaaatgaatgggtgggtgaccacaggagagaaggagcacaaggccaggttctttttgtgcagaaagtgtgattccttcatcaaggtgtcctcttcctagcttgtgatcttrgttcatgccaaactttccctctgacccctccaccaccctcatcaggatagaccttgaggccttcagtggtctcatcagccctatttttaaataatttgttttctttttaaaagttaatgtgtctttttttttttttttttctgagacagggtctcactcctgtcacccaggctggattgcagtggcgtgatcgcagctcactgcggcctcgacttcccaggctcaagtgattctcccacctcagcttcctaaatagctaggactacagcttcccaagtagctggcacatgccgccacatccagccattttttttttgtgtgtatatatatagatagatagatagatccgccacatccagccatttttttgtgtgtgtatatatagatagagagagagagagagagagagggagatgggggtctcactatgtggcccattctggtctcaaactcctgggttcaagcaatccacctgcctcggcctcccaaagtgctgggattacaggcgtgagccatcacagctggccttcagtatctgcacataaaaagggatctgcatacatataatcttatccttcccctttctgacacatcactgcatattgaatacaccagtgtgcaccctaatcaatcttcattaccagttcacttggaagccttccgggcagtgttgtagaagccaaccctaatcagcgtgaccctccgctttgggatgaaattgattctaggtagggttgacagagggttgagcgtggcagcctttccccttgtcctctgtgccctctgggtcatgctcattcccctccacagcccagcccaacaactcggagagggctgcctgggtaggagagacggcagcccccagagctgtcctggactcccttctcatctctccccacaggcaatttctaaaccgggatgacattggcatcatcctcatcaaccagtacatcgcagagatggtgcggcatgccctggacgcccaccagcagtccatccccgctgtcctggagatcccctccaaggagcacccatatgacgccgccaaggactccatcctgcgcagggccaggggcatgttcactsccgaagacctgcgctaggggactcctcatagccctcagcccttccctcktttccaggcctctccccaggcttgccatcagccttctttactttttgagcctctgatttccaattccctgctccttcccactccattaagaggctaggtgaggcgcttytaggttgctggggctctgctggttaaggaacaggaagcctgaccatctcyctccactacctcttycctgtgctgttacacagtgtcattgttgatgttaaattaaagtcatattcttgcttctctccagatgggttgggtgctggaaaggacatgtgtggggtgaggccatggggcagattcggttggcaaggatggaaaaggtgctgccaaagacaggcatagaagaggtggcccaggaggattgtgccgggaggcagaactcaaggactggtccttggatcagagaagaccagctctggtctggggaggaatgggaggaggcttgagcccagctcctgcttcccccaccttgctcggcattgggctgggaagggggccagatccaaaggacagaagcagaaagcacacgaaacctgggagtctgtgatgccagatcccgcgagggccctgcgggagttttggggggagcagggctcttaaccagtgggccctggcctcaggctgcctcaggaagccaggctcatggggtctgctgggggcatggcaagtagaaccctggccctgtgtgaggtgaggcatggttgccaggtgactgtgcctgggcagccactcgccgtcagaagcactctgcttgctgtgctcacccctcagctgtggccaccctggtgccactccttccctggccaccatgtcacggcagctcaacatagacgcgttacggcagaacttctggaaggaggaatatctgagggaaaagatgttgcgctgtgaatggtaccgcaagtatgggtcgatggtgaaggccaagcagaaggctaaggctgcagcccgcctgcccctcaaactgcccaccctgcaccccaaagccccactctcacccccacccgcccccaagtcagccccttccaaggtgcccagccctgtcccagaggcgccttttcagtcggaaatgtacccggtaccacctatcacccgagccctgctgtatgaaggcatctcccacgacttccaggggcggtaccgctacctcaacactcgaaaactggacatgccagagacgcgatacctcttccccatcaccaccagcttcacgtatggctggcagctgggtgagcccaacctcttggaaatcacctcaaaaacagagcactagccatgtgctagggagtgggcatcctggtgaagggtccagactataaacagagcaaggagatggccaagaagtgtcgacacgttccacagaactagggagtggcggtgggcagggaggcagcggccacgtgctgctatttattggattgtcaggaaaggcctttctgaggacccgaggctgagagccagatgataaggatgggtttggattttatttgttgtgcagggaagctgatggagggttctaagcagatttcaagagtgacactggtgaaccttttaaaaagtcaccctgacctgtatgtaggcagtggctttttcaggggaaatggtagaatctggcacatgagttgggcatctgtttggttatcctgtggtagtggcctgagggatcagcaatagagctgaaatcaattcaggatgttttgggggaagactcggtggaactcacccatggatagaatgtgagaataaggggaagagagatcaatcacccaggtgtttgtttagctaaagctgcagtgacagggaagactgggagaggtcagggctggagcgtgcatgaacaggtcctatttagccatgtgtgtttggctatgttatgcttgaagtgtctgtagggtggctgtgtctataagtctggattgaagtcagagctgaagatgcaaattcggaggtcattggaatataggtgctttttttttttctttttctttttgaaacagtctgactctgtcacccaggctggaatgcagtggcacgatcttggctcactgcaacctctgcctcccaggttcaagagattcttctgcctcagcctcccgagtagctgggactgcaggcgtgtgtcaccacgcccagctaatttttgtttttttagtagagacagggtttcaccatattggccaggctggtctcgaactgctgacctcgtaatctgcctgtctcggcctcccaaagttctgggattacaggcatgagccaccggctggcctataggtgctatttaaatccatgagatctcctagggagctcaagttgctggaatctgatgggagtgggggcaggagggctgagccagagcgggtaggggatgtcattggcaggaagcctgtccatctcggctgagtcttttttctgtgaggttgagtcaaggccatcagcggggagggagctgagctgaggcagtggagtaactagagatgaagaggaaaggtgtggaacaggcatgtgccaggcagggctgctgggcgatgttgctgcacgtcccattgctgtctgtgctcatgaatgtcaagtgagactcctcagccctgtacccttctccagctgcttgagtgtcttgcagaaaaggtggatggttggggattgactcagttgagattttgcccccaaacatccctttcccccaggcccctaaaggggaagtcagggaaataactttctaacaaaagcaggaggcgagccctagaagcggggagcaggaggccgaaggaaatctcatctctccacagtctgtccctgtgacaagcaggctagggtggcccccctccctgcaggtagaggatcctgaagctagggtaatgatggcagatggctgctgtatcctggcatccagccagctcccagtatttgcccatagctcccattcctccaaagcactttctatttcttcccacaaagtggctactccactgacggattcctagggctgtgcagacagacagggctcccatgctctgcgtgtccctccctcaggaacccatgcttggcctctgacatcttttcccaggccccccagtgaagcaagaactggtctcctgcaagatgtgccgcattgagtcattcttccgcaagaacggggccttcgcactgcttgatccccgagacctggccctctgaccgtgggccmggtgtgggcttaggggagggaagaagaaataacaggcctcctggtggggcaaagctgctgtgtgtgtctgtgcccctctgctctccctgtccctgaggttgcattcaggcctttctgaaactatcagacctgcaagttgccctcttgctttttccgtaaccctcatcactttaatcatccctttgaggacycagcaatgaccagagggtgctgggaagggcgagcactacttcgcaggcacgggatcctcagcaccaggggaacacagtagttccaggaagttctgggtgttccyggggagagagcggcttgtcatttcggaggccagggaaaggggcctcctgccaccgccacacccctccttgccsgcccctcacctggcccygagggcccgcagccgctcsgtcctctcccgatgcatttgctccagctgctcccgcagggcgcgccgccgcccagccgcgtcctcctggcggtgcggagcgctgagcgtccgcggctcagtggggcgggcggggcagcacctggcacacctgcccctcgcgccccgccgagtcactgccagagtgcagtgcgctcacttcaaagggacccgggcgcgctaagctcggcccctgccccgcgcaggctccttgtggccccaccgccttctaggggtcttgcctgtggcgggagttgagccggactggscgggagccccacggggtgaacccggcagtggcggttcctggcgatgtggaggcgttccaggacctgcagaggcggcagtcagcgtccggccgcccctcggtgccccgcccgctccaggcaggccccgatcccggcgtggggacacacccggagccgctgctgctcacggtcccgccggcggcgctgccgcctggccgcgctgtgcagctccagcagccgctgcagagccgtcacctgctgcgccgcgcttaagcccgcaggcgccttggcggtgctgaggggcgccggccacgcggccttcaaggccttgggacgctcagggccgccccacccgaccccggagggcacccggaagccaagcctggcccacctcctgctcccccggtgcggggcccactccagggccctgcagcccgtgcggatcgcgctccaggcctgggggccccggagagccccgaggagcccctgctgcccggatacctcggcgcgcagggtcgctggcatctcggctccggctccgcgacctgggagccgccgccgggccgggggcttcgggcgggtaagcgcagcccacgccccctcccgggcggcccccagctttgccaccgccggtgccgacctttgtggctcgcctttgatcatgctctgcgtcagcgtggtagtccttctccggaggtttgggctctccctgcccacaggctttggagtctgtgctttcagggacccgcaggagtccctcggatggctatgggggtcgccttcctctgggggctgcacagtggcctctccgggagccacctcccaggcttgtgagatattgccttcccaagaccgcagcatcttcttccctggactctggggactcgcctttccctggcacttaggactaaattctcttcgactcctccctctgaccctgaggagcccttgggctctggcccccgtgtgtcttcaccttctgactctgaggagcatctttgatctcgccccaggaggcctcggctctcttacgctgaggggtctccgctttctgatcctgagggtcctcctctcagactcaggggtgtccatccttggtggtctttgaagttctgctctctcctggcccaggtgcgggtccgagcccagcccttcaagggcatcttgggaaggcaggttttgggagggcaggtcccccggcccaggggtcccgggagtgagctttcttttctgggtctcaggctctgcctcactcctctcttccctctgggccaggtcctggaaaggaaaagcactttgggcccaggtttgagagggaacctgcagaccccaggggccagcctttgcctgattcctgaatttgttaaagccattttatgtagtgtggaaggtgcttcactgaagagcctcctcctcaccccagcagcctcctcccaggcagacccacccctgccatccccaacctgagacccttgaccttttcaccttgcactctgagctacctggcaccccaaaactcctcctggtagtggggttgagctcttgtaaggagcctgaggaagaaagaccagtattgggagctcatgtcccagcccctcatgcacagttcacctagactagagccaggaagtttagggagtcccagtgcatggctaggggtgccctgagggcgctgtctgaacctcaggctgtcacagttcatcaatcagccagccatgcacctgtcaggtgtgcctgccaacagcctgccccatctttctcatcctcccagccaaggcagaccactccagagggacctgcacagccccttcctcaagaccaccacaggaggcctgggagtgagaagggtcacggtgctgggtgcctgggttcctcagcaccggccactcccactttgccctggtgtgcccatcaggcccagagaagaaacccgctctgggcgtcttactttttactcttattcagaaaaaccttccttagccttttctttgtttctgacagcaaaatcaaaggaaattcaagatgaaattttaggccagagcctggcctaaaaactgcaagtgttcataattaacaaaagamatctaaaaaaagagatgatgtgttgccgctcccctgcagctgtggaggaaggagagctgttctgcatccataaaaaccagttaaaagggatttcataaggtctgaaattgagaactttcccaagaatactgcatcttgttctcttgtgcaatatacagacgtgtgaatattcctaacagtaaccaaatgggtgcactctctgtgaaaacgcatctttcaaagagttttttaaacaaaggagactcctgggcctttagaaataattgccacaaactgcaaaaacaatctccaacctcccacttctgtaattctcatctgttgtcttactagaaaatttatttctctggtaataatgttataattgatatccctgtcttctcaagatgtaaaatacttgtaaaaacttctctgtccatcagaaaataattattggcacttttcttctctctcatgtgcatgatggaacaataaaaagcttatggctttgctagatctattatttaacaaacaatttgagagtctgtttcatttaaattaataggctcaaggctcacagtatccattc
